United States Patent Application Publication US 2008/0114160 A1 - sequence listing, part 59

SEQ ID NO: 20580 - DNA, 2279 bp, Oryza sativa
tccttttttttctcccaaatcgatcgatccaatgtaaatttcttgaaatcttgatctttgatgctcttgctttgaactcgcgatcatatgtaaattgatcgatcaagctgatgtgctcttggtgttcttgagtattagcatggaagctcatcagttcctcttcgatcaatcctatgtaaattccttgaaaccttaatcttaatgttctcttcctcacttgatgctcgtgctttcaacttgcaattctatgtaaattgatcgatcaagtagatgttcttggtgttcttgagtattattatagcatgaaagttcatcagctctcctgagcttgtgaaccaatttgtgttttgtttgttatcgattagtttgatcatggcatgttcagattggtctgccactttcaggtggcaaagcacacaactgatgcagcaaatatctatctccaatatatcattttcaagtgtgcaattcggagttgggagttagttggggggtaggcaactttattagtagatgagcagctgagctcccctctcgtagtctgaagcgactgcaaaggtgcaaagccgagctaacacgccaacgcacgcaattcaggggagcaacccaatcaactcccggagtcaaaaaactggagctgcacactggattctgcggctgcaaacttcttgattttcttgcctatttttccaatctatgtacaaaatcagccgtgagtaacagtgtgaggagtggaattctgcaacgtgtatgatcaactgcacagcataaattgcttaattaaaacgtgtgtggggtcagctccgacaaaaattagcacatagagtggatattctgggctaatactatttacttcatccgtcccaaaatttaactatttttagacgatacggtctacaagatgctactttaaccaacaattaccccataaaaataagatattctaaataaaaagagttacatattatgatagtttttttaataataaatctataaacatcaattttatattattgatcttttttttattaatagtcaaagtttaaaatgtttggcttatcactatgctaaaaatgcttatattttaggatggaaggagtatttttttcgctaagtgcataatttagaaaataaattagtatatgattagtaaagctacggctaataagctatggaaaaataaacaaaagaaatgatataaggataggattggctgggttaaaaaaacaaaacgatgaaaaatcacctaactgaaaattactaattttagatgccatttacaataaaaagaagaagggtaaaatataggcagacgtatggcccggatccatgcgaagattcatgacccgataaaaaatcaatgtagaaaataaattaatgaaaaacaatgcagactaggggtggatagcgagccggctcggctcggtctagctcgttatcctaacgagctagaaacccagctcggctcggctcgtttgaaagctcgagccagctcgttagactcgcgagccaatccaacaagacagcaagctccggaggaggggacctgtgagtgcaacctacgccttctctggcagcggtggcggcggccctagcgccggctggggaagtgcggctggtggcggctgcggctggggaagtgcaacggcagcggcgactctagcggcggtggccctagcggcggtggcctagtgcctgctggggaagtgcagtggcggttggggaagtgcggctggcggcggcagcaggggtgacggccctagcggcttgcggcagcggcgacgcgagcgcctggcgacagcggcggcgcgagcgcctggcgacggcgtcggcgcagtcttgtgcggcgaagcgatgcggatgtgcggtctcgactctcgtctcgtactcttgtgtggtgcggtggtcgacggatgaggaataggagtgaccgagtgaggagaccaagagaggactagggttttgcttttgctgttgtcttgggcttgggcctttgctattgtattgggttgggcctttgtggttgtctaataagtcctggctcgttaaggctcgcgagctggctcgagtcggctcgttatccctaacgagctaaaatgccagctcagctcgttaagaaaatcaaataagccgagccgagtctgtcacgagccgagcgagctaacctgtccaccctaatgtagactatgtttgttctcttagtttggagaaagttttgtagtgcacgtgaaacgagaaaactcaatgcacataattaattaactattatagatttaaaa

SEQ ID NO: 20581 - DNA, 3305 bp, Oryza sativa
taataataataataataataataataataataataataataataataataataataaacacaaaaacaaatccatcacccaaacccaagtgaagagaagcagcaaagagagagcttttccatccccaaatcccctcctcctcctcaaaccctagctaagctccgcttgcagcagccatggatcccaccaaatccagcacgccgccgccggtgatgggcgcgcccgtcggcttcccgcctggcgcgtaccctccgcctccccccgccggcgccgccgccgccgcctacgcgcagcagctctacgcgccccccgccgccgcggcggcgcagcaggcggcggcggcgcagcagcagctgcagatgttctgggcggagcagtaccgcgagatcgaggccaccaccgacttcaagaaccacaacctccccctggcccgcatcaagaagatcatgaaggccgacgaggacgtccgcatgatcgccgccgaggcccccgtcgtgttcgcccgcgcctgcgagatgttcatcctcgagctcacccaccgcggctgggcgcacgccgaggagaacaagcgccgtacgctgcagaagtccgacattgccgccgccatcgcgcgcaccgaggtgttcgacttcctcgtcgacatcgtgccccgcgacgacgccaaggacgccgacgccgccgcggccgcggcggcggccggcatcccccgccccgccgccggtgtgccggccaccgatccgctcgcctactactatgtgccccagcagtaatgtatctgattaacccctttcaagccttttctaagcgaaggatgtgttgttgtttgttgttgctgttgctgttcttgttgttgttgttgccgcgtaataagatatgttgataatttatggcttcccctgagcttaaagaatttgagcttttggttctagaatctgggtaaaattgttgtaatggggaagactgtatgactgtatttgtagtgcatgtcttaacttgtcggatagtgtaatccgataattattatgcggttagctggttacctctcatgattactgtgctcatgtgctgtgcaatttatgttctttgttttggatgtacaatgctgtaaccagaatttggttgtgtaaggaaactattaaaggttgtgcgagggcagtgtggctatcgctgcattttagcttacaagtccctcgtatgcagtaaggtttatgtgttcaaagccaaatgcggaagcttttcgtcaatgaagttgacacacttaacttaagtgccttataggtttttgctattattgatgtggttgacatacttggttgatttggtttgtcattgacaatttagctcttgtgtttggtttcaaggaaggttcttttttttgtcaaaacatgaagaaacaaaatatcaaatattgcctctccaatcttatacaccctccacccacaaatataaagaatctaggttgtttagaagagtttaatgttcaggtgaaattactttgatgcccctgggtgtttacttgattgggaaagatcattcctagtgatgcaactactagtaagtaataaatccaaaatcccttatattcgtggataaattttgaatcccaaaatcccttatatttgtggacggagtgagtatatagttactaaacaatagttccgcatttctaatttttcacctatggttgtatgggtttgcagaattatgcagttttctttttgctattgtttcgtagggcataaagaaggtaattaattcggttcttatttatttcctttacgcttctgtattttcagtcctcagtgtgtagagtttaaagtagtgatgtcatgtgtaagtatggattttcttttaccactgaatccctcatgcgaacttggatatgtggtccttttctgcacagttagtttatcaacacttcttggttatgtaatttgcagctactcatgtggaacaaccagcactacaaacatgcatttgcagtacacatcattcatcttaaactgctttacctattgggtttgctgataattatggctttaaagttagcaatgcccatttcatactgtaacggttatttgcttctgaaatcatattgaaatgtggcatgttatgcttcagaacatcattgttacgttccaatttgttcatgtgactttcatcctgttctatgtggatcatctacccaggcaggagcattccatgatactgcttgcatttgatatttggaaaagcttttgcttttagcatttgttttcctctctttggaatagcttcctctgacccagtatctgtatattattggactgcagtttataccttgtttcttctgattttattggctgagactatgctcttcctggaatgaaatgacaagtagttattacctctgaaggaaaaagtacaccagtggtctctcaacttgtcatcgagttacagaatcatcccccaaccgcaaaaccagatatccggcgtccgtcattcggtggttttgaccctagttttattcgacgtggcggctgagtcagcgtgggccccacctatcaggatgccacgtgccaccctctctctccttcccctcctttcacttcctctctctctctcgctcgcttttctcctctaccaggccagccggcgggtcgtaaggtcgccggggcgagaagggagaggagaaggcccgacggctggcgacaggcgacgaggcggcggcggcgacgcgggagcaggccggttggggaggaggccggcgacacagaggccataggccgtgcgggccgccgccagggacatctccacggccgccgtcgtctgggcgctcacgcacgtcgtccagcacggcgacaccatcctgctcctcgccgtcatgctgctgccgcacagggcacaactctggtatacatggccatgccttcctcttgaacagcttgccaatttacaatgccatttttatactgtatgattgagctctttggatttgtcttcatggatgaactttcactagttcaattacagttcttttcctctcgttttcaggcaagaagtcctgggagtttccgctctttgcagggggttgtgcgagcggccacaggagcgtgttgattcagaattcggatgtcgcttatttgtgtaatcaaatgatgctaaaacttcgtgatttttatgatccgagcaaggtacaaaaaggagcgctgttgtgttttttcagttcaatattccagcacaagcacaagcacaacaaaagcacgatggcagtggtgggagacggcggggcggtggccgtcatcgagcggcggcgcctgggcttg

SEQ ID NO: 20582 - DNA, 2023 bp, Oryza sativa
ttcgttccatgtcgctctcacgccgtgcgaatgtgccatgatcctgcatgcatcatcgccaagattatattcctcacattttttcttcctatcgctcctagtcgtctgtttgggagcttaaaattatgaaaagcagctgctgagaagctagctggtgagaatctgaagaatttgagttctagttcattctccagattctacaattacagattcttataatttaggtaaaaagctggactgtttgggagcttctgtcagccggagattctgtgagaagctgcagctgctagaagcttccccaaacagacccctagttgtactccagctgatcgattcactctattttatatgcaccttgctctctagcttatcaaacgtagccaagacttgaattttaaagcttaaattgattttgatgttcttttcatcgtaattcacttaccgaccttagtcggcatttgaatttttaaaaataatttttagagctgattttgatttttttttcagcggaatttattttcacgtatgtaaaagttttacctataaattattaattttcagcggagtaagcattagtgttatgggttataatcatctggtatgcttaaaatctctttacttggacttagttgggacaattgctaatgcattctcgtgcccatctctataaatacggcctgctagctttgctcttgtatctgcacacaagaactagctgcaaagtcctcaaggcgaacggcctccatcttctccttccagctcctcccatggcgtccctcgtcgccatcgccatcgccatggctctcatggtgcagaggatatcccagccatggctgaaattaacttgacgcatatcatctcatcatcacttgcatttcaacttctggattgtgcagacatgtttagctgatgcagtaaacgttgcctgtttgaattggtccttgatcaggtggttcaacctggccggcagatgactgcctttgctgctcggacgtcgccggcggcggcggcggaggcgttctggcgtgccgccatgcccggcgctcccatgccggacgccatcgtcgagctcctccaccatggtgaatccgtgaacttaattgtgtacactactttaaatgatactagtattagtgatggtcactactagaaaacaagtttttgcaggcagctagtaaatatttcgccggtaggctaaggcctgcgaaagtcgttgatttttgcaggcggagcctctatccgcttgcgcagacggcatccttgtatcacccacttgcaaaaagtttttgggggcaaaaaagaaaaagattaaaaaaaaagcaatttccactacatgcaaagcatcctattcaaatcaaaatcagattcattcaacaaagaaacaacatcgaacaggcagctacaatcagatgcactagaataaacactataagctgacatgtaagatcctcacatatatgaatgcttttgctgttatatatctatttttttaacgacggttatatatctaattaactaactatactataaacttatcttttgttttttgcttttatcttttataatatccgttgcaacgcacgaatctttagctactgatcataaaatgaacagaaataagagattatgtttttatacgtgggagcctctcttacatgcgtagctgcatgcgtgcatgcagagcacggcgttgctagcgccggcggcaaggccaacggcggcggcgacggtccaccgccgccgatgaacttcaactacgacgactacagggccctgcctcggagcgacgccccttccccggatgcattgaaccgcgtcgccgccgtacagaacgccgacgagaacggcgtgtcctcgccgccgccgccgccgccgacggtgttcttcctcgaggacgccgtgcgcgtcggcgagagcctgcccctaccgcgaccggcggccgacgcaaccgccgccggcgcagcggcggccacggcgttgccgccgctgcggctgtacaccgtccggtcggtgagggcaatcg

SEQ ID NO: 20583 - DNA, 2837 bp, Oryza sativa
ccggaagcgcggcgggcggcggcggcgccgccgcgtcgacttccggtacccggccgccatgtccatcgaggacgtccgcgacgccgaggaggagctcgccgtcgccgcgttccgcgaccgcctcgccgtgcacgccctcctccccgacaagcacgacgactaccacatgatgctcaggtggagaaatgccaagaaaaaagaaacagaaaatctatcattttttcccccaaaaagttgctaatgataactcccgttgtgattcaggtttctgaaggcaagaaagtttgattcggagaaggcgatgcaaatgtgggcggagatgctgcgatggaggaaggagttcggagccgacacgatcttggaggtgatcagagattcagatagtaacattttcacctgataacttacagtgtctgaataatttttggattgttcatttgttcttcatttcttgggtttcttgtggtttaggagttcgagttcgatgagctcgacgacgtgctccggtactaccctcagggctaccatggcgtcgatcgggaaggccggccggtgtacatcgagaggctcggcaaggtgtatcccaacaagctgatgcagatcacctcggtggacaggtacatcaagtaccatgtgcaggagttcgagagggctttcagggagaggttccctgcctgcacattggcggccaagaggcacattgattccacaaccaccatactggatgtccatggcgtggtatgtatgccaatgacaaagctccaacattgggtttggatatatgtgtgttgtgttgtctttagtgttggatttttgtcaatccttcagttttaatgttgctgttgttgtgttgttttgttttgtttgttgttgcaggggctgaagaatttctcaaagactgcaagggagcttgttcaccggatgcagaagatagatagtgattactatcctgaggtaattttggatttccatgggtgtgatgtgtgtagtgttggttagtgaagtgcacattttaattgcacatgaatttgcagacattacatcagatgtatgtagtgaatgctggcagtggcttcaagctgatatggaacagtgtgaaagggtttcttgacccaaaaacttcttcaaagattcatgtaagtgacatgtttgtgatcaatgaggattagcatcttactggtgtgttaaaattgggtctaaaattgttgttttgcttaggttcttggtacaaactaccagagtagacttcttgaagtaattgacaaaaggttagtatcaactagctgcaactagcaaccatcgttgaaactcagcttgtatatatttatacagctatagctcttcagcttaccaagatttggaaaatgctttgtgatttcacagtgaattgccagagtttcttggcggttcatgtacatgcagtgaaggtggttgccttggttctaacaaagggccgtggaatgatcatgtcattttgaaggtacctctcaatttgtgatcctgaccatacttttgtacaacagccccaacattagaaatgctgtccatggaagattacttgtgagttgtgacagcgttctagaaatgaatatccctctgaaaagtaaactaatgtggaagtttcttttgtagctgatacacagtatgaggagcagtagtagtatgagggaaatcaagcaagtttctgatagcgaagacaggagcggatcttccctaagggcagaaaaattgaaggcaaggttctgaatgtctcttttccttcaaccattccaaactccaatgaagtattgcttcgtagttcctgatgaaccttttgctattgtttcttctggaagcaggggatgatgagtgatatatcaaatgctgaatcagagtcagatgttgatgagttcagtttatcagctgtcctgaggagtactgactacagtttccttactccagttagcgaagaagtatgtgctgtgcttatttgttgaactatcctttactttaactaagatacattatctccagttattttgatgccttgagctatgttcttgatacattatatgaactgactcgatatcaaaatgcctgcactaggttaagggatcagattcttcaactttctgtagttgtgagtcttgtgacaggaagggtctcccagatgtaactcctgaatcttctcagtctgtacaacaatcttctgaaatggtgccaaaccaactggtctctcatgaacattcatccacaaccagatggatgaataatttaggtacctcttctttttcatagcaagttagttgcatttcagtacagtttccactttagaacaacaaaaagtgtatcttctgttcaaataattcaccacaccaaatatctctttcagattttgtcttttcagccacagtcttattttactgtataattatttataaccacttcttttgaatacccatttttgctcttgcagggaacatggcaattagttttcatggcactctgactggaaggactttgagcaatttcgttagagtagtaggcacactcatgatcaagatactagccgttttcagcctttttgtcagtagaagaggaaacatgctagagaatgttcatccttctaatgtagaagatgaacctcagcctcgaagtgcaacggaagataacatgagtgcttgtttacaacgtcttgaaaaacttgaatcattatgcaatcatctcatgagcaaacctccagatatgccaaaggagaaagagtgtctactgctacaatcgtttgatcggataaaaaccatcgaatcggatctagaaaggactaaaagagtaagttagtttgcaaactaatttgtcat

SEQ ID NO: 20584 - DNA, 2505 bp, Oryza sativa
  unsure (1)..(2505): unsure at all n locations
ctcaacaataatcccttttttgcctccctgaacattaccaatagcaagatcagtgatgcatctgtcagctgctgtagctctctgctctgaattggaggattgaagggagaatctgttgttacattgtctgaatttttgtgatccatatgctgaaaggacgtttcatggcggctgtgcttcttcctttgctaatctccaggcaagttcttgtttttctgcaatggaaatggaaagctctgtcctgcctgaggaacataaactaacatgacgaatnncaggttaatctgaatttctgaacaagttcttgttgagttcatgctgtaaaaagaacatctttttgcaagctgaacactccctgaaaatgcaacatttgcacagccactacattcaccctgccttcctaaccaaccatgtaattttttcctgagcaacagaaactaaaggttaataatcctttttatctgatggagaacggtagttaatctgaattcctgaacaagttctggttgatttcatgctgtaaaaaggaaaaaaaaaataactttctgcaagctgaaccactcctgaactgaatgcaatgttgcacagccactacatttcaccctgacttcctgaccaaccaagtaactttccagtagcaaaagacagtgagatgcatagctaaattacttgaatttcagaagagagtagagagggggagaaaaaaagaaaccaaattgctatggcttagaatatagataccttatcctggacccaaccaatccccacaacgcctcgaaaatccccctcctctccaccacaaaccctcgcattccccccggccccaccatatccgccacgtcacctcccgctatatacccaaaccaccatttacacgagctcgcgagatcaagagagcaccaccactcgatcgcagcgagacccaccctcaagctccaagctccaagaaccatggccgccacctcgctgtcgccgccgaccgtggccgggctgcggctggcgccgtcgccgcgcgtgcggtcgccgtctgtggcgttcagggcggcgccggcgaggaggaggtcggtggcggcgagggcggagctgagcccgtcgctggtgatcagcctgagcaccggcgtctccctgttcctggggcggttcgtgttcttcaacttccagcgggagaacgtggcgaagcaggtgccggagcagaacggcaagacgcacttcgacgccggcgacgagcgcgccaaggagttcgccggcctgctccggtccaacgaccccgtcggcttcaacctcgtcgacgtcctcgcctggggctccctcggccacatcgtcgcctactacatcctcgccacctgcagcaacggatacaacccaaacttcttctgatcattctcatcttggatggatgcaatgtaatctgaatggatctctggtgtttctacgtgattatgtatgagatgggtaaaaaagaaaagaaaaaaggttgattaatttggaacagtagtgcaatcgcgtgtgtatattggccgcatgaaatttgtcagtttgatgatctttctctatgctcatgtatcagttactttcagagtttcagacttcgtatgtgtggcactggcacttacccagaaactcacttaccagtgctccatgattcatgaattgcaatcttgaatttgcaaatagagagcaccaggcacagaaaagtttgaaagtcagtatgaaaatatgagactgattttggaacctatttccaatttcaatttatacggtctgcaaagaaatacatttatataggaacttttgacatttacagaatccagataatcgagaagtacattggtgattgaagtacagtaaagataagaagagattactagcaaaattgagttgatgttacagacttgaaaaattatagggtgaccaatgcttagtaaattacaataaggaacttttcaagaatgcctacacaaaggctcattggcgccggattttctaacctcaggtaggtacaaattcagaggaagagggccatagccggacgaggaaggttccgacggcgatgaacagcagaacaaactggacggagcaaaacagcgaagctctgcttgctcttgcctgcagcttcaggatttctgaagtcctagcaagatctttgcactgtgcctctagcttctccaccatctcctctagcatcagtgccctgttctcggtgtgccgtagcttagcttcaagctgtttgtgatcctcaggtagagatttctgaatgtcaaaaatagcagcttgatcctcagtcaggggattccaagcttgcgatgctcttgtcaggatgaagcattgagtctctgcttccatcttctccaggaacagttgatccatatcagattgcagagacagcagctcggtattgcatagaacatgctgctttggttgtttgtggttgagcacatcgagttcaagtatttctgaatccttatcattgatgagggtagaagcttcgtttagcctagcctcgcg

SEQ ID NO: 20585 - DNA, 3832 bp, Oryza sativa
cgctacacttccaatctttcatggtgtattcttctatagttaatttaaccagtattatatatttatcttttggaatttgagagattcccttgtcttgaggttttgtggggattctaggcccccatagacttgatgatagtaccaaacacttgtacttttactccatttcacagggtgtgtggattcccacatctggttcttctacttagtggcttcgaccttcaacacttctgctcggtggtggccatgcgagatgatggtgacgatttgaagattactgaaattcacatggcattatggttctatgtggcaggaattcttgctactatccgttctatcgtttagtttttctttgagaacctccacttctgttttcttgaaggatttttgaactcttgctgtctgtcatgttaaaccagtgatgttttagtcaccatctatattatgttaatggagttttcatggctattattatatccatggaaaattttatcgctgtattagaaattcatacggttcgattacatgctagacctcttggagagtggcctgaaatctttgcaaaagcaaaaaaaatgtggtcagtttttgcatagaggtgtgatcccaaccaggatgtgagataagcttgcatgaggcccatgctgttcgctcttcttcaaccaaagtttgagcataagagtacgcaaaccaaaagtgaaatcgttttttccgaattcgtaatcccgtagcaaaaacgtattcctgggagaaacgtgcttctaggccttgtgggtcatactgggccttcctcttcctcgttggtagatatttctaatatttttatccatctcacacatattccaatataaaaaaatatattcctattttatcgaatcacaatacaactatttcttactttgttatctatttccaatacaattaattttttactttcacaaattttgatgtaataattactttaaaaataaaattatttcagaacaaatgtaaagaattaaaaatgaatttattattggacgaaggtagtatacacttcttgtcttttccctactaaaataattaaaaaaataagatctctttccctttcgaaaccaccgaaacccaccagcggcgaggggagcggacgccgaggcggcggcggggttcgtcgatgcgttcgtaagtggcaaagtttcgcaaaatttcgccttctctggagtgggtgttacttcggcattggtttctgttggttccttggcgacaggatgagatgtggttagggttcttcgtgtggttactgtggattccgggagaattttctgtcttggagtgggggagaattttgtgtgaattttaggttgataaatgaatagtgatggctttccttgagttgaggggtgtttgatcttgaattttcttgattgatcccacctgaattagattcagaagtaggagcatgcttatcctggaaattggctaacagaggagtgacactatgacagggaagaaagcgaaggaatgcaggagtggatgatattgtcagagtagaaaaaaaaagtttttcccccctcttttatgggcaaagatatgttagtaccatgaagcttttgggcagtcataaggaggagaaaggggtaatcttgatatggtggtgattagtttcttcagttccattgttcctctgtgatagttcattatctaaaaaacctctgtgatagttaaaattgacttgaattatattgcttaaatgtattaaatgcatggtttatacgttcctcgattaggtttgttctgaaattttgtgaaattattgctttcaggaagatctggtagatcctaggagcaaaccatggcttctaagaaagccttggcaatgcagccaagcaagaaaatttgcatgaccttgttgccgcaagacattgttgaactgatacttctgaggcttccggtaagcactctgctgaggtgccgtggtgtctgcaagcaatgggatggcattattcgggatcctcagtttgccatggtgcacatccagcgtgcgccgcgtcgccccctatttttctttcaacgagagaatttagtccatctcctctaccctagtgaagcaatcctctttgatgaagcatggtcaccatcaaaatgggttgtacctgtgatcgagcctgatgattttttatgtgcttcatgcaatggacttatttgtttacactcggataaatcaacaatcaagatagccaaccttgcaactggtgaatgtatgcatctagtaaaacctgtcaggaactcaaagactgatcacttctcttattacagctttgggtttcacccagtgacaaaacaatacaaggtaatgcactttcttcgtgacgagcacctccatgttggtactagcttcagcataattcaagtttacacactcggtgatgagaaatggagagatgttagaactccacaggctttaagcttgagatgtgtggaaagatctggagttgtcaatgttggtggggcaatgtattggctgactgaagatgaggaaagtgtttggaaacatgcagttgtgacctttgatctcagtgaagaacttttccagtggttacagctcccagcagttgatcctgcaaactatgtgcttggtgatcctgaccagtggctgattacagaggttgatagcaatgtgtctgtaagctattacgagacagggaagctgcatatctggacaattgacagcaagatagagcaaagctggagtcagaagtacaacattcgcttatcaatgcttgaagttccaggaccacattggatctgcggtgataagattatcttgcatgattttaataagaacctatatttctatgagttgatggggaagaattctgagattgagtcgagcaagttagtgaagcaattgagattcagcccccgcaacaacatgcaatgctttatgtttgtgaagtcgcttgtacggttggatgcattcagaaaggctggtgttgtgcgtaggccaaagcgacaggagggttggaaattgaagaagtgggaagtgtggatggataggctccatcgactagagaatcattgcagaagtatccatgatatgaaaccaagatttatgtatatagctagactttctttacataataggattcacgaatttttcttgatggtttgacaaattcctaactcatagttactcttttctgtaggaaaatgcagataaaatgggcatggagatcaaactagatttgcagcagacaccagatttggtaaacttactgcttctgcatcgaattggaagttgtgcagcttttcatatttctggtaaaaaatagctgtgaatatattgtaattaaaactattgcaattatcttgtgtgtgaatgctgcaggatagttccctgcggctgatcaactggttggagtataggcgggtactagagatattgtgtgttaatctcgacaacatgcatgaagtattaacggtatgtgggtgggctgatgtgtttacttcttagggtctctttgtttaggcttagttttttaagtcagcttttggcttatataatttataagccgatggatttaaagtcctaaatttaaggatgaaattatacctctatctcacataagccaaaaaaaaaaaacttctccaacctagcttttagcttaatagtgtaatactggcttatggctttaaaaaagccaaacgaaaaaactgcttatttttttagacttacactttttagctcataaaaacaaagagggcctaattataactatttgtggtttgtttttgtgtcttgtaaaactgacaaaatttacctatatttaggtcatgaacaacacaactggtg

SEQ ID NO: 20586 - DNA, 5397 bp, Oryza sativa
aaatttgaataaaataaatggtcaaacgttggttaaaaagtcaacggcgtcatacattaaaatacggagggagtacgtcacagtggactttacattagaccctttattaatttactgaagttcaattcatgtcagaacctttttgatagatattttcgctttgggcaccattttaatttctttatcttcgatttgcatgatttcttttccacaacactgtatcatctccgtctagacagagaacatcgtcgtatattggtagaaacatgatgtagatactctaaattaacttacctgacatgtacagttactaatagggacaattacaaatttaccactagtttgaatcattattacaaaattgccattagaaaattacaaaaatgccactgaaactatcattcgagtggcatccttgtaatattaaaaaatcagtggcaaatttacaaatgccccctactaatatgttggcctgtgggtagtggggctcacgtatcagtgaccacatccctccgtctgtatgtcaaagcctcgaaggatctcaatctagtggagagacaagaggagcatggctagtgcatagatcatagtggcatatcgagactagatttgtatataccaataaaattaaaaggtggttcaggcgaaacaacaaaaataagagaaggggcctggaataaatatatacgcttagaatacaaaataaaacttcgctaacaagcgtcctaagctgtaaatgtaatatactcatctcaagatatatatgttgaataggaggtcatgaataaacctgtgtaactattaaaattcttttaaaagcatagcttgcataattatatatgagtacaaaatatatggaataattacatgtgccccaccgatggttctacaaaagtatttttgtttatgtttcttcctttttcgtttgacgtgtgttcacagatccaaacaagcacttggattccttatgattaaaggctagctgatgcaaccacaaccacttagtaaccctttttatagtgattacagaggtgcgatcgatcgatcgatcgatttggtatgcctcttacgagaaaaagtttatgcttggtaatgtaacaaaaagtatattaaggctttgtaggacgatcagtaagcgaaggataagttaaaagatactgtgagctagttgacatcaatctcgatctatatataatctttaatttgctcttctttttaggtcggtactcgcggtacatacacgttacacataatgtttaacctgtttttattggagcaagatattaatcagttttgctaatttttatactacctctatctttttaaatatttgttgctctatgtttattctaagtaaaacttgcttatatatctttgaccattatccgtgtagatttacaacatgtgatcaattatatattttaaaagcatttctaatgtcaaatctagaaatataaatcttacgatgttaaactagatgaatgtatagaaatagaatggttgaagattaaaatatttgacttggaataagctactaatttgaaatagaaagtaaaaaatgcatctggctagggcaatttggtatacattatagatttctcatttgtttcactttgaatcttctctccacatgcattgcatgatgattttagattgctctagaaggttaggtatatacatacgtttggttcatatccatcgactcaaaacaacatgtgttgccaagtcttttatggcgatcgagtacgccgataagattaggcaaaaaaacaaagtttaattaggcaaaagctagcctacctttcttgccgttatgaagtagttatggaaatgacaaaaaatagatcacaagctagcttgattggacgcttaaccggtacaacgtccacgctacgcacgtataatctatcgtcgtatgtgacgggttgatcacttctgaagttgaatgtacaacgaccgtacgtatcattgcacgtccacgcatacactctcttcgtccaaaaatatatacttcttctgtttcacaatgtaagttattctagcatttttcacattcattttctacattcatattgatattaatgaatctagatagatatatatttctagattcattaacatcactatgaatatggaaaatgctaaaaagacttacattgtgaaacggagggagtaacacacatttactgtttatatagcatttaactattcgtcttattatttagaaatttagtatgaatatgttaaactataaggtaagaacataaaaaacggtaagagaaatcacaataaaataaataatatttattatttttttctgaataagatgtaattgaatgctatgagaaagtcaatggtgttttagaatgaaggaaatatatcctagtatcagtactactgctcaagaggtaggtagcatagtcatatactcacatgtatagtggtggatatactacacgtatgtagtggtgaccgatgggatggatgatgtgtgtagtggctaccttttgagggattgagtgcgaaacatccttattattatcttctcatcctgatgaggatcatcagtcatagctcgtgatactatgtgcaaatgatccatataacgtgtgtgtgatgattgaaaattgtcattgttgtaggcacaaaataatcgaaaccagaaaatatcttgaaattgacgatgttactagttaaggacactcatttaatgtctagttttattcttcgtacctatcaaaaggaggaaaagaagttattattcttgggaattttggtatgtttaacgttgtgttcgtcggtgtgaaaaaactaaatgggcaatataaacctcaagatgggccagttcatgtcaagcccatttctcatgggccgccacaaccattccacccatgatccatgtcactccctctctccattctccggtgccacacgcacgcaagcaggcgcccggccggcgacggcgcgacgccgccgagatgagggtcgccggtgatgcgagcaacctaccggggcggcggctgtccggcagccggggagggagtggaacctctcgaggtaatcttccgaatccgaatttgctcggtttttgttttattttgttttcctgggaataatcatcgataatattagaaagtgaatatacccaaccaatataatcgatataaaaacgatcaactgatataacattttcagcaatctgctaacctgaactaaactaggctaaacagtattctgaatttctgacagagttcttgcattcccccaaaaaagggataaactggcgtaacaaagtaacaatgcaccaatacaactcccttcaaagttcagacgctggacaaaatcccccaaagacgccatccatgtttcatctgaatcatacatatggttttatacagccaatctaaatagttctaataattctgattaatacaatactagtaatgtctgaaataaaattgactgaaataccctaaatcaatgcctttgcatgccagaatgcaaagttcaattacacaggaagctcccaatattaattgtcatatctgaatatatcatacaaacaacaaggtatgcaaatattgaacacaaaacatttgataaataaaacaatacatgcatgcttttggtcttatagatactatctaattgaacgaaacggcttaccgtgcattaccgcgtggaggtcaaaattttgaattcaaaatttggaataagaatttatcgtggttcacactctattgggtaagtaaatagaatactgacagcaagttaaaccctacggaggaagagtgagtccatattgtctcatctacaaaataaaatccagagaattttaaagtcattgcagtccagcagattactaagtttggtaaagataatctcaaagacctcaacgataaaggccataaaccaagataattccatagtagaaactggaaacagagttcttacttgagtagagtaaccatggatactaatgagtcgagactcaaaggcctttttcaaacagtggagtttcacatgaaacaaatcaaattatggtagataaaaaaaagcatttcattatagaggtagactcattttgaacacaaattatcacacaaacagaaatattacacagtcatttcaagcgatacagactacaaatcccgaacaagcgatacaatgatacagagaagcaaaacagtttcctccagggacaacagtagttgcaaaagcaaatggacacctctattacagattgcagatggcaacacatttagccatttatgtggacaacatacagaaataatatggtttatcatacagcatcacttttttttagccttacttcttcaatgatcccagtttatcccctaaggcagtgctgccttatgtgttttaaagcattgagatcttgacgtgacgaaggtgcatcagactagaaagtctgtcaggtaaatggcacatcttgaacagagaacattctaacagacgcaaggattttgagttcttcacgacctctgccattgcgtataccacgtcctcctcgacattgccacaatcttcaatgatgactgtgcgcagcttcgtcaaacggagcaattccttcacatcaacaacagtgaaattgttaatacctgcaatactaatgtgtcgaaccgaactcttcacgtttctcaagtctgcggcttcagttaacctcttacattcgccctgtgagatatatgttgcaaaatcatgcattgtgtcattcataacatagtatgcaggttcttcgttttctccaccaaagcgatcaaggaacaaatttgcagtcaattgagccaagtataactctccgtcctttttcccgaattgaggaaatatcaatcctgaccaaatccaagccctcaccaactcctcctttctgaatggatgattttttggaaataagctgcaatagcgaaagcaactctgcaactctgccgagagcctgtagtagcttattttcaagacatccataatatttggtactgctgctccaaaattatccataccgtgaagaaaccttcgccaggactctaatgatcttactcgtaacagataagcagcactttttattgccgcgggagtccctccaagtttctttacaatcttagcgccgattgattggagttccgcataatcttctgatctttcattcagatcagccaaagcaagttggcagaagatctgtagatttccattttcttcaagttcatgcaacctaaggtgctgatcttcacatcctgtgacactctcaactagagttgccactgattgcgttctggttgtcaataaaattttgattctagtgttgatgcccctcagaactgaaaatagtttctcccattcatgtagattttcttcccagacatcatccaaaacgagtag

SEQ ID NO: 20587 - DNA, 674 bp, Oryza sativa
ccattaaacaaaaacgaatgtttaagaaaagatgcatataaaatgcagcgaatgttggaatgtgcaacaatatgaaattcctccaaaagactatgcaacgatataggagtatctcgcaaggagatcgaaagcgcgaaaaagtagcacaagcgcgaatatcaattttcatcattgactaatcaaacacagccaaaattttaaattttaaagcataattctatatttctatagttcgttttgaaggttttttttttcattcattcttctgcggcccatttaaatggttttctgctctgattgcatgcattgtcttatctcaagaaatatgcagtaacagactaaagagaagcttattgagcactaaatacaaggagaaaaacatttctgtcgaacagattattcataaacatacaaatgccaaccgatatcgttatgtacaaaactacagcgaatgcgcaacataggatgggtttggtatagctctgaaaaaagccgttcaccctggtctatttccttcacgagtcactcgaaaacaggagctcatcagtaggcttttctacctcatcttcctggcattggcgatgaaacacaagcccctcaaatcacatcgtcagggcagcctttcttttcacctttcacttgagttgtattccggcgtcattaccacaaactcc

SEQ ID NO: 20588 - DNA, 20109 bp, Oryza sativa
  unsure (1)..(20109): unsure at all n locations
tcttacagtgggccattaataaatacatcatctctcttctctaccaattatatttattcttcgtctattatgaagacactattctctcccaatgcaaaacttgatagtgtctagtgcataggttctcgtgttgaagctgtgtcttgcataagatccagtttcttcctctcttcactctctcttaattaatatagtgccacataagctaaaagtcctacatggcaatgtagttaatgccatagacaccatcctagatggagagttgtgactgcccttaagatggtgtttatagcattaaataagcagccacctaggatgaaaaatgatgtggcaagtgaataaatgaggaaagagaaggaaaccatgtcttgcatgagacatggtttctacataacatccaagacaccatgtgagataagtagcattaaagttaagtatggaatagtggtgtttgcattggaagagtagggtctagtactagtttcttgatgatgtggagtttatagaaactatatctagtgtggagattatgggtaccacatacccacacggcatggttatccgactagttataggggataactcatatctatgaaatatgtaacagatcatgacttgggtattacgtttccttgtatattatggaacagcctagagtcctgatttgataatgttgtaaagtatatttaggaaaccgataccgtattggttaagatttctatcatgtaatcttgctcctcaccctatataaggtgggcaggaggccccctctagggggtatgacagaatatgatcgtcagatctatactacacccggcggattcaaatccccaaacaggagtagggtattacctctcattgagaggacctgaacctgtctaaattcttgtctccgcatccatccacttttaggtctcgtgcgctaccctcttttattattgctaaattcatgtttcgacagttggcgcgccaggtaggggttgcgtcgaatttcccgtcgagaagtgcgatggaatcaactccatgagtcgccggctttgtgttcacttcagggcagatttcttgcatgaggagtttgactttctcgccgccgacaatttcagcaaattcctgttcgatctcccgaacactgcagtgatctattccaagctctccaagcagccaacttcaaatccaatctgacttcggtcagcctccggtcaaccgctacattcatcacatcaatctccgacgtcagcatatacgaggatctacatggctcagccgctaccaagaaatacatcaactctcagccaccgccaatgttttctcgtcaaatatcaaagtttctggcgagattcaattattaacatgaatcggagttgatgtgggctcggagccgactgatcggactcagccatgcatactccggactcatatctggccctgcacgccgatgacatacgtgcatcattaagagtttgtgtgacaaacatttaccaggtctatcgttttaattttcttacataatctagaattaatattgatttttctagtcatctaattcacagatttctaattattttctgatctgttatttttgtgtgcacatacatacgtggcatccgccgccattgattggtgccttcacctccacggttgatgaactccgccgccgttgctgatggcgacattgtcttgactgccggccgccgtcatcgccgccgactggtgccctcgccttcacggttggttggtcacatcaccgttgttgggcatctatgtcttcaccgctggccgcctcgtccgccgccaactggtgttctcgcctatacagttggttggtcacaccactattcatgggcgtccacgtcttcatcgaccggcctgcctctgtcgccgccgactggtgtcctcgcctatacggttggttggtcacaccaccgttcatgggcgtccacgtcttcaccgccggctcgccttcgccaccgccgactggtgtctccgcctgcacggctggtttattatgccgtcgttgttgggtgtctacgtcttcaccgaccggtctgcctctgtcgccgccgactggtgtcctcgcctatacggttggttggtcacatcaccgttcatgggcgtccatggcttcaccgaccgacttgccttcgccgctgccgactgatgtctccgcctacacggctggcttattatgccgctgttgttgggcgtctacgacttcatcgccggcctgcctccgttgccgccgactggtgtcctcgcctacacggttggcctattatgccgtcgttgttgggcgtcttcgacttcactgccggcctgcctccgtcgccgccgactggtgtcctcgcctatacggttggtggactccgccgccattgatggacctcgtcatctacaccaccggcttgctcccgccgccgccaactggtgtctttattgttattgatggacgactttgttcccacattggccacctctgccatcaccaaggggaatattacaaagctaagtcatcattaaattttctttatatgatattttcttttttctctgcctcactacatcaactggtttgccgttgactagtgagtcggtggctacagatgttatatcatattttttcaacaattttcatactatttatcttgattgctcgcgacataatctgagtacaaaagtgcctatcgagttatggagttccatcttcctatgatttccgtttggtttgccaatggatagttgccattgagccgattcctagcaccgggggctcgttggatggaccgagtaacgcaaggtgctaagtattactcggaataaatcaaaagcatagagataaaataatttattttctgctcttaataattgtaaaagtacccgagtagtaaactctgatccgtgaaactttgttccattaatgacgaactcatgtccctcatatgcatgtttgggaagtgcctaagccgactcccaatgcttggggactatgactagttaggcagagtgtttaaacgtaaggagtcatctgctcggagaaatcaaaattgacaagaggagaaatacatatttataaatattttaaaatacttaaattttcctcgagtattatatttatatcagatactactcatcctatatgtttgttctttaggatccagatccagatatgcataaaagggattcatggctttaagcttatctcctacgctccaggaatggatcagtcagaacatcaccaccggcttgccctcatccgccgccaactagtgtcttcgcctatacggttggttggtcacaccaccgttgttgggcgtcgttgtcttcaccgaccggccgcctcgttcgccgccgactggtgtcttcgcctatacggttggttggtcacaccaccgttgttgggcgtctacgtcttcaccgaccggccgcctcgtccgccgccgactggtgtttccgcctgcacggttggcctattatgctgctgatgttgggcgtctatgtcttcaccgaccggccgcctcctccgccgccgactggtgttttcgcctgcacggctggcctattatgtcgccgttgttgaacgttaacatcttcaccgaccggccgcctcgtatgatgcctactggtgctaccgtcttcacggttggccacgtcggcgccactgctaataggcgtaatcatcttcaatgcaagctgtctacgtctgctgccgactggtttcttcacctccatggctgcatgattctgccagtgttgattggccttatcatcttcatcgccagtcgtctcgtctgctgttgactggtgtcctcgctctacggctggtttataccactaccactactgatggacgtcatcgtcttcattgctggccgtcttgtctgacgctgactggcttgttcgcctcgacggccgcgcgtctttgtcatcattgactagcgtcatcctcatcgcctgtttgccttcgccgccgcccatggtgccttgactttcatggctggcctattttgctgccattcaaggacatattcattttcgtcatcattctacttcttccgtcgccgactggttaagccgccgccgactagtgtttttatcttcacaactacgcgtcttcgctaccagtttgcttctgttgccgtcgactcgtgttcacttcatcatggctatgcaaccttttcaccatggtggagcgactttatctttattgtcttctgcaccggcaaaaccaattgccgctacttcgcaagttttgctgcttcaccaaccacgacatctacaagagcctcaacatctcggcatgcctcaccaaatatgatgtcgtgttattttacaacaacaagtggtgttacaatcttcaatatttctacttggacatcttcaacatgcatcttcactctagtgatggctgttcgacgacaggaagctatagttctcgactctatgttcaattgctttccaactaaccaaagagtcgggggctacacaaatacaagactcaaaattcgacaagttttatgtcaagatgaagtaatcaatcaatcaatgagtcaactctaggagttattatctttatcttcgcttcagagccgaaatttgacttcagcgactccaattattacaccggcatttggatttctagacgctgccacaatttactctaaaattttcaactatcaagtttgagatttaatctacatgtccgggagtttagagttatcaaccaatcagctcagttttgttgagttggacaacagcatatactttcctccaagtgaagcatctgcaacagctacaagaccaagttctactggcatctttataaatcaaggggcgttgcatcagtcttcgttatgcacacgctcgcatcaaggaaactactcgagctttgatatcttctcaatagtttgatggattattgtcactgacatcatcactagcatctctgcttcatcggccctgacatctccgctattgctaatggctgattatgtcttcgccgacttattatttcaccttcacgggttacctactacgcaaacgctgatgagcgtcttcgtcattatcatcggctgctacaccgctattgattggatcgccggcatcgtcatcttcatcaacatcctgtcaagcctcttcaacatagcctacactgctgccgttgatgggcaacttcgtcaccatagccggctatctttgttgccgctaatcatcattaccgtcggatgcgtttgccgtcgccgactattttcttcatcttcatgattggtggattttgccatcaccgttgatgcgcgtctacgtcttcatcgacttgctttcgttgccaccgactgctttgtcgttgttgttgggcaccttcatcttcattgctagctgacctgaccgctgccgactggtttctttgcctccacggctgtgcgacttcatcacctttgattggtgtcactgtttttactaccactgacatcttctgtcagctttgatgggtgatatcatcttcatgttagtcatttcgtctccatgtcgactgcatcagctattgccaatggacaattttgactatgacagaaggacaagctatatatttgctcaggggcttatcaactcaaacacagggatcataccttcaagttggattttgttctgagattattttctatgctcgaagactggaccaatcattattccccgtaagggctatcaaccgaatacttgcgccagtcgggattcaatttttatatctattttggagtatcccataagggataatcactcagatcaaaagctattcatatgagctacacttggtctatatcactcggaagatttattactcgagagcatgttacatacgtcatcctttaaagggtgttgaaggcatatttttttggcctaggcctaatatgtctgtagcccatattttcaggtgtggcctgtcacgttcttttagggacttaggcactttttgcttatgctaaagtgcgcgtgatcaagtgcccaataccttaaaatccttttataccgcagttactcaactttttaggagttggtacaatgcattttaaaaggtgcccagcagtgaacttttttcatagctgtcctactgacttttttatatagttaaggcgctgtttgggtttataaagcaattgattggataaaatatcattgctttttgccacgtaagtgtgcatttttattgaccaatattatggcttaggctgattatatattgaggtcattttccaggcagttggtaaatcctttatgagtttatttactcggatgttacaccacatatgccatatatttttaggtgtggtgaaaccatgtgtcttttagggacttaagcacatctgttaaagcagtgtgcgcatggcgtatgcccaatacattggaaatttctttattcacaacatacaagcttctttgtagctgttttgctatgtgaatttttaaatgatatagtcaactttaggttgcacgcatcatatgttacaaagcagtcggtatatcacttggatcatattattcagggattcacaccgcatatgctatatattaatattaagtcactcggttgactacaattatcaaaaccactcagttggttggattatttactctttgactatatgtttagtttgttcaactatccatatagtcggggcctacacctattaggtacatctagtcgatgcacctaagtctacagtcaattatttttcagccctccacagtcttcaaatttggtaaaagtactcgggggaccatggcgaagatgattgaagcactcggctttgcagtaatctagtgcgagagaagattatcttttcgactgcgaatgtctcaggggctactgtggagattatgggtaccacatacccacacggcatggttatccgactagttatagaggataactcatatctatgaaatatgtaacagatcatgacttgggtattacatttccttgtatattatggaacggcctaaagtcctggtttgataatgttgtaaagtagatttagaaaaccgataccgtattggttaagatttctatcatgtaatcctgcccctcaccctatataaggtgggcaggaggccctctagggggtatgacagaatatgatcgtcagatctatactacacccggcggattcaaatccccaaacagaagtagggtattacctctcattgagagggcctgaacctgtctaaatccttgtctccgcatccatccacttttaggtctcgtgcgctaccccttttattattgccaaattcatgtttcgacatctaatgtcttgggttgagaatgaccttattgtagcagtagtagttgtactaatggactaatggactaggcaggcatgactgaccgcgcggatgcaggcccgcgcggctggtcgccgatcaggcacacccaccgccgccacccctcccccacactgcgattgaattcttgaagggacaataactgattcactggatgaaaattgaagtccccaaatatttcgagtaaaattaaaatctgtctttttattgctggacatgtatcctattgactggccaaacacgatcgaggcaactgaatttttagagaaccgttggttcccacacggacgccccaggaaaggacggaggtagcgttgggaagcgatcgggaactgaatagaagtgttcaaccgaaaagaccggaagagatcgggagggcaaggataggatatagagaaaaaacaacctgcaccatctattaaattgaaatcaatatgtttagattaaggttaatatgaaatttaatattagttatgtgcgacatacgccatgaatctttcattagttagatgcatcaatagtggtctctgaaaaagaaaaaaaatattggttggtttctttaagtatatttattttgaattgtcatcgtgcttagtttagatatatatctaagcactacttttcttttagtactcctgccaatcgaggcatcgagccttttgctcttcctaaccccagtcgctcccaatcaagacatcgagagctgccagatttaataacagcacagattttctcccgattggaagaggattggaaaaaaaaaaaaaaggaaagaaagagggccagcctcctggccttcaggacattagacaagttggcccatactccctttggcccagtaacacggtgggggcgaattcccctcgcttgcgtacctcgcgtacccgagttaggtaaagattagttcgtcgcaaaccgaatgctttgtagtcaacacaatcttacacaaaaatctcacacatacctggaagagatggggcctgagagatgacatgaggcaggtcatagttgatgcccctaatgtgcttgtaccgcgaggtgatcatccccagggtggatccgtcacccccaccgacatcgacgagctgctggacgccgtcgaatccttggaagcgttcgagcatcttgctgaccagaatcactgaatgctgcgccatggcgtggtcgaacagcgcgcccagccgctggttcttccccatgtactcgaagtagagcaacccgtgtgccctctcgaacggcgccggcccgccactagtcaccgctgccgctatatgttgcctacaagaacatgcatagcagcatgtgatgtattttcgttggcggtactcttaaaattaactctacctgtagaaatcaacttttacagacgggactatatctagctggttatctggaaaaatgaaaacccggatcggatattggaaaaaatcgtcaaatttttatagcgataggaagaatacgtatatataccagggcaataggtggtcctcgtcgacaacgaacacagtgaagggagccagcgatccctcgccgttgtttctggtgagccaccggcacaccggcgctggcatgtagcgccggagaagtgcgccgtcggggcttgtctcggtggagcacctcaccacatcgaaggatgcgaggtaccggagaatccgatccaccgagacggccacctcggccttgtccgtggcctggattttctcggcaagctcatccgcggtcagcgcgtttccagcggccgcgctgagcgcatcgagaagaccaagctggaccgccgctctcaggaccatggagcggttgtaggcaaacatgagttcttgcgcgtacaagcaatgctcatcctccttctcttgagcatcactagcagcaacaattttttccatggctctaacacgaacagtcgtctaatcctgtgtagtgtattgcatttgatgcctcttacatggtataccgagtatgtataatgggagagcgggggcagggaggtgccgagtcgtggtgagcgaactgtctcttatttccattgtgtcctctcttaataatgacaagtgcgatttttttccatggtcaacaatcctgtactagttttgctagctttgtgattaacttcagacaacactgtacatcaattttacaagagaaaagctaaataaaattattcaagtttttatatttaactagttacatacctgtgcattgcaacggtaccagatgatacaaatatgatttagtttctttctatgtcggtttttataattggttggattttttttgagcgttttttaaaggaggaagtgattttttttctttaactagagggaacggttcttttgttgttggaggggagtaaggggacgattctctaaagtattatgacaattaatataagattataagtagttttatgggctacccatgtgtaagacgtccgatgaaactcgaaaaatcgaacgcccacttctgtgcttttgtagcctctagctttctcctttagctctatacatgcatgttatatgtagggcccacatacccccacttttacatacacgctctctttgcacactcacttatttctcttctcttccctaagtaacttagttaacaatctttaaacttttttcctaaattaccttttcaatttgagatataattacattgttatatttactacaattaattaaatattcaagcaagatcttacatgattatattatgaataacaaacaattatattttgaattgaaacatgtttgtattatatatgaaacattgaattttaactgttgaaacattaaaagaatataacatgcaacattttacaaacataaggaaaaatacttattgaaacatctaaataacacaatgtacaacatttaaaaaaatctattgaaaaaatgaggcagccaaatgtttcagtagactacctatgaaacatcaagatgcacttggtgaaacataaaaaagtagtcattgaaacaattaaataatttgtgaaacaccatgaaatacttgttgagacatttctctatcaagtagaaacattaaattttaacggttgaaatttaatgcctccatttttgtttcaccattttgacccttgatagagaaatgcctctatttttcttttctcaggatataaatataatcaagtgatatcttgttataaatatttaattataattaataaaatggtgccatcggatcatagattaaatatgtaatttatgagaaaaatattttatatttgttaatagaaccagacatgcatgcttaagagagtttggaaagaaagagtttgtgagagacactagtgcatgcatgtgagagatgatagggagcatgtgtggagaaaaaacatctctgtgtcgttttgtacagtgtagaaaaagtacatagggtgtggtggcatccgacgtctcggatgggactttttgtttagaagtattgtctgtagttttacggttgaagttgtaaagttctgctgtagagtaaggaccataaattttatacaaaatttagttcgccagtgcgccaccgccagccgctagggccgccgccgccgccgcacttccccagctgccgccaccgccgcacttccccagctgccgccgccgccgccaaccgctagggccgccacagctgctgcacttccccagccgccaccgccgcacttccccagctgccgccgccgccgccaaccgctagggccgccacagccgctgcacttccccagccgccgctgccgccgtcgcacttccccagtcggcaagaaggtcccctcctcctcctctaccagctgcttgttggtttggctcgcaagcctaactagctagctcgagctttcaaacgagccaagccgagctaggtttctagctcgttaggatgacgagctgagcgagccgagcggagccgagccgagctggctcactatccacccctagtctacgcgctgcagggaacagggctcgactgaagttgattgccgctactgattgccatcgcccacatacctcatgctgtttgaggtcatcttatcgctttaaggtactgataacaccaaaatttggtacttttgtttagtggattcggttaaataaaaactcgattggaagatggaaatttatccagatcaagccgagtttttgagcagggctgcattggttttgttcgatctccaacaagaaatcaagttcagggccttgctatcgagttgggctacatcgtttcgatctccggcgagtaagtaagttccgtcaacttcacttgtatcggtttggctagaacattctcggttaggtccgatattctattcaagttgatgcaagtgttgcctatcagatatattgattctatctttaacaacgtcattgtttacagtcgtattggcttagttaggactttctcgattaggtccgatattctgactaagttgatatttctctaatcacattgttattttagattgatcaatatatccatcacgtttatatagatctatcggctaaataagtttttgttattatgttcaatcttatattatctcggttaggtccgaactattagattgctgctaaataagtttaattctagtaaaccgaaaggtttttatgcaacgttcatcggagttctagccgatgagttatcattattgtgggcttcagctataagatgtatcggttagttagccgatatatattcgaaatctacctgcatcaggttttcagccgatgtatgctttaaccatcaataatcaactatcagctatcagtttcagtcatcagttataagttaaatcctatcgacaattattagttatctgattagttgaatttacattggatctaaagccatttgataaaaaccttaacgacatcggctgacctcaatacatcacatcggcttattggttgatcggctctttgatcttatacaatctgtctacctatgttgttagttgctggatttagaacctgcactgaagctaagcagatctcctaggccttcgtgtgttggtgcagatttttgcatcaacaactataccgatggctgggctcgaataggatgcacctgaaaccaagtatggcctattgatataatcttttgcaggttcatgtcgatgaaaatagaccgactcatgaattattcacatgcgtggcgaggtttgggtgggtgggtctatgtgaaccatctaggcccctgttgttaattttggttattaatgacaagcaataattatgaactaactattttaattgagcgatattttttagttagaaccacacgttgtacatgccatggacgatcactgcggattaaaattgatggcgcaaagaaatggaacaaagacggtatatctagcattttattttcaatcgattgatgagttgtgcgatcgaacttttgctaggtttatttctagctttgccgtactttcaagaagggtaatgaccttggtaaaatgatgataaaaatgccacattaggtcatttgcatcaacacttgtttcaacaaaattttctttgatcatttgttggccattggcggtctgaccgggatgccaaggagccgggaggctgccctcggcttggcaatacagagccgctagagccgatgccggtgttgttggaattaatgaatgggccttagcccactcgaagattaattctttggaaaatcacaaaagcccacctcatgggatggtatgcatgtggagtttagtaccaccttgcttattctaggagagggggacctccttaaaagggaggatgccctcctagccacttgaagcatgtgtagtggagagaagaggggaaacacacgcgcgcgctcgctcgcctcgcctcgccgggccgggccggtggcgcgcgtgcacgacgtacgcgtcgaatggtccgaaaaattggctcctcacccttgcgcagatgcagcctccttttgcagttttgttttgctgcaaattcggattcgtttttgttttggaaacgttccgaaaaatccggtgcgtgcaaacggcgtggagtccggataagttacgcgcgacttatccggttcggttacgcgcagtagagatcgtgcgggcgccctgatcaagcgacccttctctatataaaccgacttgtcgtcttcacgcaacacttgcgaaatcaatctagggtttatctcctactttgtactgcgccgtcgctcgtagactactccatcccgctcgccggcgtgcaccggcgatcgggagagcaggtctccggaacctctgccttcgacgttctgcaccgggagaaggcggcaataaggtttttgggaagcgcttcgcgcgactgctccctgttcgttcgcgacggctcgccttcctcttcgctcgcgtgtttcgtgccttcgtagacacctgcgaaaagtttcgaccaagcaaccggtctttccgtcacctcggtacgtgttcaatacgttgcgcatatttgatctgttcatgttgtactgtgtagtttacatgtatagatctaatgatgcgttcatgctagttttcatctgtaatgtcatgatttatttatggaatagattaaatcattatatgtctataatctcaacaatccaaaaaccttattataggcactgtgattttactatggctggttttgccgatgcactgaggccggataaattcaccggtgtgcattttaagagatggcagatcagggtcactctgtggctgacagctatgaaatgcttctgggtgagtactggcaaacctgaaggagttcttactgctgaacagcagaagcaattcgaggaagccactactctctttgtgggatgcattcttagcgttcttggcgatcgtctggtcgaggtgtatatgcatatgaccgacgctaaggagttgtgggatgcactgaatactaaattcggtgctactgatgctagcaatgatctgtatatcatggagcagtttcatgactacaaaatggctgacaaccgttctgtagtcgaacaggctcatgagatacaaaccatggctaaggaactcgaactccttaagtgtgtcttacccgacaaatttgtggccgggtgcattattgcaaaactacctccatcttggaggagtttcggtactgcactcaaacacaagagacaggaatactccgttgaggggttgattgcgtctcttgatgttgaggagaaagctcgggaaaaagatgccgcgtctaagggcgatggtgggcagtctagtgccaatattgtgcacaaggcccagaacaagagcaaggggaaatacaaagctcagcagaccaccaacttcaagaagcagaagaagaacaacaacaatcctaatcaggatgagaggacttgctttgtgtgtggccaagttggtcatctggctaggaagtgtccacagcgcaaggggatgaaggcacctgcagggcagacttctaagtctgctaatgtgaccattggcaacactggagatggaagcgggtatggtaatttacctactgttttttcagttaatcaatctactaattggtgggttgatactggggccaatgtacatgtttgtgctgacatctcattgttttcttcttatcaggtcgcacggggttccaccgtcctaatggggaatgggtcacatgcttctgttcatggtgttggcacggtagatctgaagtttacttcgggaaagatcgtgcagctgaagaacgtgcagcatgtcccttctatcaacaggaatcttgttagtggctcccgtctgactagagacggatttaagttggtttttgagtctaataaagtagtcgtgtctaaacatggatattttattggtaaaggttatgagtgcggaggcctgttccgcttttccctttctgatttctgcaataagtctgtgaaccatatttgtggcagtgtggatgatgaggctaatgtttggcattcacgtttatgtcatattaattttggcttgatgtctcggctttccagcatgtgtttaattcctaagttttccattgtcaaaggttctaagtgccatagttgtgtgcaatcgaagcaacctcgcaagcctcacaaggctgccgaggagagaaacttggcaccactagaactcctacattcagatctttgtgaaatgaatggggtgttgacgaagggtggaaaacgatatttcatgacattgattgatgatgctactagattttgctatgtgtacttgttgaaaacgaaagacgaggctctagactattttaaaatttataaggcagaagttgaaaatcaacttgacagaaagataaaaaggcttaggtctgatcgtggtggagagtttttctcgaacgagtttgacttattctgtgaggaacatggcatcatacatgagaggacgcctccctattctcccgagtctaatgggattgctgaaaggaagaaccgcacactgactgacttggtgaatgccatgttggacaccgcgggactgcctaaggcatggtggggggaggcattgttgacctcaaatcatgtgttaaacagagttcctaacagaaataaggacaaaacaccatatgagatatggattggtagaaaaccatcactttcttatttgcgcacatgggggtgcttggcgaaagtcaatgtaccaataacgaagaagcgcaaacttggacctatgtaacatcctgaaaattcccaacaataaaaatcactaaaatttcgaactttttaaaacttttgcatcatgctggttgttatgattcctgttgcttgccaaaccataaatgatcactaagaaagtaaagaaaagaactacatttaagcaatagatatgatttacgagaatatatttaatcctacaaataattatgcacaagatattaaaatcaaataaaataaaagttattattaacctattttatcaaatattaaaatatttgaataatataggtgggtgccataatacgagtacccatgaaatgatgatcattcaaatgaactgagctctctgtatatataatagaattacgggagtatttaattcgatatgtagatcgattttgcaccaagttcctaattgcatttagggattgaaatttgatatattaaaacccctccatataaaataaactaacatatagataaattgagctaatgtgctattatgttaataacgatctcattagaaaattatagaatctttaataaacctcaaaaacaaattggtaaaataaatataaattaaaaataaagattaggtgtggatagtaataaataaaatattgtcgcgaccatatttggatcaattaaatttaattgcgatagcataagaatttaccctaattaaaactcaaataagttatataaaaataaaatatgagtaatattaacctagggtgaattcattagttgagataatacacatattgagtaaacttcgtttatgcaagatttagaaataatagaatcaaattcatataggaaataacctaaaatcgggaataataggaaagtgcactgttcattgcccgccacgtgttcgacctggtccccagcctttcccctcccctgccacgcgcgccgctccgcctcccctctgccgcgtcgctcgccgtcgcatcaccgtcgtcgtcgcgtcgagccccgtgccgagccgcgcccgtcccgctgccgcgccgctccccgtcgcgtcgccgtcccgcgtcgcgtcgccgtcccatcgccgcctgccacctcgccccgcgcgcccacgcaccccgtcaccgcccgtcgcgtcgccgtcccctcccgcgccgagccgctccgagccccacgccgcgccgcccgctcgtcgccatcgccgcgcgccgtcgcccgtcgcgtcgcgtcccgtcgccgctcgtccgtcgccgtcgcgtctcgcgtcccgccgcgcgccgagccccgcgccgccccgagccccgcgcgccgccccgagccccgcgccgccatcccgtccccgcagccgcgtcgccgcccctccccctcctctctttcccctcttcttcttcccctcttcccctcttccctcttccctcctcctccttcccccttatctctctccctccccttataaaagcctcactattccccccccttctcnccgtctccaccacccactcctccacgccgtcgcgccgccatcgtagtgccgccgcgccgccatcgtagtgccgccgcaccgccgccgttgtgctgccgcgccgaccgtttccgtgcccgcaccgccgttctcgcgccaccgtgcgccgccgtcgctgccgccgtcatcgccgctgccgccgccggtgagtcgccctccgtttccctcgagtccgccgccgccaccgctcgggtgggaaagagagagagccgagagaaagagagggagagccgagaaagagaaggagaggaagggaggaggaagccaggagagaaaagaaaagaaagggagagaaagaaaaagaaaagaaaagagaggagaggaaaaagggaaagaaaaagagaaagaaaaattaagagggaaatttaaaatatttacaaattttagaatttaattatagggttaataaaagtgtagttagatgaaattttactaattaaatacctaaaatactaactcttaagtataggattaatgaaaatataaatggatgaatttctatagattatagattatttttagtactctccataagaaatcaattcacagtattaatttagatgtaattaataattgaacaaatgtatgaattcccgtaaattattgtggattatttttgggtaatctctataaatgatccgattcacggtataaattcggacttaatcgctaggaatttttagacgtacattatatttaattgtttagtcataaactaaattaaaacgtgtaatattataagataattttaggatcccgtccgacatttagctcgcgatagaaatttctaacccaatatatggatataatgctagggtagattaatttaaaaacttatgacaacaaaatatttatacccgcaaaatactttaaatcgaaattgggtttgccgtagttcgcagatagtaaagttaataaaaaggaatcgactttcgcattcgacttttactcggatttaagtgaaacttgaacctaaattcatctaatttcataagctttccaatgatatataattcactattggataaaatatatttataaaaattaaataattaatatcaagatgatgcataatggtcaacttaaaaatatgctaataaataaaattagtattgtacagcagaataattatctttaatatgttctgtcactgtagcaaccacataaattaagtataatcgatgtttgaagttaatgggtatataggaaaatattagtgccatttattaatctatgtccaaatataattaaaacccacgacttattagttatttaaatagagttaggcttataattattaggtaagtaaaatatagatacacatagatcggtcctaagcttgtttatggcaaataataacagagctagtatgattaaatcacctatatgaaattaatcaatgacatatcccatataatagcatatagtgggagaggtgagcaacccttagttaaccaagcagtaaatagaaactattcaaataaatgattcaatatattaagatattgtgcacacatatattgtacatcccattatagatatatggtatcgtattaatttgcttgttgcatatattaatttagagggagtacgtgacgaacatgaatattagataaatactagttatacatcttgtcctcgtataattacagatcaactgtaaatttggattattcattgtaaaattatgtgatgggataatccgtaaccataatatgattaacctaaacaattctaacatacaaagcatgggtaattgctaaccttttatgatttattttgacaagtgaaatatgtacataattaaattaaagcctccattaataaaataataatacaaatgattcacagtaattatttgaccgatccaaaatccatccggcaacagaacctctagtgtataaccgttctatttagatagatgcatgtgtaaccataatccttccttagccattagctagactgaaccaccatgacaacagaaagactgaggaaccttagctcttagcttgattagagtccattagcaagcgcgaataatatgagcaaccctaggttcgacctcagcaaatatattttgtttgtgcatatttgattgttgcttgaatattggtttttctcgcgtattatagactttgtgtatcggttagtcgtgaggcaacgtctgcaacttccaggaggtgaaggttgatcaagattatatcgagaataaggattatcctgagcaggcaagtcatcactattccttgaacatgttgatcccaattggagttattttgtttacaaataaaattgcatgcaaagatgaacatcctacttgtgattatgccatgccttgattattgtttatcccttattccttcgtaaccatgtttacgtatgagtccctagtcaattatgacaattgcttagaaatgctattctagaatcatgcatactcatatttatcaaatgctatatgcttgggcaattacctttgggaaggtaattgagatgcggcatgtggagacatgagcgccacattgccatgatattgataacatgatttgtgaaaggagaaataaactaaataactgttttcgactggggcggacggaggatttgggtggtatctggaaaaggctagtaccgtccccggt

SEQ ID NO: 20589 - DNA, 6804 bp, Oryza sativa
atacataattctaattataatcttgaaaaatactatgttatttgtgaaaatatttaagctcctattagctcatctctatacgtgacgaagcttttccggctccgacactgattacaactagggttttgtttagtttgtgtgctaatttttttaaagtatacggacacatatttgaagtattaaacgtagactaataacaaagtaaattacagattccgttcgtaaactgcaagttgaatttattaagtctaattaattcgtcattagcaagtgtttattatagcataacattgtcaaatcatgacgtaattaggcttaaaagatttgtctcgtaatttacatgcaaattgtgcagttggtttttttttcatccacatttaatactctatgtatgtgtccaaatatttgatgtgacagaaaagttaaaagtttgacgaaaagattttgaatgtaaacacggcataggacgtgctcgtgtaaactccaacgtgaatttactgggatattgcgtattccgtgtctcccatacccacacaaggagtcaaaacaataaaaaaattgcgtgtcacaatcatatggtagccaaattttgttttttttaataaaaaaaagagaaaatcggaggtgatgaagtgttatatattatctgatgataacacaaaaattacgttacgtgtttgatgacaagaccaagagatctgggggccatattcatccctaacataagttaatgtgcgggttggaagatcagctttgcaagatcatctactcacttagttcccaaatactataagattttgagtggatgggatgcatatcctagtactagaatctagataggcttatctagattgatgcgccacatccactcaaaattccttatattttggaacggggtagtaaatataatgtctcatgcaaaatgaacaaactttgatattttgtgaaaaatgaaaaactttgtagcgttgtattagaaatatgagccttctttacaacatactaaaaaaaaattacccatcaccgcaggaatcaaactgttctttttaatttttgtaaaaatctgcaaaatttctgtgagtttgctacgcttgcagtgatgccatagtgtttttaggaagtgacaataattatgcaagggaaaaaactgtagaattttctatgtttttttacaaaatatttcgatattttcgcttgtacatgcaaattagcaatttatttaagagtaatgtgctaataaatcaacaacatttttgaaaaaaaaaagtgtgtgaatctatctagtttctgttgcctaccgtaaatcattttctgcatgaacctgaggcgtacaaagttggcctagctctgaaaaaaatctactttttttcgcggggaaaaagaattaaaggatgcacttttggaacatgccacgatagatctactttgtttcccaaccactctaaccaaaatgattgtcctttcctttcagttcactcctttacaccaatgtaacatccaatcttaatcttatcaagtgttcagtaaacactaacaccacataaagtcccaaccacttggtttggtaggccttgctaaaatgtctaatcacttttcaattagattaattcctgcatcgtcatgataaagaccagatctcaccagactctgcagccctgtaattagcattagtcattacttttttttcctgaaatcatttacctcaaataatcttccattgttttccttcatggaataattttgtgttcatgtcgttcaactggtgttatcattagcaagcacagtactacacttaatcatcaattaatgaaacattccatgaactgaaaaaggaacaggctgtgatgctggacatattgggttagcattaaacccactcgagtgattagctttgctttctttgcaagctcaattagttggttaatcgcattcattggggtaaccggtaacctctcaaatctttttcagcaacagaaggcacaagaaaacagtgtccctatattctggcgacacaaaatccatgcaaacacaaaattcatgattgattttgtagtggatcaaccttgccaatttttttgtaaattcgatttttcatgatgtgcaagtggttagctttaattgaagtaaatgttgggtttaatatccgttaaaaaactaggaaacgaataacggtgtaattaaccattaggcagaattgcttcgatattatcttcttagttattatatatctgaaaaattaggaatgaaaattccaagccgacacccaacatatctacaagataggacattgcattcgcatcatttaaaacagagcaacatcatctctccagtacttgcacccatcatccaccacatccatctgatataactctcgatatatctctatctccaacaattaatagataccgcaattaacaaaaatcccaatccaataacccccaccaaaaactaattaatctctgacatccataatgtctgcaattaatcaatctgttaatctgttattagtagttactactaacaattatagagtatattaattaatttaagctaaaaaaatggggcccacaaagcagaggaagagaacccatccatccaaccattcataaaatctatctagaattccaacttaacaccaaatctattggtctcttgtcctcatcaccaaaccccatcttcatcgtcgtcatcttcaacccccatccccatatcttcctttgcctctccttcaagcatcatcaccaagtaaaaagagaaaaagaacccataaatttgaagaattttagcttcattcaagaactcgatcgaggagggccaagaaaggtgtgagaccttgatttggtcgccatgtcgagccccatgcatgttcgcaaggcgatccacttcgtctccatgaaggccaagctccagagcttcggcggcctccgcctcctcctcgtcggctgcctcgccgcgctgctgctgctgttcgccgtcaggacgctgtcgttcacgacgtcgtcggcgacggcgacggcggcgagggaggcggcggaggcgggctgcgggaagctcccggcggcggtggcgcaggcgatggtgcactacgcgacggcgaacgtgacgccgcagcagacggcggcggagatcggggtgtcgctgcgggtgctgcagctgcgggcgccgtgcaacttcctggtgttcggcctgggcctcgacagcgccatgtgggcggcgctcaaccacggcggccgcaccgtgttcctcgaggaggacgcgtcctggatcgcctccgtcaaggcgggccacccggggctcgagtcctaccacgtcgcctacgacacccgcgtcaccgacgccgatgagctcatcgccctccgccacgagccggcctgcacgtcccagccggacctcgccgccgccgccgccgcgtcgtgccgcctcgccctccgcgggctcccgccggtgttccacgaggtggagtgggacctcatcatggtggacgcgccgacggggtggacgccggagtcgccggggaggatgggggcgatctacaccgcgggcatggcggcgcgcgccaggacgcccggggcgggcgccaccgaggtgttcgtccacgacgtcgaccgccacgtcgaggacaccttctccaaggcgttcctctgcgacggctacctcgtcgagcaggtggggcgcatccgccgcttcgtcatccccagccaccgcgacaaggacggcacgccgttctgcccttgatgagagatgagcttcgccttcgccttcgccgcgcacatggacaccgtgatgacaccattgccatcgtcgtcttcttcatcttcttcatcttcttcttcacatatgacaccaccattgctgccgtcatcgtcttcttgaattcacatgtcttttgtgatgatcaaggataagtaggatgatgagtgcacctttgggatcatgcaccaatggaggcggtggcgcgatgcgtgtgagccgtcggatcgagaacggacggttcggatcggaccgtggagatattgttattatatatagtttcttttttttttcaaatgcagctttttctttgttgttttttttatggacggtgggtgagatggatatgcaggcgaattataattcttggctatttttcatagattatcgttgtgtttctttttaattcataattgagatatcatcttcagtgggtgactgatgagtggtgccatttgagattcctatctactgaagcaataatgctaagatagaaacttacataatttgttgagaaatgcagttgatttttagatgattaacaattaatgtggcagaagtgagggtgtgaaattaatactctactcactttaaacagaagagtagagtactagtaccattcaactgcactactactacagtactatctttgcacaagctgatgtgtgagaggagggtgtgacctgattttgattgcctattggaatacctggagtacattgccttttgccaaggctgtgacatgcttggcattttgtaggcaggacattgatttcctggcacatggcccaagtatgatgaactagtaccatgaatatgaagtcaccttgggagatgggcatcaacatatgaactgccgaagacttgacaatcgtcctatgctgtgtagcagcacaaccctttcttctgggcaagtgcatggctctgattcaacaagtgtattttctctttttatatatactagcaacatgtccgtacattgcaaccgataaacgactactttggctatgatcgcaagtaaaggatttcaaccttcacttcctagagtttctgaactactaaacagtttttttcttttttttttttgcaaaagttttataagaaagttgttgtagaaaaaactcatattaatctatttttctaaattgtttaactaatactccctccatcctactgtaggtgcagttgctagcttttatgtgtaacgtctgattgtctgtcttatttgaacttttttataattagtatttttattgctattagatgataaaacataaacttatttttttattttttatattttttttaaataagacggatggtcaaatgttggataaaaaacccactactatatgtaaaatgggacggagggagtaatcatgtgttaataagtaatcttgatttccgttcacgaggtccctacctctccttccgatttccgaacacaggcttcgtctcctcattgggaacctcactgtttgtaaggtagggtttataaaatcatacggttatcgtggttaccatgcgtggtaacctttttattttttaaaaccacaaaatgtctcgtggttaccatgccgatcttaccgtggatgtgtggtaactgtgccaaaaacgataagagaaaccatgttgcgaggtcaacacctttttgccgcacgtctttggcaccgtccagttcgtcgtgaacgtaagatagttagctcagagctcatcttgattactactaattaatctcatcagtgtcatcacgttgctttcttgcgtgtgcagaggtgatcacagcaacgacggcgatactgcttggatggcatgaagtggccgaacggtctcgccgagctctacacagagcacaccgggacgtccgccgtcttcgctgccttaccacatcgtcattgatactacctcgtcatttttaataaatgataccattaactttttatcacacatttagccattcgtcttattaaaaaagttatgtaactataatatattttggtgtgagattttttatcactcaagatactttaagcaaaatttatatattacgcatttgcgtaaaattttttaataagataaattgtcaaatatgtgttcaaaagttaacggcattatctctatctctactactttgaaaataagagatgcttccatcattcgtcaaaaaaccggtcaaaaaaaccgggcgaaaaaaccgtaactgtccgataaaaaaggcaaaaaaaaatccgattccgtgaaaaagaagggcgccaaaaaaaccgtcgtaaaaaaccagacgagcgagaaaaaccgtaactgtctgatgcaaaaaaaaaaaattaatccttcgtccgtcaaaacaaaaaaaattagcgaaaaaattaaaaaaaaaagtccgactcctatccgattccctctcagaaacgaaaaaaagtccgactatagatccgattcccccgaaaactaaaaggtgccactccttttgagtccgagataccagccaccactcctcttagatccgaacggaaaaaaaatctgattcctatagaaggcaaaaaaaaagtggtgaaaaatacactagattcgattcctttaaaaacgggaaaaaaaaagtctgattcctataaaggcgaaaaaaactgaaaaaacatcttaaaaaagttcatccgatccctaagaaagtggcgaaaaaaatggttcgtaaaaaataaaaagttggttcatacaaaataaaaaatgtacacgagaaaaaaatggaaacaacgaaacaaagtctgatttctaatcaatagatatctcttctctatctctaatataatctaactatttaaaaagagaaaatacacgagaaaataaaaacgattaaaaaaacgcgtgagaaaaaagtcagaaaaaagcgaaaaaaacacgctaaaaaggttttccatcttccataaaaaaaataaaaaaacacacgagaaaaaatatttccatcgtcggtaatttttttaaaaaaaagacatgcgaggaaaaaaaactggtagaaaaacgctccgtttcttaaaaaatggttttagaaaacggcgcaagaaa

SEQ ID NO: 20590 - DNA, 786 bp, Oryza sativa
cgttgtggggatcagatagatagccagcatcagtatacctaattaaagtcgaatcatggttctttttaaagaaaagtccaagatctcttgtgcctttaagatatcgaaagacattcttaactccagtccaatggcgtttggtaggagcagcgctgtatcttgctaatagatttaccgagaaagcaatatctggcctcgtactatttgcaaggtacataagtgcaccaatagcactaagatatggaaaatcaggtccaagtacatcctcaccatcttcctttggtctgaatggatctttctccacgtctagagatcgaaccaccataggggttttggaaggatatgactcgtccatattaaatttctccaaaattttctaggtatatgcactttggtgcacaaggattccagaaggtaaatgctcaagttgtagacctaagcaaaatttgggttgacccaaatccttcatctcaaattccgtctttaaatgatgacgtgcttcattaatatcttgtgtattgccaatgatgttgagatcatcgacatataccgagacaatacaaaatcctatgggggactttttgataaagacgcacgggcaatcatcatttttagtgtatccctttagtgaaaggaattcacttaatcggttgtaccacatcctgcccgattgttttaagccataaagtgacttttgcaacttaacacaatacatgttacgatttacctttgattcgggatgtcgattctgtcaggaaccttcatgtaaatattacaatcaagtga

SEQ ID NO: 20591 - DNA, 676 bp, Oryza sativa
cccatcagtttctccacagaacctaaggcaagatgggggattatgtaaaaacaccagcaaacgcaatgcaaatgctcaatggcgagtcaaaaccattgccttaccttatggattttgtgctaaatgtatgcacaaacgattgtggttgaaagggtatcaaaaggattcaccagaaaggaaaccaatggtcgcaagtgactccagtgatcggatcaaccagtggggaggccgagaccatcgattccgctgacccccaaaccggatctgtagctcaccgatgactccagtgatcggatccaccagtggggaggccgagaccatcgattccaatgaccccaaaccggatctgtagctcaccgaggatagggagaggaagaggaaggcggtagtggtctggagatgagaggggagaagagggcagcgatggcttgatggcctcgtgacccttccttcctccggatggctagatccactggcaaggagggcggcgccagcgcaacgacaataggaggagggtgaggcgacgatggcacaaagcgaggggaggaatagccgaggagggcgaggcggcgcgcgtgagagaggagtgcgaggccgggctgggctgaatgcggctagggttttcttctcttgatctgctcaaaaaaaaatctggaccatccaatatgctttcgcc

SEQ ID NO: 20592 - DNA, 914 bp, Oryza sativa
ccatggagtgctgaaaattgccgactttggactggcaatatcttatgatcccaagaatccacaaccgctgacaagccgtgttgtgacattgtggtacacaccaccagaacttttgctcggtgcaacagaatatgggtggctgttgatatgtggagcacagggtgcattgtggcagaactctttgctggaaaaccaatcatgccaggaagaactgaggtatttcttgttttgccttgtggaattccaggaaaaacatttgatttttgaaagatatgatttatgtgtactagtcaaaacctcatgtgcctttttgcaacaatgtcatactaggtggagcaaattcacaagatttttaagctctgtgggtcacccatggatgattattgcaagaaatcaaaagtgccagagacagcaatgttcaagcctcagcatcagtataggcggtgtgttgctgagactttcaaagtttttcctacttcagctgttgttctcatagactccttgctttcattagacccagaagctcgaggaacagctgcctcagctcttcaaagtgatgtgagtttcaggcttcagtgcatatcttctgtttagtgtgggacatagctttgcagagcctacccaaaacctaacatgctgttctcctaaaaaaaaaaaaagcctaacatgctgcaaatgtagttgaaacatgaaactaaaattctcttagcagtttgtgaaatcaacgaatgaccaaatctgtgttccatcttgtgtgaacattatgcatttataatactttgcttgtaggaatgccttcagatttgtagcactaataccatatctcaaaccaatttcagtttttcacaaaagagccatttgcatgcgacccatcaagcctgccaaaacttccaccaagcaaggagtatgatgtt

SEQ ID NO: 20593 - DNA, 664 bp, Oryza sativa
tgcaagcatggaaacaaccgttctcccgttcacgtactcgcacagtttgtgctcgcacaccagcctcagcctctccatcttgtacctgctcgccgccgcgaccaggtccgggagcatcgccgccgcgtcccctcctcctttcgtcgtctctggctccggcgcgagtcggtgtacatgtagcggagcagagcctcgaagtcccgcgcctccatgtcgtcgatgcgtatggcggtgtgatccaccgcgccgccggtcgtggcacccagctccttgcttggcccaaaaagctctgcacggaacaccggagaccgggccgcgagcaccagcctgtgtgccgcgaacgtcttcccgctgacctcgaacgtcacgtcggcgccctccccggtggcgaggaggcctccgaggtgccggtgcaggtccgacggtgggacaccaccgtaggcggcggcggcggcggcggcgttgcggtgtctacgtcgatgtcctccgtctgcagctccatgaagacggtgaggtcgcacacgatcgtgaggcagtcgtcccggagatactccgatttctccagcacgtccctccggatgaaactcacaaacccccacccgctgcttttgaaggcgtgcgggttgcctcccggcacggtcgagcaagctaaacttgaactgag

SEQ ID NO: 20594 - DNA, 673 bp, Oryza sativa
tgcttcaagtaagccgatgccacacgccgccgggtagtccaccttcatccattgtcgtccagtcagaactagccgaccagacgcgagctgaaaggatatgcttcgtcgaattcctaagcctctgctgcccatagggccgctgccaacattgtaatcctcctccgcctctcggacttctagcccgccgccacctctatcgggacctggccgagtttctctaggtctacacgaccgggatcgaggcgccgggggtgacgacagggtcatggcgaacttcttccccatggccctgaagggacaggcgcggggttggctaatgaacttgccgcccgtgtcggtccactcttgggaggatttgtgccagcagttcaccatgaacttccaaggcacatatccgcgcccagatgaagaagcggacttgcatgcggtacagcgaagggacgatgagtctcttcgctcgtacattcagcggttctgtcaggtcccaacaccataccatgcatccccgcacacgcggtgatctacacgttcaggggggggcgtgcggcacaaccgcatgctcgaaaagatcgcctccaaggagccccagaccactgcggagctttttcagctcgcggaccgtgtggctcgcaaggaggaggcctggacctggaactccaccggttccggtgtg

SEQ ID NO: 20595 - DNA, 2119 bp, Oryza sativa
gtcgtcgacccgaaggttcccgccgcttcctcctcgtcgccgtcgccgtctgttggtcttccgccgccgtttaggtcaccggtgagttcgccgtgttgtcctctacgtcttggtgccctccgtttgcgtcctcgcgccgccgttcgccggcgagcgtgcgccgttcgagccgtcttctccgccgagccgccgccgctgtcgctgacgtcgtcgctgatgtcatcggggtcgtccgccgtgagccgccgtggacccgatcgatctcggccgtccgttttggatggatcgatctcggccgtccgttcgcgtgaaccgccgcccgtgcgcccggtccacccaaaccctagccgctgacgcaataaatccccttttccttttcaaaaataattcattattgcgtcgtaattcaatttaaaccgatttaagtgttttaatccggtttaatctttaaaaattcataactaattcatcttagctccgatttagtcggttcaagtctctaattttttctaaaattgagatctacacattaaaaatatccacatgtactgttcatgcttgtttatgtgctgttttggtgattttgctcttttctgcttagattctgtcgtttccggagagtccgttttcgcagaagaagagtttgaagaattccaaggccagcaaggcaagtcacacagatcccaaacaaccctttgagcatgttgatcctatttaaagctattgtttcttttcaactattgcatttattttcgatgtcattgggtggaattaacctattgtttgttatagcccttttgttcttgattaccttattccttgataccatgggttattataatttgactagttgagctttatttatattggttcaactagatattagatataattgcttagccctgcttagaaacattagtacacattcgggataactaatgactcactattatttaatgatggcttattgatagttcacgatggtcaatcgtgattagttaattaattaatgtgccaactaaaacctggtaatggtgggttgtgagcacatggttttgatggtcgtgctcatgacaattaaggaccggttcacgagtttcggttgtgaaacatttatcgtgccaaccacaagccagcatgggcaacggctttatcttttgtatagcatggttcattgcggggcaccagactgagaagtggcggagataagcccacgggggtcgctggggagtccatgccttgtttataagggggtgattatgatccaggaaggtgcgctgcagtggattgtgttatgcgaggggtattgtcacaactcctttccgaggtaccgtggtggtattgaggcacatggtgacatgatgtggggttgtgtcttgtgggtacagtgtacacctctggccaaagtaaaactattcgaatagccgtgcccgcggttatgggcgggtctaacaatgtctttcgtgattagtctcacacctctcatcattgtaagagatgcttaaactggtaataatttgtttagctcctggtttggaatggtacattcctggtttggagatagaactgtgcagcggggtggttgttcagaatggttgggcctatacaacagggcatgttgtatagcgttggattaatattgtttaattacttaactgttttatcaaattctcaaaggtttgctaaatgctgcttttgcaaatgcaaccctattatgccatcctttgttatcctgtgcacttgcatatttgctgcgtggcttgctgagtatgtcatatactcaccttgcaatcattcatcagaggaagagttctacaatgaggctgatggtgtggaggattaggtgtagccttggtcaagctgcctgtggagtggagccgtctgcgccgtttatttattttccgctgcttagatctttattgattgagaggaactatctacctctgtaatgacattttattcgcttattaattagagtaatatttgtactctattatcaatttgttattgtgtgcctcggctgattcctggacgagggttcacacacatgtaagcgtttggaattttggatagaaattccgggcgtgacaaccgaccttaacaaggcatgtcctaagga

SEQ ID NO: 20596 - DNA, 791 bp, Oryza sativa
aagtccaggcctcgggacccgaggggagcgctcccagctcccttagattgattgcttggatcactgagatccaggcgtacctcacagataagactctacccgaggaccgcgaagggagtgaacgcgtccagcgcatctccaagcgctacgtgctggtggaagagaccctctatcggcgcgcggctaacggagtcctcctgaagtgcattcctcgggaacaaggtgtcgagcttcttgccgatatccatgaaggcgagtgcagagcccactccgcctcacgcaccttggttggcaaggcctttcgccagggtttctattggccgacggctctcaacgatgcggttgacctggtccggcggtgcagggcgtgccagttccacgcaaagcaaacccatcagccggcccaggccctgcagaccatacctctttcatggccgtttgctgtctgggggctcgatatcctaggtccgtttaggcgggccccgggcgggttcgaatatctgtatgtcgctgtcgacaagttcactaagtggcccgaggcttacccggtcatcaagatcgataagcactccgcgcttaaattcatcaggggcattactgctcggtttagggtgcctaatcatatcattacggataacggcacccagttcactagtgaactcttcggtgactactgcaaagatatgggcatcaagctctgcttcgcctctcccacccaccccagaagcaatggccaagtggagcgcgccaacgcagaaatcctcaagggcctcaaaaccaaaccttcaaca

SEQ ID NO: 20597 - DNA, 1612 bp, Oryza sativa
  unsure (1)..(1612): unsure at all n locations
ccgccgcccttagccactgctgccgctctgtgtccccgcttgccgctgacccgtgagagagagagagaggaagaggagtatgataggtgggtctcatagttttttaatatagaatgctgggagagagggagagagagaggaagaggagtatgataggtgggtctcatgttttttttaatatagaatgctgactggactgccacgcgtacgctatatagaccaaaaccaccgtggattgggtcgagggtggtaattcgtccggtttacatagttgagggtgaagaatatccggttttgtggtttatgggggtaattcggttgaccgcgatagttcgggggggtgtaattcgtaaaaaaattggtaatgccaaaatatatcaaaatttgtctaaattttagtagagttcaaaatagctacaaagtgaaccagccccgagtgctaatgcggaaaagaaatctcaataaaaaagttgttactttttgctaagcgtatgtgtcatacgctcgcactgtcaccctgcagcgactccaattacttaactttggtttaggtattgctaaatgcgcataccgcgcatggttgcgccgggtgtgccttcatacccagcgctgctatacgtacgaattatttcgtacgatggttgtacaatcaaacggatcccctcaggcctcagttgatcctatatccaagcccaagctcttgagtcctggcctgctatctggttggcttgcttggagagccaatgagccaaccaaagcaattttcttttcaatcatatcttaagcaatcctcttcttaatatcttactgtatatagtaattgtacttagcactcaacattgaatttatcatgtggcatggttaagcaaattacgcatacaaatatgttccttgaaaaaaaagaaagagagaataatgtaaaaaaaaagatgattgtgaagctaaagaaaatcaagtaaataagatgccataccttcgtcttcgatgcgtatgctattggattagtttcacacttgcagattagatcagaacatgaaagtcagatttagggtttggagtagtgaacgtaaagttaggtttagaggtgaactgggctttagggctcataagtacgcttagactgcgccgtgcgtgacgttttgctgttgccgtccgtgccgttgcgtcttatcgtaacaagatcgtatgcgtagcattttcaattgctaaatgcgcataccgcgcatggttgcgccgggtgtgccttcatttgggcacgccaccagctcgccctggagatgttattaccccgcgcccgtgcgctaggctccccgaggtgggactaaaaaaacgctagtgaaagtttcgcttccatgggccttgtagccatacatctgcactacacatatatgggcccttcaggtcgacgatgatgagtccgacacggcactgcagatacaccactactgtcatatacggtgatgctattttctcctaaagataaaaataaagagaaaaattaagttttttacgtaaaataaaatggtattaacgtatgatngattgagttttaattattatatacttgaaaaatggattaatatgatattttagagaaactttcatatagaaa

SEQ ID NO: 20598 - DNA, 695 bp, Oryza sativa
atcattcctgctctgcagagtgacagtgagtacatgtcagggcagctgtcagcgtttggatatgcgatcactgaagagcccgaaggagcggatttgtggctaattaacacgtatggttttagtttctttcttctcttatttgtttctttccatctattacctctgacgttcattaaaagtacacatgagttgaatttaacctgtgatggtttcaaactggtgctgctctggatttgtgttgtggaaaactagctacgctattttttgcactagaatatgccatgagctgtgtaaacttgggataataagcataaatccaacttgcagtgccgaagagtgagatatatattgacacgtaggggcaaaccttcaaattaacttcagaggtgaagaatatattgtgaccgacacctattttgccatttcagatgcactgtgaaaaacccaagtcagtctgccatgacaactctcatatcgaagtgcaagagtgcaaacaagcctttggttgtggctggatgtgtaccacaaggaagccgggatctgaaagagcttgaaggtattagcgttattggagtgcaacagattgaccgcgttgttgaagttgttgaagaaaccttaaaaggccatgaggttcggttgttgagtcggaaaacactgccctcacttgatttacctaaggtacaactcatatttct

SEQ ID NO: 20599 - DNA, 724 bp, Oryza sativa
caaattttcgatggctacggccgctatcggggatctctgcgtttcatccagaaggccgtactggagagatcggagtacctccgggacaaccgcttcacgatcaggtgtgacatcacggtcatgaagaatcccgaggcaaaggacactggcggcaggcgggtaaccctgccaccgtcggacctggcccggcacctcggcggcctcctcgccaccggagtgggcgccgacgtgacgttcgaggtcgacggcaagacgttcttggcgcatcggaatgtgctcgcggcccgatccccagtgttccaccaagagcttttctccctaacggagaaggggaatgccgcgactggcggtgccggtgtcatcatacgcgtcgacgacatggaggcgcaggacttcgaggctctgctccacttcatatacaccgactcgttgccggagatgaaaggtggagacgcagtggcgatgctcccaacctggtcgcggcggctaacaggtataagatggagagactaaggttggtctgtgaagataagctatgtgagtatgtaactgtgagaaccgtggcagccatgttggcgtttgctggggaacaccaatgccccgagcttgagaagaagtgcttgcagctactcgaagatccagcaaatttgaggaacatcgtggagactgaaggtcttgagcatctgacgaaaagctacccctttgttttgaaggatctaattgc

SEQ ID NO: 20600 - DNA, 1421 bp, Oryza sativa
tgtgtactcagtttaccgcggtcctttaggttgacatgtggggtccgcatgtcaacggcgcagccttcctgtcttttccaggctagcgcttacacatgttttatagttgcaaagcttaattataataatccgcaaatctccatataacagcattaaacttcggatgatcatatcttggtcatacgagctccgaatcgacccgttcaagtctcttaatgtttgttataacctaaagaactgtgtgctttctttttatgtgttgttattgcttctttataggcttgtagctttgcttgtgtgcttcgcgtagcttctgtcgttccggaggttcccgaagcgtggttcgtggtcgtcgccgaaggttcggaaggccgttctctctgagcaaggcaagtcacatcatccttgagcatattgaatcccagtttataaaattattttgatttaaattaatgcattatcgctttatttaaattcctgcgttatcactgttttatttagccatgcctatttacctttgttatgaccttattattattgctattgttattattaccttgttcaccctagaataaacaaaaccccaactagtggacactctattcatggttccactagtatgaatttaggtagatgcttcgctgtttaattacgcaacattaggtggttttataactttagacttggggaattctcatatcacttggatactatggaatggttggcttattgtggaattggacatacccctctcttcctctttcaaagcccctaaaacctgtttttcggtggggtttgggtgcatgctagttgtgggaagtagcaccccggccactataaggattaagctcgggcctctgttgcaaagcactaccgtacttccacatgtctagtgggtaaggcttagtttgtggctcagtctggttataaacaaaagtacacggatggagatggacgaagtcgggggtcgatggacatctctaggacaaatgaaggctacacgagctgtggcccggtagtcgagatgtcatggcacagggccagtgtcctgctgctagggggctcaattctgcctgcctgtcccgggggttccggccgtaggtggggttgggtcggtactcttgtctatggctaggatgggttggaaactatgtcacgtcttccgtccgtataccgtggtggtatgtggcacgtggttacacgtgaggaagatgtgtcttgtgggtaaagatgtacacctctgatcagagtataatctattcgaatagccgcgccctcggttatgggcaagccgagcaatgtacccaagttagtgttttaattcttaaaatttgctcaacaactaaaatgtggaatggttgtcctgggatggctagggacgagctgggacccagggtcgggttgccaggttcggtctgaat

SEQ ID NO: 20601 - DNA, 3153 bp, Oryza sativa
  unsure (1)..(3153): unsure at all n locations
tccaccatggcctccaccgagcgtcgcccctcttcgacacgcgcccacgccgcgtcgagctccgcccgctctgcctgcaggacctccatctgggcacttaacccgtccaacaccgtggtgttcgcggcggccaaggcctgcagaaggggctccgcgctcagtggggcagcggaaggcgtgggggagagccgcctcggtaaggatgccgcacggctcggcccaccgatcgacgtgccgaactcgggggcgtcccccgaagcgggctcgtcccgaacgtcgcccgaggggtcgggcccgagcggcgcgcccgcggcctcgtcgtgggcggcctcggaagtcgttgtcgcctcgggtggagtcgggtcgggggcttggcaggccgccctgcgtgcgtgtgccgcctccgtctcccggacggactcctcggcccggcggagtctggcctcctcccgagcggcttcctcagcctggcgagcccggacagcctcctgggcagcttcctcggcttcccggaggcagtttgcggcttctcgccggtcagcttcccgcctccgggcctccgcggtcaccgtctcctcggcctcagaccggccggacttggaatggcgggaagggcgcgacgggatctcgctgaggcagaagaaaaaccagaagacgaaaaacaggtgagtgaaaacttgccttgggagatgggagaatgaatacggccgcagtgggcgcggggacgaacctgcgaggaggtcggctaaacgaccaccttgggggggagatgaggtttccccggcatggttcggtcccccccccatcttgcggagccgctttttttttcgctccccctcgggctacgacgtcggcgcagcaccctccgggtgcctgctgctggcacgcaccgccccgccccctcggggaggagatggggagggggtatcctcctgtttcctcttcccccgggcgtcggcagggcggctgccccccgggcccccgtcacggggncccagaagcacgaccnccctcccgaggtagattgggttccacccctgcggctcccgctcgcgccatcgtggcctccaggaccccgctcccctgacgccccgaccgcctgcatgatggtcaggatgttagcgcgatctggatcgctgcagagggggagaacgcctgagggatgagggatgcctccacggagctgagattcagcacccgttggaccactatcctgaagtcctcagggtcccagtcccatttgcgcccctggtgggtcctcatgtagtcctcggacccggtgtactccccggcggaggaggagcttgagagcgagtgagtatggcaaggtagggcgcaggaaacggagtgtcagagcacaagtggcgaaggcaaggggaagagtggcgagaggaaggaaacaaatctcttcctcggcgtctttatacccttgccaacgctatgcccggctcctcgcttcccgctcccactatctcgccccctcgtttctcgcgcccactcctccactaatcccgttcgcccgtttgcggcgcacgaggcggatgtgcggccgtggcagtcaagatgggacatatcgtgcgcgcgttaactacgctcgctgacgatgcaccatcatcacacactaggcgaaacgaaccggttcgtcccgattcgcgcgctactcaagtaatgtagcggtcttgaagaggccgctcattattgtcgatcggtttctcccttgccgatgcgcgcgatttgcgaccgttgggtttctgcccgcctgtggggaccggccccacctgtcacggggcctaaggagtggcatctcgcccgatcgcctccctcgaggggggcggtcgccctggcgtgacgccggggctactgtcggtgacatggggccgggggtatcgtgactagaggcttgggtagccgcgatcactcacgtggcccgaccccccgagggggtcgggcccgacggtgacatggccacccctccctctgtctccccgaggggtcgggccgctcccgtttcggccccgagggctggggcgccccaaccccctgtggtgttggcgccacgtgtgtgggttaggtgagcatagcggccctcacctaaccacatttatagcgggttagacgagcgcgtcacgccgcattcaatgcggcgcagcgcatgcttatccggtttgtgaccagtcgcggcatgtgaccggtcacagaccggtcagatcgcgggttaggtggcaacaggcggcctgtcgcacgcctcgccccgtcccgtcggaatgatgagagcctctaggcactcgtccctagacggagctggcgtgggaactcctggagttagcacgtcggtcccggctagattcataccaggcttcatcgcaaccattccaagcaagtcattttatgaagaagggctaacgcgtggcatgctaaactgacgcgtggtagacaagaatgaccggtttgtgactggtctgacgccggtcacgtcatcagcaaacaaccgtgctcccacgttgcacctgcctccgtcatctggaggttggtatgacccatcccatcggagggtcattcggacagcagccattgcaaatctccgcccataaatgaaggaaggacagggttatcccggtgtgaggcgaaggcatgagccatgttttggtcaaagtagaatgggtccccacccaaaagaaggataggtagaaatggtgtatgtggtatccccttgagatataaaaggaggaccatgcctaccaagagaggagaaagaaaaaaaaggagaaagaggaaaagaaaagggagaagaaaaggagagctcgtaaaaggaagagcggagctcatagaggagagagagagggagagggtctctagagtttgaactctcttgctctccagctctttgtaactccttcatacacagatccaccagaacacaggagtagggtattacgcttctcagcggcccgaacctgtctacatcgcccgtgtcttgtgcatttgctctctcgcgaaacattccacaaatcgagggcttagaacctcacctagcgtccccggccgaaccggcaaaggggggcccgcgcggtctcccagtgaggagccccacgctccgtcagtgtgtataagtaacttaagatttaggatgctgattcgggatgtgcataaaat

SEQ ID NO: 20602 - DNA, 3500 bp, Oryza sativa
tacgctgtggtggtgagatcggtatgtatacagcacaaccgaacttacgcaaatgggaaatacttggaggatctccatgtactaactgcattggggaagtttcatgatatgcagttggtcgtagttggacaaggtcagcagtgtgcagaactgcatgaccccaacacgacgaaggtaatttgcaattcatcaataatggtcaagaaataagcttaattcttttgatcagcgattcagccaaaccattttgtgtgtggacatatggaacaaagtgctgaacctgaattcctaatgccatacaataatcatcgaaagcatgggatgtaaattcggcagcattgtccatacggatcaattgaatcctatgttcagggtaatttgccttcagccttataatttgtgacattaatttggcaaaggcatggtttcgtgtcgctagaagacacacatgagaccatctagtagatgcgttaatcaaaaccataaagtacctaaatggtccagatcttggcacaatagggccacagatatctccttgaatgcgttcaaggaatttaagtggttcggctctagttttgagataagatggtctcaaaatcagtttcccagtagcacatgcagtgcatacgaaattagaagatttgggaaatttgtcagtgatcaaatgatgaccaatagagttgccaataatttttctcatcatcccgataccggggtgcccaagtcgatcatgccaagtgtggaatgcatcaacattttgaaaaattactttgtatgcaacatgtgcaatgggcttaatgtatgtatagtacaatcccgatgtgagagatggaattttctcgcaaatgcgtttgccatatccgttttgtttggttaagagaagaaattcttcttgattatccatatgggtttcaatgtggaacccattttgacggatatctctataacttagtagggtacgggttgaatcaggatacaataaagcatcctcgattgtaacttgtgtacccattgggagtgtaataattgctcgtcctgagccaactatcacagtatcgcaccagcgatagtcaaaactttgccttctctctttttgagagtttgaaagtatttgatctccctaagtatagagtttgtggtactactgtccacaagacataattcctctccaatcggagcgatatccttagacatctataatgaaagaagaattacttgattaagaattctttatccaatatatatacatacatacaataattaaaacatcaaatatatagtatgacgtttacatatgttaaaaatacatactctaatgactagcaagccatacaaccttacaatataagggagtttgtacttatatacttattacaaccaatattgtttggcaaacttataggatatcaatatactgtttcaagcacactgagataagagcagcttcatctccaagtgggacgcaccgagatcattgcaaatctccaagtgggtccgttgagcagtattcgatgaacatatcgtccatcgtagagagtggagcgacatcttttgggagaacattgaggttgctctctgattcaacaggagcctagtgagaacttgcaacctcagggcgctcttcatgtgtaagattgaagtgggcttcaaatcttgggttctcagaagattttttttccttgaggggtttttggtacaagagaacaagatgtttcaggatgcggcaatctttagcgacatgagtgttagatccacacctgttacaatgcttgttgccattgctacgaggttgtggtgccttacccttcccttttcctttctttcgacccttgaatttgtgcctgttattgttgcgtttgcgctttccagtcagattcttaggattattcgaagaatttccctggaatcctttcttattctcagcattattctgtacattgaagtgcacctcaggcagtggagcagagcccggtgggtgctgttgggcattctttaaagaaagctcatggtgtctttctgcctgagtcaatgtatgtataagcagagaatgtttctggaaattgttagcgcgatactgttgagtcagtatcctgtcctccggaagcatagttgatagagttttctctatcttctctgcttccattgactcttgttcataaaactcaacctggagcaaatgttatgaacatcatggttgtattctgccacagttttaaagtcctgtaggcataaatgtacccactcataattagcctcaggccaaatgagttccttttgctgatcataacgctctttaagagctttccaaaggttgagagggctcgtctctaacatgtattcatgtttgagatccttgtaaatgtagagtctcaaaagaaaaaggttgtattgagcttcctgggctcaattgccggatccccatcattgggttcctcaattgtatttaaaatcccccgagaggcaaaattgattttgatatcggaagcccagatgggatagttagtcccatcaagggcgagttcgtcgaactcttttgttgccatgtccctacaatcatggttaacattatcaatttacagaggtaaattaataaaaacatgatattaaggttgtaatctcaatgcgtaatgtaaaacttcatattttgtaatgtttcgaaaaatgcaggtaatagacctggcaattttgagttagaattcgaaattaggtggcacaatgtggataatctccaagtaattaaacagtggagtagatctcttaatagtgggcaagttatacttgctacctaaaacacggtctccaggcaaatacattcttatgaatataccgcagccaatgtttgggactccactaccttgtgttcaaccaaattttaaataatctcatttttcaaaacatattctcgaaaaataacacatgtgggtaatcatcgtgagatgtagacctctgtgagatgggcgaaatgctcgctgcctaggttatgaccagtgcggtcaatttgtaggactccatcgggtaatcatctcagaatgtagaccacttgatgattggcgagatactcgctgcctaagttatggtcgatatgaccaaagtataggactccatcgacatgtgattaatttccaagtcaaagtgtgaagtggaacatgcattaaatcctccattaattatgttgtacataattaagagaatttgctaaatcaaaatacaaaatttatagaattttgtaaattaataaagcgagaaagtagagcgtgtcttgaaataatatgcaaaaggcatgttattaagacaacaaataaatttagtgaaacagggtatttaaataaacacctatgttaataaacacgtaacatcagtggtctataggaccattacataattgtttgtacaactgataaactgcttcgactaaattacataaaacatagggactaaaatgtaattgctgctaaaaataaaattaaaaactaaatttaaatgataaaatgggtggtggg

SEQ ID NO: 20603 - DNA, 10953 bp, Oryza sativa
gggatttccgccgccgctaccatgcatttcgccgccgccctcgccgttccgttgccaccgcagccgtggggcacgccgccgacgccgccgtggggcaccacgccgacgccgccgttgggggcgcggccgacgccgccgaggtgcgccgccgatggggggcatcgccgacggcgccgttgggggcgccgccgactccaccgccgtctccaccttctaccgccgccaccgcctccatttccaccgcagcctcacgcctccaccgccacctcccatccaccaccacctccaccaccgccatccaccatccgccgccgccgccgtgtccccctcatcggccggcggcatgccggccggctttaggccgacgatcccgactcctcatcagagtcagagaccggccggacccgaataccgttcccccccccacgccatttggtatcgtgcggctttgggagccatgggaaacggcgatgaacgtatggcggaggccgggacggcgtgcagcggtggctccagcgtggcgacatgttggagacggtgtaaagaggggcggctcccctttgcgcgccgccatggttccggtacggccgaatcctggtggcgcgggagtggggtagcgttgaaagcttggcgttggctgcgacgttgatggaggtggggaaggagcggttggtggtgacggagtggcgacgaacggggccggcagcgactccatttccagtgggagttcacacggctcgccgggcattgtcaccaccgccgtccatccatggtgggcacagtactgtaccccttgcacaaggatccggcgaggtgcttcggcaaccggaggcggaggaggaggtgcgacagggacgggcgggggggggagggggggtgttgtgagtggcggcggccaccaaccctagccctgcctccgcgggatccccggcgcgtcctcctcatcgatcgacgaagaagatggcgaagccggcgtgcgcgctgatggcgagggaggccgagaacggcatccatgatccaatgaaaggtaggcatcgtaccttctctgatgattcttctgttcgcttttctgttagatcaaaagcaatgtttcttccttatttcactttgcgatctccttcgcgagggcaaaagtgctgataacgtgttgaatgtggatagaattgattgagcgagagagagaattgaacacaaatagagcgaatcgatagatttctcattgatcaacttctgttcgcttttctgttagatcaaaagcaatgtttcttccttctttcactttgcgatctccttcgcgagggcaaaagtgctgataacgtgttgaatgtggatagaattgattgagcgagagagagaattgaacacaaatagagcgaatcgatagatttctcattgatcaacagtacatttatacaatgtgaagcggtgtcaaccgcaggggatacgatgtttgggaacatcatgtcggttgtcgagagggacgctaaagggagagagaggagcgatctcctcttctctaccggttagataggaaccgttgttcctatttccttgggtggatgagatcacccgtagtttcttaacacaaacatggcagctccaggcctccagcgagcggaggcggcaattcaattaaggagggagctggtgtccttttgtttctcctttctagtttatggcaataataaaaatcacattggttgctcagttcaaatcatcaagcggcgtgaaaataattggctgtagattcgttgaagcaaaaggccggatttaataccattatctaaaaaaatcaagcggtggaaatcatgatattgttttgtactcatgttggttgcccagtaataactagcaggataaattggaaactacaacgatctgtctagtctctgtaagcgaaaacaaacagaaatattcaaccagttggtttttatataagacttggaatggacttttaaattcaagtttggtacaaattcagaagtaaattaaaatgtaaatctattgatgccatactgtagcagtaaaattaaatacaaagagccatactgaagcagtaatcttaattatatcaaaattttattacgtttgccaaaatttgggttaaatttaaaacatgggaagaatcagtttgaaacatgaccaaagttcatgcgcaaaattatgtatctcaaaatagaggcaaatgtgaaagtggagtaaaaaaaacataagaaaatatgaagggtatacttgtctttttacctcacatttaacaccattagcaagagttaataggacgctgattcgtctaaaaaatttagggaaaaaaaccgaaaacactaaagcacatgaacaaaattaatacaccaaactagggttgcagacttacagttaccatcaaaagtagtgctagtaaacaacaatctcgctgtttgggccgtttacactattaattgggctctcagagtttgggccgagatgtatgaagtcatcatctttcttcttttttttttgggcaaactacacaatttcggatttcagaacaatcggagctcttattgtttcagaacaattcatgagagctatatctcaattccaattaagttcacgaatttcaaaaaattttgtgtttcaaaactttttgtgaaaaacgcatatgtagttgaaagttaaaactacaagcatgttcattcacccaaaatttacgccggtgtccacactatctgaatattttgtcacctgttggtaactagagcttgattgcaaaataagcccctgttccagcaattgcacccagaggggtagaaaccatgtagacccatatctgggtgtaattccctgcgacaatggctgtaccaagtgttcttgcagggttcattgatgctcctgtcgacggcctgtcacccaaaattgaggacaaaaatcactaaaccaagaaaactctagagacaaatcaaaggtagtttttcacacttctatctagtctaactacatgaacagctagtactagtgaatgatgaataatgacagattaaattggctgtttatccatttttcttagtgttacttaggaggtggaatacgaattatatgaaactgaatttcagcaaatctgtgtacttgtaaatgcacaataggatttcacacgcataccctgcgacaagaacgttgtaaatgcacaataggatttcacacgcataccctgcgacaagaacgttcatcatcgctgtaccaccgactgccactgctatcaactctttaacctgaaaatataatcatcctaattaagatcattaagtaataacacaagataaactcttagataacaagaagaaatatgtagttttgtttaacgaaaatagggtgacgtagtaggaaatctagctactccctccgttacatattttagtcattgtgactttaattcaaatataatatatatatatatagcaacctagcttttcaacacaatacaaatactacctccattccaaaatataagtcacaaccactcttaagggcccctttgatttggagaaaaaacataggaattacagaggatttcaatcctataagaaaatttcctatgaagccctttgaaacaaaggattgaatcctatcaaattctttgaaattcctatgtaatggacaatcctatagagattttggaggaaatttaataagagcttcaacctcctggtaactttcctttgagtctatctctctcatccaattcctgcatttttcctccagttcaatcaaacggtcattcctatgttttttctgcactttccaatcctctgttttacacttacattcctactaaaatcctatgtattttctatttctacgttttttcaatcctgcgattcaaatgggccctaaacccaaagaccaagaaataattattatcttgtagcttgaatcattctgacaaatataacgcatgcatccaataagattagataatatgagagtggaggatttaaaaaagtaataatttaatggagaaaatgtcatagttaattgtatatttgcacgcatgtcttatattatggaacatctaaaaaaagtggttgtgccttatattatggaacagagggagtatatgatcaaaaaaatggaagtggaagagactacagatcgggcgctcgattcggattgggaaaaatcgggcgctgacgtcagtgccacgcatgcatgcaaaaccactttaaactaatttttctcttaaattatttattcaaatcatgatccgattgcaccattaaattcgttgcaattaaatattcaaaacaagaccacacatggatctattccgacgaaatttttgttggcttattattgaattatttttaaatgttgcacgatgttccaccaagtatatcggaattgtttcactaagtatatcgaaaatgtttcaatcgtttaaatcggatgttgtttcaccttattaaaaacaatgtttcagcaaatagcgaaaaaatgtttcagttcactgtaacattagatctatacgtagtgaaacattgtgagtacactaggtgaaatatttttggtggaacaaaaaatgaaaagaattcccttaatatagggtttccaaaatatgtgggtgatttgttgtaaaagaatgtttcattcacttcaacattaaacctatacaaagtgaaacatcatgagtatactaggtgaaacatttttggtggaacaaaaaatgaaacgaattcccttaatagggggttttctaaaatatgtggataatttgttgcaatagagttgtgtgtgtggacacgtcgtaggctagggaggagcgcacgcgccctggcatgcacgcacgcggagggcagggggagcgcccgatttctgctcctttcgccggtcacccgacgataatcattctcgtcaaaaaaaaatgtacaatatcatatttaatgaaactaatttagtgttgtagatatttttttatataaatttgatagataaataatgattaagataatttataatataaaacggaggtagtaattatactgcgttgggatcggcagagacagcggtgatgacgaagaggagaacaaacgtggtgacgaactcgaggaagaacgcctccaccgtccccaccttgggcacgctcaccatccaccctcggctcgccggatggaagatcccgtcgacggcggcggcggcggcgacggcgccgaggacctgcgcggcggcgtagggcaggaggtgcgcgggctggaggcgcccgaacgcggccatggcgacgctgaccgccgggttgatgtgggcgccggagacgtgggcgagcgacatgacgagcaccgccacggcgagcccgatggacgccgccacgccgacgaggccctccacgccgccgcgctgcgcgtcggtcacgatggtggagagcatggcgaagatcaggatgaacgtgcccacgaactcggccgccgccttcttcgcgaggggtggacatggccgccgccgccatgatcgacgacgaggtccatgaccacgagaccgagaggccggtggcggttcttcgggattgacgacgaccagctcgattggcgtgatcttggagctatgacttctgccgtcgtcgaaactggtggactccaaatttgcggcggcggcggcggcggtggccgaggtggacgccggtgatgaaccttcatccattttctttgaagcagaatgggttttggagcccgacatgcacacgcatgtgtaatatccaattccaatgtgaacggtgatagctagctgtattttttttttctcagaattagtgggctttttatttttcatttttttaaaagtttgagtctggttcaagatggaatatgctgtccctacatggtatcttgttgtttagaaaaaaacattctactaattcttttattacatagatgtaaaagcagaatatgattttcagaggttggtggtggagcaattcttctccaagagcaaagaaagccaagaggaggagttgacctttgagagttgacaaaaacgataattaaattaagaatttttgtagatcttcgaaatcgaaatcgtcactggtgttactatctaggtgatgatttcccacactacaagaattactaaatactcatcttcaacatgttttttttttcaacaatggagctaggagtaaaaagaatattagttattaacaatagataaaactggttagccaagcaattggagaaaaataaaatttagtaggctgtgtagaaaattgtagatgaaatattgggttgttggctaatatttgcatcgcaagaatctaaggtaggaaaaaatgataaaaagttaaggtttattaatactaatcctgaatgatgaacaaattaaatgatatcctactcttttatgcggaatatatagatgaatatatatcaagaattataaaaatgataaatatatatattgatatattgtggacataatgtgagggctaaggggtgatggttggatatgcttacttttttttttaagaacatatgcttacgttgtggacatatgtttttaagttgctaagatcatatataaaaattgtacacacaaattactttttgtcgctaataagccgttacgggttataataagttctggataaccgatgaggcccctcattataccgttgattagagcacccgcaatggtaaagtaatgtgctatctataaaacatgtacatctcagcaatagactagattaatagtaaatcacttcaatggtatgtctacatgggtatctatagctctctaattcattgcctcgtttttctctatagactatctctaagttagtagataactttgctctctctcttcatttaatctcttccaagtaggaaaatatgctgacatggatctcttgtagatagcatatagataaccattgagggtgcccttattgatggtacgagtgtatgacgtgttctagcagcccccttcaaattttcaacgaacacagatgaagagacaccaacaacactgctacagcaagggtattaatttgggagctctagccagattgaagtggagtatatctgatgaagaagaacagttgagcagacgggtggatcaatattaacaaatcgttctctagctcactcggtttttggactttcggtagagaacagcagagaattctctgaagattgttgaacttgaacagtaaactgaagaaacatgagagagacagagtttggcgctgcaaagcagaatgcaaaaaagctaattacaagaactataaatatatcttctctcaagattatcagctcataatctgacattgatgcacccgggcttgtcaatgcacacattcttggagtattaatctgacaataatacgctgtgacagtatgcgaaccttttcttggagtaaccgcgaacgatgctcgtgatgtgtgcgatttgctcagcagaaggcttactgcatgtgggcatagccaaagcatcccccgccattaaagccaccgttggatagagaaccgacccgtgaaccttccaccagttgagaatatcaaaacctgatgttggatcatggactagctcatccttcagataacggtcgaggtctgtttgggcttctcctcggcagtgctcatcccatgcttgttgcagtggatcagtgctgctaacggccaccacattcatggcactaccatgatcttcaacatagtcagagtatagcttagtgatattttgtgttaccttagagatataatcggctgcagcctcggtgccgaaggctgtttggaaaataaattttgtgcgtgcgagtttgtaccgaggatcaagtacaagtggtatagaccagaccgggtaggaatcttgtatagccttctctatagcgaccattgcttctccaagaacgtctgcaacatagttgccatctttggcgccaggaaagccattagattcattgtaagaaattgcattctctccacttgcccgtgctttttgatccttaaaaacttccctcagcttaaataattctatgagacagatttgatgaagtgtgacaatcgggggcagaaatcctttgaatggaacggtatatttctctccaaagcatatacgatagttcttcaaacactgaatccgttaatgaagagactttattgcgaagaacttccaacgaacagtattccgagtaccatttttcatcgtatgcccataggtgataatctagaccaagttgtgaaagaagctgatggcgctcttgtctagtcaaatctaaatgcagcaagttagagataatatcatctttgaatccttgatgcacaataagcagtctagcaatcgagtgaatcacactgtccatgtaggtggtacaaattagctctctcctatttggattggtatagttttggtttttctctatttcattcctcagttcatgttcaaggttaatatcgttgtcctttgtttcccataccatcatgaacagattatttaaaacctcatcgtttgaaaaacgaaccataactttcttaattgcaaattcacggatatccggatcgagacaaacttcatcaactcccaacaacgggccatggtagtcaagaaaaggaacaatcacgtaagcatccatgattaccttgtgaagattccattcatcatcgatgaagtggcacgccatatacagcacattcccttggatggttctgaccgtacccaccgcgatactgaccttactagggaagtcgtatagcctggagaagatgtccttccttgtttcgtcgaatatagcatcgcacatctcctcaatggcaaggcgcgagggcacctcgaaattggggttgaggcggcgcaagaagcttctgaagtagtcgtcctcgacgagcgacgggtcgtacccgtgcagcgcgatcatccgagcaaggtctccgctggccgccgcttcagggccagaagaaggcggcggtggtggtgctggatgttgtgctgattcggcggcgccgggggtttctttgcgttgctcgtggcgtttccagtgcgccccagggtgctcgtgccgtgattcttggtgtctgcgcggagcaccacgggacaatacttacaccgcgctttggcttgcccgtctccgtcgatgaaacaggtgaagtgcttccacacgtctgaccgcggggctatcttgctgatctgagcttgcgatcgacgccggtgggtgctactgctcgcctctgccatgtttggtcttttgattaactagaaagtaagcccacgcatctgcgcgggcactttatttatttattgtttgtaacaaataatatgaaaggtactcgtcaaatttatttatttattgttttatttatttatttattgtttttaactcatcaaatttactaaaacgacagtagactatcttataatcttcagaaaaataatctatgtcatgaaataaactatagactttgatatactaaatgataagaatgcctctcagagtgaaaaaaaacatactttttatcgattgtatttaaacttgccaaccaatactatttattatcattgtatctgtaccgtcaactgaactcaatacatctttgaaaaaataaaattcatctccgctttatattgaattgtctttgtctcacttatggccaaatctatgtataaatatttcaaaaattcccttatattggttaatggacatagtcgaccttagctgtcatggctttcttctctaatgtgttgaaacatggatcccgcattaacatatccataccccttaagaccaacgtggtgcatcattttaactcttagttcatttaaaaagaacaacatcggtaagtagcccaattgagctctattgctaatggtggcctctcattggagccacttcaatttaaccatatgtgtgaacgtacgatacttacgatagcatagcaatcttggttttctatgcttggtgcttagagagaagatatagatgatgaaaatggtttttttaattaagttttgagttgatttgtagtataaagtagacacattttgatattaaggtgttaatcggtactattatgtaatatttcttcttcattcaacactattaaaaaaaacactccctctgtccaaaaaaactaaattcttgagtttccgtgtctaacgtttcaccgtctatcttatttgagaaaattatgaaaaaatttaaaaatataaatcatgcatgaaatattattcatattttatcatctgaaaatactaatcataaaaaaatttcatataagagacggacggtcaaatgttggacacggaaacctaagaattgagtctttttgggatggagggagtatttctaaagaaatgtaccactttcatcattattatttactctttgacaacataatagtctagtacctagttcattatcaacacctgctatttattatcaatggtcaagtaagcagggtgtatgacatgccaatcagttaagcctgacatattaatatttaaggggttatattatagcaagataatttgctaaaatatcacatccatatatgtatcatgtatatttcccgctcctaaaataccaaccaaatattttattaacaatttttaatttgagaatttggagaaaaaagtaattttgttggtatgcacgttttttcttctcgcctcctgtcgtttacgtttacgtgtactttcactgtgcacgtatgtacttatattcctaatgaatagtcgtaggatatggaaaaaatcatgttgtctatgtgcattcctttcacctagtattctttctctcatgcctctgtatatatgtacgtttcttctggattttttcccgataaaattaaagaaatccctctatttcaggctataagacgttttgcctctagtaaaagtcaaactgctttaagtttgacaagtttatagaaaaaatagtaatattttaaacccaagacaaatttattatgaatatatatattcaattattgatttgat

SEQ ID NO: 20604 - DNA, 3028 bp, Oryza sativa
atagatgttagtattgtactattggtaagtgagaattacccaagccttattttgttggcctacgaattacttatatatatgacattgttgaagctgcaaatttgattagaactctactgggtttcaagttagtccataggtgcaatgaaataaggttttgccatcctatacaacatgctttaagatattctgacatattgttagtcgtggaactgtttctgtgattgccgcctgtcacaatttgactccatatttatgtaaatggatgaagcaattatattttgattttgattttgatttagttgcttggccattcaagctaatgagctatatgattgtttaaggatttgtgttgcccattttccactataggtgaagtttatctgaaacttaattgctttagtaccatttccaagtaggttgtttgggccatgatctaattctctttccaatttgttgataagccagtaaacaaaaacaatcagaggtctatacgatttggaattttcagccatgttgagttgaaatggtatttttctcataaattgtaacgatgtcttacaacatttaaatgttacaatagaattgtgatatgtgttatatctcattagtttgtttgaataccttaagcttattttgattccttctttatttacacgcagcgtagcgcgtgcctattgctagtagatctaatagatgacgcgcacatatataaccatatatatggttaatttctgccatttgattagatttttcttcaaaaaattgagaaaaggaaggcccacacccacccgtcctgtacgtgtgcacagacataaaaatataaataaattaaaaatataattacatatcacttacaaataattatagctaaattagacttgcattttcaaaaataaaaaacgactctatttgtgagtagcattctcaaaattatggtgcatatcttttgactaacttaattagattagaaaaaaagaaagggagaatgagagggtgtactacgtcggctgggggcactcctatatacgtaacagagtataaggaattagtttctttaaaacaaaatacatctaacctaatggtttaaaatatcaggtccaccgatttaagtgaaatataatctaatggtctaaaatattgggtccaccaatttaagtgaaaatcgacggttggattaaaatattgggtccaccaatttaagtgaaaatcgacggttggattagatagagccatgtggcggcctaatagcgtttataggagtctcacgtggtggcttgagagcgtttgtaggaagtttaatggacttttagtatataatataatataatataatataatataatataatataatataatataatataatataatatatataatataatataatataatataatataatataatataatataagattcctcagggagaactgggtggaaaaatggataacaagatataagttttgcctacgagaagcaaaagaaatactactatcaagatttcacgtcaaataaaaaggtactgtcaaaattaattactccctccgtcccacaatataagggattttgaatttttgtttgcaacgtttgaccactcgtcttattcaaaattttttgaaattattatttattttatttgtgacttactttattatctacaatactttaagcacaacttttcgttttttatatttgcaaaaaaaatttggataagacgagtggttaaatgttgcaagtaaaaaatcaaaatcacttatattgtgggacggagggagtagcaatcagaccacagaccatatgaatgcacagggtaagcatgcatatagctagctagatcgggatctcttcacgccaacacaatttagcccaacaagtgcgtcggcatcaataaaaaaaacaactgggaacaaatccgagctcaaaagattaagatgaactcacaggaggattgcagctgaagaactacggccgaccacgcccaaacaacgcaacgaagccgatgggccgatggaaccgaaagtctcgtggatggatggatgcaatacagtcgtccaacctgcaaagtctagtagtctacccttccacgaattttctactctgaccggatccgttgctgtcaattttcgtatacacctaaaaggatacaattcgagttagttaccatgttagttgcacttaatttcagtccaagcatatagagacgtttggaagctttttcatccaaaattaaacaacttgcgatagattttttagatatgcccttaaaaattcattgattttgaatagaaattttctgactatatttaattcgtttggaatctcctctcaaaaaatgtctatgcacaaaatttatgcattaaaactttgcaaagtttatttattaaaagtttgtatacaaaggaaagttccaatagagatcgtctccatcgataaaggttttctaaaaaaaaataattccgtattttgatactccatggctagggctttgattgcagtggaagccctcgtcgattctcgatggcagaaaaaatgaaaagtttgtagcacaacccgtgtcgttcttgggtcaaagccaacatgacagtccaaaatatctaagcctggtataaagtgtaaaggatggatactcttctttttcgagggtaagagctctgccgatttcattaaggaaatagtatgaattacctcccgaattatcgcggtcgtccgaattatcctctaacaataaaactggacattcttcaccctccaactatacaagccggatgaattaccccccaccccccgacccaatccgcggtggttttagtctacgtggcgcacgcgtggcagcccagtcagcattttcattttttttaaacatagtggggcccacctgtcatatactctctctctctccaatcttcccctctctctctctcactctctctctctccctctctcggcgagcacggcagcccgcggcggatacagcgtcgtcgacataatggtcctgcgcgggggagccatccgatgtcg

SEQ ID NO: 20605 - DNA, 5219 bp, Oryza sativa
tttgaccgtgagagagtgagagatagaagagagagaggaagagtgagagagaggggggaagaggggagagagagtgtgtatatatgacaggtgggctcactatgttttaaaaaatgaaaatgttgactggactgccatgcgaacgccacgcagaccaaaaccaccgcggattgagtcgagggggtaattcgtccgatttgtatagttgggggtgaagaatgtccggttttatggttcagggggtaattcggacgaccgcgatagttcccggggggaggggggtaattcgtactttttcctttcattaaaggaggggagacagaaaagtgttagtgaaaatattgatttacctctagtttattgcggaaatttagctaataaagatggcttaaagtgaaatttactctttattttcccaatttattgttcttgcatcgaaatcgagcgagaggataatttgttaacaatggtatgagagcctaccacgatgatatggagagttggcgactatacgtcttcgacggtggtcactacgctacgctcagtcgggacgtcgtggcgatatggccgcgcaaattaagcatccaccatgctaccgttgttgtctcaagactcaacgcaactacgcaagcgatattagcaacaccagtataaaaagaaatgcacataaatagtttggatttaactgttctcacatgcaaataaaagttcttaaaacgatgactctcaaaacacgaaattatccaacctaacaaaacgtaagtgtttcaccacatcttgttgtctcatcaaccacctctcttccaatgttttcagccatcacaaaagttcactatggcattttgctcagcgtctgagtgaaagaagacggcggtaaaatcaccgagagcttctccatcctctgcatctccggtgtcgcgaacgcggacgaacacccgtacacggaactccccttggcgagctgcaccgacgaggcgcgctgctgcccgtgcgagctcatgccggcgagcacgcacgcgcgccccgtctgcgcgtactcccgctcgtccgccacgcgctcgctcagctcacgcagctccgccaccagcgccgcgcacatggcgtcgtcgtcgtcgtcgacaacacgtactacaatagcaaggatatttggggaaaagataacaaggagctagccagattgaagtatctgatgaagaataacacttgagcatacaggtggatcaattgtgcaaatcgttctctcgttgctcggtttcggactttcggtggaaaacagagaactctgaaaattgttgaacttgaacagtaaaatataatgaagaaacatgacagaggcagacagagtttggcgctgcaaagcttgcatagttcaaaaagttaattacaggaaagtgaaatataaatatcagcactcaagatcatcagctcgatcataatctgacatcgatgcacccggagcttgtcaatgctaaatacgctgtgacattacacgaatccttccttggagtaaccgcgaacgatgctcgtgatgtgtgcgagttgctcagcagaaggcttactgcatgtgggcattgccaaagcgtccctcgccatctgagccacccttggatagagaactgacccgtgaaccttccaccagctgagaatatcaaaaccttgtgctggatcatggactagctcatctttcagataacggtcgaggtctgtttgggcttctgctcggcggtgctcatcccatgcttcttgcagtggatcagtgctgccaactgccaccgcattcatggtactatcatcatcttcaacatagtcagagtatagctcagtgatatttcgtgttacctcagagatgtagtcggctgcagcctcggtgctaaaggctgtttggaaaataaattttgtgcgtgcgagtttgtaccggggatccagtacaagtggtatagaccagaccgggtaggaatcttgtatggccttgtctatagcgaccattgcttctgtaagaacgtctgcaacatctttgtgatcttcggcgccaaaacagccattaaattcattgtaagcaattgcattctctccacttgcctgtgctagttgatgcttaaaaacttccctcagcttaaacaactctatgagacaaagatttgatgaagtgggacaatcgggtgcagaaatcctttgaatggaacggtatatttctccccaaagcatacacaatagttctgcaaatactgtattcgttattgcagagcctttcttgcgaagaacttccatcgaacagtattccgagtaccacttttcatcatatgcccataggtcataatctagaccaagttgtgaaagaagctgatggcgctcttgtctagtcaaatgtaaattctccaagtcagagataatatagtcatctttgaattctggatccatacaagcagtctagcaatcgagtgaatcacgttgtccatgtaggtggtataaaatagctgtctcctgtttggattgattttgaatgggttatcctctatttcattcctcagttcatattcaaggttaatatcgttcccctttgtttcccatatcatcatgaacagattatgtaaaacctcacgcgctttaaaacgaaccataactttgtcaatggaaatatcacgggagagatcccgatcgagacaaacttcatcaactcccaacaatgggccatggtagttaagaaaaggtacatccgcgtaaacatccatgattatcttatgaagattccattgatcatcaatgaagtggcacgctgtatacaacatattccctcggatggttctaactgtacccactgctatactgacctttccaggaacatcgtgtagtttagagaagaggcccttcattgtttcatcaaagatagcatcacacatctcctcgatggcgaggcgcgagggcacctcgtactcggggttgagacggcacaagaagcttctgaaatagtcgtccttgacgactgacgggttgtacccgtgcaacgcgatcatccgagcaaggtctcctctggccgcctcttcagggccagcaggcggcagcggtggtggtgtctgttgtggtgattcttcgcctggtatttcttcgcgttgctcgtggcgattccagtgcgcccaaagggtactcgtgccgctcttggtttctgcgccgagcacctgggggcagtgcttacaccgtgctttggctcgcccatctccgtcggtgaaacgggtgaagtgattccacacgtctgaccgaagggctatcttgctgatctgagcttgcgatcgacgccggtgggtgctactgctcgcctccgccatgtttggtcctgattaattcctcagggagaactgggtgaaaaatggataacaggatataagttttgcctacgagaagcaaaagaaatactactatcagaatttcaccgcaaataaaaaggtactgccaaaattatttagcaatcaagaccagagacaatatgagtgcaaagcgaagtatatactagctaatttggtcatatagctagatcgggatctctttacgccgacacaatttagttaagcaagcctgaatccgtactcaatcaaaaaaccgtcgcgaacaaatccgagctcaaaaggtatcgaagaactcacaggagggttacagttgacagcagcagttgaacaactccggccacgcccaaacaacgcaacgaagcgatggagtcgccggcaacgaaaggctcgtggatagatgcaacgaattattatttatatacacagttgaccaaccctctacacttgctcaagatgtatcgtatgaccagatcagatccattgcgctgtcattttccatataatccgaaaggatacaattattactaaaaacctcatgaagagttttatttacatatgttcaatacacttttatttcatcctaaggctatactctgtcccaggcagacaatgtcgggtttgttagaattaaaatgaccatgtccagattaattctaataaatcccatgtccagattatatcgcattgaaaatcaatgaaaaaaaacctcaacttaaatagtctataatttgagtgcacctattaactgggtgaggtgatggatggattgtcagactcccacgcagggcatgtgacggagacggagcggcgggctgttcgttttctcacatacggatgttaccactatatcatgcggaggccatcaaaaggagtaaacaacacgtaccccttgccgccttctactaccggctgttctcctttcccacaaggtagaaaaacactatgtctctcgtccgaaagaactctctagcacataagctctctcttccatcaagaggagtaaacaacatatacctcttccactaccggtgtctgttctcattccctaaggaggtagaaaaacactgtctcttgtccgaaagaattctcccgcacataagctctatgttccttcgtcttgttctggttctctctggtagatacatcatgttcttatgcttctaagttacttcggtaatccccggtcctaagtacctgcacgcacaggtattcgggacaagcaggcctccggaagtgtatccaccatatatagtacttaggtggacgatcaagtttttgggtacgcattctttgtgcaactgctctctgctttgtcaccgacattaggaacatcaacaccaacaccgctattggatctgaagtattttttaggtatgttctctttatttcaatgttaaacatgttactaaatgatgttattattgttcttagcatattcatatttagcactatcactagaccaccatattatacacaagttatgtttagtatcatattttctggattaaaatatatcaaataatgaccaaatatccaacgggttcccggttatgccacagggaactagggaagtgatggaggagcgtatagaccaattacaacatgccctcctcccatgttgatgaggaccaattacttgaactggttacttctgatttttttcatttttaaatttttttcttttaatatttacagaaataatccatcggcgcaaaaaattacaaaaatagaccctgccgccctccactagggcggcaagctgacatggcaaacgggggaggaacgggcggtgacggcagacgggagagggagggtttttttgcatgaaaacccttgggcccctatgcaaaaaaaccagcccgggcatagtactttttggct

SEQ ID NO: 20606 - DNA, 10375 bp, Oryza sativa
  unsure (1)..(10375): unsure at all n locations
gtggtaatgggtcagatccatggacctttcttttcacaactatctcagccttttaatttttttagtcttgccaaaatcctttttacgcagcccttacatcttgtaggaaaaaaaattaggctcgttaccacgcctaggtttaaccagcaatgtcagaggtggtttaccgtgtttaaatccacggtgaaaaattttagcatgtcacattagatatatggacacacatttaaaatattaaatatagtataataacaaaacaaattacagaatccatctgtaaaccgcgagacaaatttattaagcctaattaatccgtcattagtaaatatttactgtagcatcacattatcaaatcatagcgcaactaggcttaaaagattcatctcacaatttacacgtaatttgtgtaattaattattttttatttatatttaatactctatacatatatccaaacatttaatgtgatagggtataaaattttaccaggatcaaagcagaccccgagtattgcggctatgtgcctatgccacacgatagacatgctgctagccgttcgggtcgatgcggttaaagaacggaggagttcgacgtgcacaggtaaagcataatctgtctaagtggtttagttcctaattttttcttcaaatttctagctttttcatcacattaaaatttttctacacataaatttttaacattttcgtcacatccttccaatttcaatcaaaccttaaattttaacgtgaactaaacacaccctaaatactcagacaccacagattcaacaaaacagctccaaaacacaactgatggatgatgatccatccaccattctaccatttgttctctcaacgcaagcgatattattagtaacaccatggcaccatgctaagtgagctaatgcatattaaatagttcggataaaactattttaaaaaactaagttcgaaaaaaaaaattaaaacaggaaattatccaacttaacgaaaccttgccgctgccctctcatcctatgttttcagcgtttgagtgacagaagacggcggtatttcctcaacgacattatacgaggtacagccgcgtcgaaccttgccttcagtgaaccaccggacttgcttgccgccgccgccgtcggcggcggtggcggcggtggaggcgccgcctgttgctgctgttcacgcaaaatcaccgagagcttctccatcctctgcatctccggtgtcgcgaacacggacgaacacccgtacacggagctcccctagctgcaccgacgaggcgcgctgctgcccgtgcgagctcatgccggcgagcacgcacgcgcgccccgtctgcgcgtactcccgctcgtccgccacgcgctcgctcagctcccgcagctccgccaccagcgccgcgcacatggcgtcgccggacgccgccggcgccgacctgctcagcgcctcccgcctcgcgtcgaggatccttgccgcctcgccgtaggcgccccgctcggccgccgcgcgcgccagcgcgatgtcgtccgccgcctcgaggcggacgcgctcgcgctcaagctcaacctccatggacggcgccacgcccgtcgcgacggcggggcggaggaccacggcgtcttcctcgccggccacgtccaccgactgctccgtcgccgtgtcccggtacgtgcagcgcacgctggcgaggcgcgtggcgacggcggcgtcgccgtcggctcgaggcacgtcaaggaggagcaggaagcggcgctcctcgtcggcgtagagctcgccgacgtccaccgtggcggcgcggccctccgcgtcgatgcggctctcgtagcggccggacttgaccgcccggacgcgcacgccggggtccaggcactcgacggagatgcgcgcattctgcgcggcgacggagaggagcccgccgatgcaccgcgcgaacgtgtcctggatgacggcgaggttctcgatgaaggagaaggtgccacccgtgatctccgagatgctgtgcatggccgccgcgtcgtggtcggtgccgaacccgaacgcgtgcaccggcgcgcaccgctcgccgccgccggcgcgcgtgaaagacggcggcacgaggacgtcgtagctggtcgccgctgccttgaaatccgtcatgtggaagcggccacggtaacccatggtctggttgtcttggccgtcggagaggaggatgacgctggcgacggcgtcggtgtggcggcggccgtcgagcaccttggcgtccacgtcgaggccgtcgcggatgttggtgttcccgttcgcgacgagggcgtccaccgcgcgcttggccgtgccttcccgtcctccgacatgcgcgtcaggcggagccgcggagcacccggcgcgcgtcggcgtggcgaaggcgacgacgctgaggcggtcggcggcgccgaggctgtcgatgacgaaccccatggcgcgcttcaccagcgccagcttgtccccggtcatgctcgtgctgacgtcgagcaccgtgaccaggtccagcggcgcgcgccccgccgcctcggccgccgccgcgggcgccttggcgtgcaccagcacggcgaagccgtcgcgcgcggcgccgcgcgagagcgccgggtactcgcagtgcgtcttgagcaccagcacgccgccgccgccgccgctgctgttgcgcgccgccgtcgccaccggctccaccgggtcgtcgtcgtcgtacgcggcggggatggaggaggtcgtgagcggcgacggggcgtcgcgccatggcgtggcgcagacggggcaggcggcggcgccgccggggacgcagcggaggtggaaggtgtgggagcactcggcggtgaagatggcttggccggcggccatggcggcgaagcagacgggacaccggatgccacccatggccatcgtgccagctgccatggcccatggatcacctccttgagcaagatcgatctccaacacgacatggatcacctcttttttgtttccaaatcatcttgctccgttattcagtaatgatatgatctttttcggcttgcgcgtaaagctaggaatggaagaacaccgcggtcgctcttacagacaagcaggggagcatagacccgagaaagctccgtcgttcacgtgtcttctatgggcctataggcccaaaacaactatgggtcagtttggtttgaggcctaaattaggcttgccaattttttggcaacctcaacaataattgtgtatgtttggattgaggccaaattttggcatgcctatataacataggccatttcaatagccaaattagtttaatttggcttcaatccaaacatatgttggccttacnaaaatttggcatgccnnnnnttgnnnnnatnnnnnnnnnnnnnttttggtaaggccaacattggtcacgaaccaaactgaccctatgagttttttttttcgttttgaaataagtccactataactcccttaaatatacttgtaatccaattcgtatcccttcatcgcaataacagatatgttaaactccgaactattaaaaccattgtaaaataactctcgacggttttgatgattttcgctgacgtgacgcattgacctagtccaaatgtttagtcagtacgtagggatccacgcgtcatactctctccttccccagcggcaccgccccagccgtggccgctcatacacggcccgatcgagctcctgcgtgtaggtaggggtgtaagtgggtcagccgcgaacccacttataggtcaaaataagcgggttcgtggcttattttagcttataagtgggtttcgcgggttagccacttacacgtctacgtgtaggtggtttgggctcagcttcttagtaacatcatgcagtacaagtaataaaattcacacaaaatacaggggaggataagcacctgtggacagcttcctgatcacttgcctcttgaggctcttgttgactactccacgcttcgcatccgcttggccggtacggcttgctccgccaccagcgccgccggatcgtttgctcacgctgccggcagcttgatgtgacatcatgatttaaactgtgtggtctataatagctgtatgcgtatgtttaatatcatctttctagtttatcaagagtaaaatttacttatactggtttgtctctcgaatcatatcatttccggattaacccttttacatcaaccaagtacaaaaatataggtaaaatggcatgtgtaagtgggtccgcccgttgaatgggctaggcttcgtggctctgtatggcaggctgttacaaggatgaacatcgcaaagctcgaagcctcgaagaagacgccacacatcttctcctcagcgagcatgctttccttcgacgcccactagaagcccgtgctaacagtgctaggggtgcaagcggccaccccatgaacccgcttataatagaaataagtgggtaacccgtctaaaaggggttagctggttggcacactcttgtactcttagagtagggtctcttatctcgctcaggtacccgacacccttgcacatgttgacgaacacgttaggacccttagtctccggaccgaaggcccagatcttcttggacagatccttgtcctagtgttaacgccaaaatttggtaagccctgaagtcatcatcgtcttagagtcactatcggcttcacaatcttggaataggccgataggaattatcaagttgccaatagtcggattcttagtagattcgattaaggaaattaatttattaaaagaagtcaccgagttcaatgatgatgcggcataacagcttatctattaattaggaagactttgtttgtttctttttatctttaggaaagtgtgcttagtgtccgataagtactttatgttttccttttatctttaagcaaatttcattcttatccaagaagaactagtatctacccaagagtataaatatgtacacacagagtcattgtaaattatctctcgatcaatacacgcatcggcttcttttacctttctactttttcgatgagttcttgcttcaagttagggcatcgttcgatcttctgacaacaactatgacttgtctcagcggtttgcgttggcagattagggcgtcactttagatgttctaatctatcttctacagccgctggttatcatatatcttagttaatctagtatagtatcttaatttgatcatatcggctgagattcgttttagagtttatactggtaccgactaaattatcttgctagattagattaactaaggtatctaccactctgaaaatcagttaaatgcataattgtctagatattatgtttctttcatacttagtgttgcatcagttaagtttgatctactaggttgtgcaagaaccataatctctagcctatttctaattagggtttcatcgagatttcagccgatgagttatctgcgtgttacatcggcttataaggattacatgcaaattggatttagccgatcgcaacaaagattttactgtttacctaatcgtttggattttatgccatcaatcctctagccaatatatactttaaacttcggatcaacacttgctctatcatatcatattattggtcgattggtttctaattgtttatattactgttttattacaattttttaaggtccatgtggctcgcttgacctaataattattattaaggagctagctaattatttatttctcgatgatcaactcaacttagctaacttgttatatagcacgatcggtctgatctgaaatcagggtccgctctggagcgatggcctagggcctaattataattagggcccctgcccaggtatataccttgtataggtatgtagcccaattatttggcaggaataagttcacttagtgacccttaaaagtgatcaaaatctaatctgtgaccctaaaccacaaaaccggatatctcgacccctaaactcttaaaaccggtacaatttgactcccttagcagttttggaggacggttttgctgacgtggcgcctacgtggcggtattaaccaggtctcctttacacgtggcgttgaggtggcatttaaaatttaaaaatatatgtgggacccatttgtcaatgacacataaaaaaatttgtgggatccacgtgtcacttctctctcccctccctccagttccttctctctccacgccactccctctctcccgcggcaatgcggcggacggcgagggccggagcggcggcgggcggagacggcggcgagcggcggagatgcgggagtggcggcggcggcgcccggccctcgccactccctctctctctctccttctctcccgcagcgagcggtggtgggcggagacggcggcggaggcgcgggcgtgacgcggcggcctgcgactgcgagcggcggagacacgggagtggagtcggcaggcacagaggcactggacgaccggtggcagcgacacctgggctgagcttcaccgcctcctcgccgacgacgaccaggcgtttgagcaggaggacggcggtgggaggcacacgcggcctccctatatatacggcctaccgtccagattcgttaacggttcacgcctcggccgcatccctcctcgcgcactctccctcgtgacacctacggggctcgccgacaacatgaacaagaacgccgcaccggaagacggcgagagcggcgagcacgagcggaaaggtgcgtacgtgttcgtccttgctggttcttgatttcttctccccggtttttttggggggttttctttgactggttacggcatgcatgccgcatgggtcatcggctatttgttttcttgggacaccttgcgagttgggttgagattgagaattgtttggttcgtttgagctggtggtgattccggttaactgggtcttttttgcaggcacggtatgggcggcgacggcacacattgttacggcggtgatcggctccggcgtgctggcactggcgtggagcgtggcgcagctgggttgggtggctgggccgctcgccctcgccggcgaaggcaccggcaccgacttggaccgcgtcgacatgagccgatgagcggcggcggtgacggtggaggacgtcgtcgtcatcgaccccgccgcgtgtgccttccgccgccgtcctcctgctcgaacgactggtcaccgtcggcgaggaggcgatgaagctcaggccgggcgccgccgccgccactcccgcatctccgccattcgcagtcgcaggccgccgcgccacgctcgcgcctccgccgctcgccgccgtctccgcccgccgccgctccggccctcgccgttcgctgcattgctgcaggagagagcgtgcgcgcgaggagggagaaggaactggagggaggggaaagagaagggacacgtgggtcccacaatttttttttatgtgtcactgacaaatgggtcccacatatatttttaaattctaaatgccacctcaacgccacgtgtaaaggagacccggtcaataccgccacgtcagcaaaaccgccctccaagtgtcaaattgtaccggttttaagagtttggggttgagatatccggtttcgtgttttagggtcacggattagatttcgtttacttttgagggtcactaagtgaacttattccttatttggcactcctcggtttcctggtggcccagcctagcgctaacgacgtgcaaaaacgtaagtaataagttcacttctggtcccttaatttgtcgccgagtttgaaattcatccctaaatcgaaatagcagatatagcatgtccgtcaactctcaaaactactacaaataaggtcctaaggcggtttgggtggcggtttcagctgacgtgctatacaaaccatctacgtaggcgccacgtcagctataaccatcctccaaaccacatggagaccttatttgtgacggttttgaaagttgagggatgtgttgtatctcgtattttggtttagaaatgaattttagactcggcgataaattaagagacttgtagtgaacttattccaaaacataattgcacccaacccgatgcttcgcgcttcttgtgacactctgccttccgctcctgtcgcatggaaatcgcggaggcgccgtgatgccatggagacaacagaactggaggccggaagcggaaacaaattaaccatcaaaagtgaagctagatcaggtgatgatccaatccatcgatccttctcactgattagaattgatttgttctgctaatcctatttgttttcccccttctattgcctaggttaggaatctgggttcaactgttaaagggatcaatatcttcaacaacattttgcttcaagaaatacccgaataagttctttttttataaaagtcattgggtatttgtggtcttctatcgagctatttatactactttgtttctacatgtttttggttgtcaattatactgtcaatattattaatcgaaaataaaatactactccctccatattttaatgtatgacgccgttgactttttgacaaacgtttgacattttgtcttattcaaaaaatttatgtaattataatttattttattgtgacttgatttatcatcaaatgttctttaagcatgacataagtatttttatatttgcataaaatttttgaataagacgagtggtcaaacgttggttaaaaagtcaaggcgtctgacggagagtggggctcctcaccgggagaccgcgcaggcccccctttgccggttcggccggggaccctaggtgagactccaagctcccaatctgtatgtggaaggttcgcgagacaggaagcacagaagacgccggcgatgtatacaggttcgggccgcttagaagcgtaataccctactcctgtgttttggtggattcgtgtgtgaaggagctacaaagtatgagcctgcctctcccttgttctgggtttctaatctggaaaagtccagtccaatcaaaaaacccccctctctccgtgggcaaggtcctccttttatatcttaaggggataccacatgcaccatcccccctctctgtggggacttaccctaccttttcataaatggacggagatttgcatggttgccgttcgagtcaccttctgatgggacggcccgcacctacctccactttcgccgggagcaggcgcgacgcggaatcatggctgtctgctgacgacatgaccagtgtcagactggtcacaaatcggtcattcttgtccaccacgcgtcatcttagcaatctgcacgttggcccttcttcacacaacattttgcctgtaatggttaggatgaagcctggcatatatctgaccaggactaacgtgtcatctctgggaggtaacacgctgatccagctggggacgagtgcctagaagcccttgtcctgacgggatggggcgaggcgtgcgtcagatcgcctgtcgccacctaacccgcgatctgaccggtctgtgactggtcacagaccggataaatgagtgcactgcaccgcgttacatgcggcgtgacacgctcagccaaaccgcaataaatgtggttaggtgagccccactgtgcccacctaacccatacacgcggagcgaaaacccacgaggggtcggggcgcctcggccctcggggccgaggcgggtgcggctcgaccccctcggggggactaagaggagggcgaacacatcttgggcccgacgtcccccgagggtgccaggccacgtgggcgattgtgtctgcctcaaacctctagtcatgatactcccgatcccatgtcaccgacagcgtcatacattaaaatatggagggagtatattgtaatttacaactacttgatttattatttatcatgttagaaatgtttatttatgtcactttcataggatatgtgttttaaagtataaattataagtaaaaaactttaagaacctatagtgtcgagttcgtatatgtcatgttgtagatcacgactacggtatttgcattgtatagggatcgttagtaccagggtatacgcgagatgaggaattttttatacacgttcgcctctctttatctataaggtgcactatgacgaaatccatctttagtggcggctattttgggttttcgctggcggaatttggacccgccacaaagcagaggccagtgacaatcaagattttcgctagcggttatcgaccgctagcgaaaaaacattttcgctggcggtcatgttaagccagcggtcagcaaaaatccattttcgctggtggctggtttaagacggccgccagcgaaaatatttttttttgctggccgttacactataccagccgccagagaaaataatgaccaaattttaaaaaaaagacggacggagcgttcgctccgtccgtcaacgctccatccaccaagcat

SEQ ID NO: 20607 - DNA, 8881 bp, Oryza sativa
ttgaggacattgaatacagaatacagcttgagtacattagttggatttgttacaaaaactactacgtttgttttttaatacataatatagttgacttttaattgttcgtcttattaaaaatttagtgtaaatatataaaatataagttaagattagagttcgtttatgataaaattaacaactcacggatacaacaaacgagatgtatataattttttaataagataaatagttaattgtcacgataaaagttaataacgttgtacattaaagttttttaatgtagtattaactaattacgtaagaggattggtacatcataaacaggtatacatatagtaaaaaaacgaatggagtattaattaccactgcatgccacttattcaaaacatatagtacttgccttagataagagatcgggagtacaaccaagcacacacatgaacacatgtggcgtgcggtagctatatgttatacatgcatgattgattgatatctatcagaactggtagacgacgcccttgttcttctcctcctggtcccgatccttggtctcctccttgccgatcaacctcaccaccttgtccgccgccttctccccggttgccgcctcgtacttcttttcctgcatgcatatgcacaatactaagttagagcaagaacagtagacagtttaagccgatggtaatgcatgcgtgcaagaagaagtgatgagctagaagaggaataagtggagagagtatatgcgtcggtgattaatttgccgccggctccaaacacatccctaggtgagacggacaacaccagccagtatagaaacatggttgtgaggtccatgtgagagcatatgtgtgtgaaagctaaattagaaaaatatagatcaatctattggagttcatgccaatagccaactgctatatatacggtctcttgatcacctccaatctgatgtggcgcttttaatcgtcggcaggttgtatacactattaaacctgctcttattataatacttcatttgttttataatatatatagtaatcatttgttctataatatatatagtaatctatagcggggataagacactacatatgtaacgaatctggcaccaccaattccatccaaattcgatgcactatatatgtatatttcaatcttagactgttatattataaaacggagagattactatacaattactttcctactaagtagcactaaatatttctctctctcttttcataggcttccaacagggatgggggcaggcctagggcagggcctaagccctagcgctgccttcaaaaacatacttaaattttattaattcaccgtgtaaatttttttagaaaattaatacttcattagttgagccctatcttggagctagtttttacctccgccactagcttccaagtcgtcatcaaataaataactaagaaccgttagactcgtattgatctaaaacacacaaccgttcgatttcatacactcctagctccaccggcccaccggctcaattcaccgaccttttatttatggaaacgaattgattatatatagttcccaaacagggcagctcacatgtatgatttgttctgtgattaatataatttgatttaaagatttagtacaaatgttatatgtgtgaggcgtccatcagttcaggattggtcatcatatttgttcaatctaggtgcataacacaaaaccgcatatcactgaaattacgcaatactaaaatttatccacacccaccttgttattattcagcactgtaatttcaattgacaatgattttgtatcatctctgtagagcttaattagtttgctagctgttagctttctgcttgatgaatcccgttgtctttccataatccatagcaataacgtggggtatggtatcatctactagcagctagttgaattaagtgaaacattagactctgatcgcatatttaattagctggagtagtaatttactccctctatcccaaaataagtgcagttttgcactgtttatatttaacgtttgaccgttcattttatttgaaatttttttatgattagtatttttattgttattactccatccgtttcacaatgtaagtcattctagcatttcccacatgtatactgatgttaatgaattaattaacatcagtatgaatgtagaaaatgttataataatttacattgcgaaacggaggaagtagatgataaaacatgagtagtactttatatgtgactaattatttttagttttttcataaatttttcaaataagacggatggtcaaacattaaacatggatattcatgactgtatttattttgggacggaggtagcagctgatagtagtagtagtagtagagtggtacgtacgaaataggccgttccagcctgagcgacggcgccaaagttgacgtactccaccaagtcgtcgtctatgcggatgtggccgtgctgcttcgccgcctctttcccgttcgtcttgccggtgtccaccgccgccgcctgctcctcgtcgaccttcttctgctggggcaggtactcgtccatggctagctcgatcgatctaattattatcaggatgctatagcaaagttttggaagaagaagaagctagctgctaccttattatataggctcggtgattgggacggagagagtatttaaaaacatgtgtaatcataccccatcaactgcgtgccctactccatcacatcatacgtcccatctaaatctggtttaggtcccaactttttcttcaaatttttaatttttctatcacatcaaaacttttctacacacacaaactttcaacttttccgttacatcgttttaatctcaatcaaacttccaatttttgtgcaaactaaactcgccttagccctgtttatattccaacttttttttcttcaaacttttaacttttctgttatatcgaactttcctacacacacaaactttcaatttttccgtcacattattctaatttcttcaaacttccaattttgacgtggaactaaacacagccttaatttggtttgtacgagtaaagtaatattacctttgtttcataaaaaactaatctatattgacacatcctaatactacgaatgtaacgagattcatagtattaagatgtgtcaacatctactactagattgatttttttacggagtagtactcccttcgttaaagtgtgtgtttttcactcttttaccgtactaatacaaacaaaaatattcttactttatcagattttaatataattatttcttcttttatttattttaagtgtatttatctttacttttataaacttgggtacaatgatgatggttaaaaataaatttattttagaagagaccgaacgaggaaaaaaaatggagtaacatatattgggtgatggcgacgttgcaccagctccgggcggtcactacgtggccatcgacgaaccacagaaacgcaatcaagaccgatcatcgataaattcatataccatggattaaataagagtgttgttgtttcgacatacaaatcctcatcgataagaataatttacaaataacactcaaaagcaactactctaaagctagctattttcagagggagttgttacttttatattttttcttaaaagaaacttcaaacgatagcagatttgctggatatgttaggaggaataaaaacataaagtcttacagagatcttttgagaaaggaacacatctaaacaatcaaagtgattagacttagatcaaatcaggtcagtggatcgactatctgtcggcaatcttccccaagtcgagccgactacaaggttgaagcgaaactgccctttcctctcccacggccgaaactttcctctccccatatctagatccgccctgccatcgccagagctgaccggcggtctacgcggcggataggatggcagcggcggggagacagacagcggagaagttgcggtggcggtcggacggccagactcgtgcctggccgcgtgggttggcggcggcaacggaggtggccgggcgggtagcggtgaagcggcggtgttcctccgggcggtggtgggaaggcgggcggcggaggcgctgcggtggcagtcggaggtggccggactcgtgcttggctgcgagtgttgacggtggcaacggatgtgcccgggcgggtagcggcgaggcggcggcgtccctgcgggaagcggaggtgttgtggtggcggtcggaggcggtcgaactcattagccgcacaagctagcgatgacagtaaaggtggtcgggcacgtagcggcgagacgaaggcagcgacatctcttcggacggtggcagcctgagcgttgacggcatgtcctcaggaaggagatggtggttccagtgaaggtagccctagggatggcggtagcctgggattcagggtgaaaaggacttcctcaactatggcagtggtagccctataggggcagcagcagcccgggacggcgggggcctgagcgccggtgcaaggttctctgcaaggcggaggtggatcttggcggcggcggcgaccctagggacgatggaggcttgggagtctaggcggatgaagatatcctcgacgacggaggtctaagttttcagcaaatggacactgacagaggcgtccaagggcggtggtgggctaggaatccgggaggcgaaaaaggatcccaacgatggcgacagcccgacgaaggcctagaaatcatacgaagtggaagcagatccctcggcctacatctggtcagctagttctgacttggacgaggatggatgatggtgggctaatcggtggcgtgtggcgttaactcacctgaagcgaatgaagatggcatcagcagaggttctcagcgacgacgcactaggggtggtggtgacttgaagactttcactaacggaatctggccgtttcagcagggtgtggtgaggtgtaggttttctttttctggttctatgttctcatcgttgaggtgtgagtctaagtgctcttgtatctttttggctgtgtatatctttcatggatacaaaggctggataaatgaaaatccattatcacaaaaaaaaaagatttacaccaaatcaaacagaccgtagaaaggattgatcacgcttagccaataattcttttattgatctattaagctaatatttttcttaatttggaagacgacttttctttcattttttgatgtttgttggaagattcttctgctgcattccaaccagacgttcctgttaggatacgcataggctacggtagcataaattaaattttttctaccgcgtaaaccaggacccatacatgtattagatcatagatcattatcattcgacgcgctgcgcagcggaagaaagcgataagaaggcgaaggaaccctcaggatgtagcgcgcgtcgatgtagaggaagtagttgaccgcaccagctcgaccttctccttctcgtgcgttctcctcgccgtactcccacgctgatcaacaccgcaaagcagcggctcctctaccggtattcacatgtatagggacggaacgccacgcgcagatgtgctagcacatgcgcgcggctagggttttgctcgaggaggggagtggcggctagggtttctcacgtgatggaatacctccgccggtcacacccctcacaaatatatagaatccatgactcgggcctccaaggcccgtaggactcctattcggatccctatccgaattaagctcatattggatctccatctaatccccttattccggcccattaagcgtgcgaccctgtagatttatgtacactcggctgcaacccgaaaactccttttcggtctacgtgtcaacagcggcccctagcagaatgtattgatcgaccgggcatgcacaaagatcatctcggttaaacctctagtatatacttgtatgaacccctttgccttacgatatcgattaagctcaaggctagatatgtgccatcctcttcgcatggattgaaggctcgctttatcaccttatttgcatatgctttctcctataatattaggtatatgctatttccatataatatgaaccatgtatagcatatagtatatcttactcgtaacaccaacactatcatggagcaggtgatcgacaagaacatggaagaaattaaaatggaatcttggagcataggaggagcgaggagtaacggtgatcttgttttctcccctttttttagcaacatttttttatattttccttgttgagaggaatggtgatcctctgtttgctgtcaaattctcaattagaacagaaataaccgcttaggcaatattcttttctcgtcaatatacatattttatcttaatttccgttagcatgttttttcaaaccacgaaatataccatttatgaaaattttatatacaagtcattttaaaaatttagataaatttatttttaagtttatactccatccgtttgataatgtaaaactttctagcattgcccatattcacacacacacacatatatatagatatatgtatatacctagattcattaatatttatatgagtgtgggtagaaaatcttaccttataaaacgcggaggaagtaataattaaaaatcaattaaccatattttacgtatccgtacttaagctccattttcagcaaatcacagcccatccctaaaaaaaaaaaagcaaatcacagccacaaaggcccatccgcccatgtggctatgtccacgaggcccataacacgctcgctctccctctctctctccaccaccgccggcgctcgcgatggccacggggctcgccgcggcggcggcccgccgccgcctcctccaccttcctcgccaccgctgggcccacctctcctcctccgctgctcccgcgggagggctggacggcggggacgggagcggtggcggcggccgcgtcaagatcttcgaccgcgacctgaagcggcggcaccgggaccgggcggcgtgggccatgggggagaccgacgcgctcgccgacgccgtcgccgacaacctcctcgaccgcctcgaggactgcaggaaggcgttcccctccgcgctctgcctcggcggctccgccggcgccgtccgccgctcgctccgcggccgcggtgagtgagctcctcaaatctatctcctcttgttgttcttgcgtgacaacccctctacatatgcaccagtagaatcgctgaatttttccagcttttaacttgatagggagtatgttgtaatgtggtgatgggaggaattggggttttcttgtgtaacaggtggaattgagaagctgatcatgatggacatgtcggccgacatggtgagaaagtggcgagagatggataatgctaccgatgacgtcctcgagacgcagtttgtcgtcggagatgaagaataccttccaatcaaagaaaggtaaagatcaatgggagcaatggttagtcttcagtatgttagttggttccatgtaaatattattgagggcattattatgttcttgatttgttgattctggcaatcaaccattcggtagtaatgttatccacctttagttgaaaatatgacattcgtaaattggatacgcaaaccagctctttatctttccacatttctacttaataaaggtaatatcatgcagttctcacaattatttagtttaagtcaaacaatgtttcccgatcttcctatctgcatattgctcatgtcattattaatgtggttatggtctctgaagctcgcaggatacgataataagttgtcttgggcttcattggacaaatgatctacctggagcaatgatacaggtgaatttttttttagtttgattcttgctagcatagtttgcaatatacaactattctcagttgaatgaactggttatacttgatggcagtgtaggttgtcgttgaagcctgatggcctttttcttgcagcaattctcggtggagagactcttaagtgataacctagcaagctttaaaatattttgacatttaccatggcatcagcatatcctaattatcctttgacttgcccttttccggatgctataatcagggaactaagaatagcttgtacaattgctcaaatggagcgtgagggtggcatcagtccccgaatgtcacctttagcacaagtaagattcctgtgcgatctgaagtttgaccccaacaggatattattttgtgcttcgtacacctttttatggcatcagtttctcagaagcacattcctggcctttcgcttatgagataggacttgcaaccacttaacagctagattgcatcacattattgctttatcttgacatattggtgtttattcagtctgatggtgatattgggttgcacttttcaaggtccgtgatgcaggaaaccttttgacaagagcaggcttcacccttccaggagttgacgttgaccgttacactgtgaaatacaatagtggtttgtaaacaaaacttaccttttctaatcagtggtatattttcaaggaaaaatcaggtacatgccacttcagagcatttctaaatcatattcagagtggcacgtacctaacttttcctattagaattaatgattgggtatacttctttttcctggaataatgattggtagtactatatctgaaaagttcttttatattgatgaaaattctgtcattgtgttgaacatttaaacatctccatgtgttgcttatctctcttgaatcctgaattcctgatattactgcttctatcgactagctttggaacttgttgaacatcttagagcgatgggggaaacaaatgctctctttcaaagaaatcctgtgagtatattatagtacttgtcaaataaataggtcaaattctaattcatag

SEQ ID NO: 20608 - DNA, 1640 bp, Oryza sativa
cttcatctttagtctaaccttctgccagtgtgtctcaaagcactacttacctgtgacgttatagggcacaactttctgttgtcaacggctcaatgatgttgatcatagcaagtttagagaataaattctgtaagtttgtcgttcagtttccagaggtatgctggtttgatgtaactctcgcaatcagaattcatgatcgaatgataatatttctagcaccatttgcctgcttcatttatcaaatgtcggattcttctatgttttccctgttttctgggaacaatttgaaacaaagccattccagcattattatagatcacttggtgccaactgggttttgttctgtacctgctcaggcaaatggatggccatcggcaagggttcactcgcaagatgtaccatagccttctgaatcattccgttttccatcgacttgatgcagaaccacacaagcaccaccaaagcaactcttctttttctcctttggatccagctcagtttctcatgctccaggagagcagggctccaaattaaataaggaaaaaatcacaatccaactgttgaaaacctcacaaaaactcttaatttcaggtactgctatgaggggaaaatttctataaatccagtcatgttcttcaatcttacatggtgattatatcctacctgataacacattgttacaagctaaaactctacgtatgggcttttgcagcagcctgaaattgcaggagaagataggaggttgcaacctctgaactctggtccatcttctcagaattccaaggcaccttccaactacttaagctacctgcctggcttgctgacacgcgccttgcgaacggcttcttggatctgcctctcgtgctccttgagcatgtcctcaacgttccctcctggcggcatcaatggccctgagtggtggatccttctgtacttcctcccatggttctgatcacaacggcaaatgcacaagaaatgtgagataaaacaaaatcatggtatacaatctttttatcctcgtgcagaattgcaggatttcatcagtatttgctctagcagcagcaaagctatgcttaccatgccgtccttgacttctgggttcttgttctcatcatgcctgtctggtgagtcgttatgatcagtagcttcaacagtgctcctcaaatcggtcgcaccaaactgtggtatgagcgagtgtgatgaccccttcttccttatgccacaaggattcgcgacgcgcactgagcagcaagcgcggccaggtactgttggctggtcattgtcgccctccatgttgttccatgtggaactgtacccagggagctgcaccgcagttggacgttcccgtggttccaccctaaaccctggaacactgtcctcttggttgaacacctcgctgttgctctttgagctggtgtgtgtttgttgctgcatgtcaggcagagttggtgagatgaacttttgaaaaatataaatgttttgaaatttgttaaagaaaactgaagcattgagtttgcaaaaagatgtttagaaccatagaacaaacatggcgcggtgaaaaataccataaagcaaccaaatgttctgatatttatgtttaaaatgatcgagtaaattgaaacttgggcagtaatttggat

SEQ ID NO: 20609 - DNA, 8634 bp, Oryza sativa
ccataagcacataagatgccttcttgaatgagtggatcaaattgagaccaattttgacagatcactttccagatatctgcccttgacaagaaaacatcattgagtacgcttgataaacctctgatgacctgatcatactcttacaaaacaacacatttttccatgtggctgttcatttttcaggtaatttggaaacaattcacatgttcaccaaattttaggacaaaaaaatacaatcgtatcaaatagaaaactcaagtaagatttatggagaagtgaatcatagaaataattaaaatgaacataaggcaacaaggttggtgcacaattaatttctttcttcccatcaaactaacccaaaaaaactgtaaaaatgagaaaagtaactaaagaacactatttggttaaaagactcaccttggggaggaggcatgagtacgcaaatttcagcttggtgtgaaggcacattccaaaagcaagaacaaagaatctagtattaatctgtttttccctttcgagaaaacattatgggttccacccatttcaggtaggaacaagtgtgacaaatagtaagaaaaactgaacttggatttacaacagagagatttcacattgagagtttgattaagttacttctctccctctttctctctcgttcctaacaaaacacataaaaaatggaaaaattctcaaaagcaaaacagcataccattagaggtaactaataatagagtatgaaatgaatgcatgaagtgaatgaatggatgggagaacttgaagaggaatggctcgaataatttaccgacaactaaatatagttaacactttggttttcttaaaatagtacatgactatgcctttatactcttttgtagatagaataacttgtaaccttatgtttacatcaattaacgagtttgtaaattaaaatagatgaatgttgctacagatagagagatgcataaggaactctctacatttctagcataagaaagacgataacaaagatgaattgataacacaatgataatcatatcaacttcaataattactaaaataaagctcatagtttattattaattttgctaaagcaaattgatggtgagagaataatccaacagtatcatttactgttcaaaatttacatacaatagcaaagattaatacttagttatcagcctagtgactaatgacaggttagacgaaagcaaagtaacaaatttcttgttaaaaatatggatgacaactcgaatgcaactaacagtaaatgttagacccttcttacattaataattaattaagcaaatgggaattcttgaagtcagagtggcagatcgtaactaactttagcatgccattgatatttaatcttttcttgaaaaacgaataccaagcttaccttttcagacaatagaaaaggagtatcagtcatttcaacaaatcaaatgtggcgttatatacagatttactgctgttagcaattcaaagagggagttgataaattaaacagagtagctttcagatcagcaaaccgatgtgcttcagaagtcctgtctgcagcagtgagaagccgtataatgcagtcaaaattatgttcagacgcttccagattgtattcttgcaccatggagttgaaaatctgaagagcttcatcatgcaaccctgccgcttcacagattctcagcaacacatcaaaggtgccattatttggaacaaacctgtttgacagcatccaagcaaagagttccagtgcctccttgtgtctctggttgattgcgtaagcttctattatggcagtgcaagtaagggatcccttggactcaatccggttgaaaacccgttgcgctgccttgaggtctccacatgtgccatacatgctaactagccctgctgcaactagggggagaggttccatccgcaactttaacgcttgaccatgcaattccttgccaagttttgatgccccaatgtcacggcaggcactcaacatcctgctgattgcaacagcatcaggccggcggtttgagagcagcattgatctgaacacatcaacagcagttgaaggatcaccattctttaggtacgcatcgaccaatgctgtccaagcttgtacagtcttcttgtccatgacatggaacacccgttgagagtaatccgagtgactgcacgtaccatacatagtgatcagtgaagtgcacaaggaaatatttggcaggaaccacctccgcaaggcatatgcgtgaagctctttcccttccctcaatgctttcaacttcgtacatactgggagcacagtccccacggctataaaatccggtctgattccttcttgttgcatccaaagtatgcacctcagcgcctggtcaggccttccattggatgcatagccagacatcagtgccgtccatgagacaacattcctcttcttagcgctatagaacacccgtctcccagagaccatatcgccacacttgcagtacatatctaccaaccctgcctgaatgtttccaacatccttacgatgttggaacttcttcaacacaaaaccatggatctccctacccaagttccaggcacgcaactcgccgatgacaggcacaactgacgtaagcaccacagagttcaccttgatcccatcctccaccatccaccggaaatgctccagcgcctccctcttcatccccttatgcgcaaacccggcaatcactgcaccccacgcaaccacatccctctctggcatttcctcgaacaccataaccgcaggcttcaccttcccgcacttgaagtacacgtccatgagccccgtcatgagcatcctgggagcgcccgcgtaggcgttcttgatcagcatcgcgtgcgtggcggtggccatggccatggacggcgcggcgctcccggagatggacttgaggacgcagccatacgtgtactcgttggcgtcggcgcccgcggcgcgcatctctgcgaacccatccacgacggcggcgcccgcctggccgcgtccccggcgcacgtgcccgtggaggagcgcgttccacgagaaggagctcgcccggggcaacccgtcgagcaccttgcgcgcgtcctcccgggcgccgagcgcgaggtagagctcgacgagcctggcgagcaggaactcgttggagtcgaggccgtggacgcggaggtgcgcgtggacctggcgcgcgtgggcgagcgaccgggcacgcggtgagcagcgcggcgaaggccgaggccgtggcggggacaccgcggtgggagaggtggtcgaggagggcgagcgcggaggggagcctcccgacgcgcgccagcctccggagctccgcggacagcgcgggcgcgttcttggagtccggccggagctccgcctgcgacgacgaagcgccccgcgcggccgcggcggcgccggcgtggagcgcgcgggagaggggcgtcgcgcgggtgaggggcttggggcaggagagcggcttggaggggaggagggggtggtttgcggcggcgagggaggaggacgccatcgccatggatggtggggcggaggttttcgggagggaaggagaaggggttaacggttgggaaggatggtggttgttgacgacagactaaagagatttttattagtttactttttcaatttctttgcattttctagagagtttgtttttgaatttcttgtgcatttttacgaataacattttaaattatgacaaagaaaaactccctagctataaagtcagctaatgctcccttagtagcatccattttgatgaaagaaaaatgtgttctctgcccaaacaacctaaaccgtaagaggccacgtgtctatccttacctatgagtatattgtatacactaattttgtattgagtcattgggatgagagattggggctgaacttggatggatgatagcattgaggttgcgaggataacggagaacgatagtaggtagagagtaactgtcagggttatggataccacatacctaatagtagttgactaaatctcggcaggacccactacataccatgtcttatacggaaacaaccttcggatataggaggagttccgcataaggaaggatgaatagagttctacatggaaacgacaaggactactcggattgtatcaatattggttttcctagttctacttggacaaggggatacctatgggtataaatacaatagatcaagacacaagatcaatatacaagccaacatgcgctaagacaagacgccggatatcgacttcagagataagcatggctagtcccctatggtgtctacggatactgtcaggagagacatagcgctgtctttgatcttgccggatgcggattcgaggaggaaggctaccatgttgtcgactacgagtcaacacttcagaccgccaagtcgacaacagttagattggctaccccaaatattgtactggtgtgattatggtgaataagagcaatgaccggcttcggccaacaggagtagggttattacctaacaattcaggggcccgaacctgtataaaaatcctcgtccccatatcttttattacaatctcgcatatatcctagtaccaacgatccccatactgtataaataccgtagtcgtgacatcaaacgtagtcgatgattgggaggaagttcacgcactggctagccaaaaagcgtgcggcaaacacacgaacgtgtccatcgcggctccttaagccatggcttcgcttgctaggttcgagggctggctaaagcactcacaccttacaaaagacacacatgtcttgctcaagccacccatacaaactgagttaaaaacatagctcctatgtgatgtggtgttgtgacttgtgaatggtcttattttacaatcaatttttgtcttatgatctttttttttgtcttatgatttttttttgctgcctataccatacaagactaagtgagaggatagttaggaatagggtaagttttggtaaaaattaaataggataatcatgtgggaaaatagtattaaaaacccaaatatttatgaaaaaaaaataaaattgggatggaggtagttgaagcttactccaaaacacttgtgctctctattgcaatgggtagatcaaagggaactatgattaattttgcaccaaggttttgggcaggtcagaataaaatttggaatacgtgtgttcgatccctgcatctgtcctcccctttgcgtcaatctcagccgtccaagatactagtttcgatcgaacggctttccgcgcttcttcctcctccgccgccgcaccttctcccaccaccgtcctccgccgcgaagccacccccccacctcacgcggctacggcgagccgagacccgaagaggcccgagtaggcggcgccgcctcgaccgggaggtggtggatcgaggtttgcgctcgccgacgacccccacccgatcgccccgccgcgatgcccgccctgcgaaggtaagtagagaaatgcagtaggatgcaacgcaaatgcggctcgcttgttctcaggctctcagctttgcttatctcttagacagtgcacacttttatcttctgagctttgctagagcaggcatggtttggtttgcttgttcttgctgaatgtcacggttggaccgaaggagtgcatgaaacttcgatttggatgtcgccagtgatacatataggttggtttcttaccgatgtagactttatattatacatctcatgtagcggtatggttggaacatagggaaaaaaatagcccctcatagtagaatctgttgaggaaaaaaaaaagtacccctcatattacaatctcaaggaattttactgtacttgaaaaagtaccttaaggtacctaaattttacattaaaatttttggtacctagagatattaaattttacactagaaaatatgatactttctcaagcatgataaaattaccctacaatcttatacagacaatgcactaagatttggttgtgtagtgcgcgggtctgtaaatactgacatgtaatgttggaaatgccggttttataagctaatactagcatttttgtaattgcttacatggcggaggcagaaccagatattttggtgagggaacacttcagaatgaggaattctgaacctattaattctttggatgtttctcatctaaatactagttaacttcctagatctcatcacagaaatgtgatggcttagacaggacggtatagaaaattaacaatatcgaccaacaattttcttgtaatatattttgagaaaaaaaatctaacgatatttatgctacgaaaaatctttcccaacacttatacatacatatttcatatggattgtccaaaagttcattaaaatcagaataattttgttgctagctagcatgccactttttcaccagagggattgatctgcaatctgcaccataaaaatacaggaggtagtacaagtgggctttctattttcttacaagattataggaaagcgggaagtcagacaagtagggagcacttccctttgagtggaaaaattgagccacatatatacaaatttgcagtcagaagacttagcaacaaagtactgcaagtaggcgtagttaaatcaaatgagtgctgtgctgtccacatccatagtctggacataactaatggcattgactggttcccaactatgaaatttcttcagagatactccatctagtccagtcaccctcaagacaattaacaaagctgcagactgaagatgccattgttacaggtactagaactgtgcctcctatttagatgcacaagatttgggatcctgatgcatatgagcctgtgatatagttacattgacatgtgcatggagaggatttttttcctttgtgtgcttctacagtagccatcttcatcttgaatctctctttgtgttgcttcttctcttgcaaatttttacgtgcatctccatatgctgtaatatactaatctctccatagagatctttctctatagcttctgttatggcactagtgtttgctggaaaggcagtggcaactgcagccatctccttctggatcaacaaggctttcacctacctgaaagagtacaaggttgaaggcatcgaagatattaagaacaggctactgcagtcgatgccgaagatccaggtcgttctcgatattgtcaatcccaggtatgtaaaggaacagagcagtgcactagatgcatggttatggcagctcaggcacgcagttgaggaggctgaggacgtgatcgatgtgctcgagtactacaaactcaaagaaatggcaaaggaccacaaggttagtgtctggggttcctctttctctaaggtgaagcacaaagttattaagtctgttaaacatgtcagtattttggacaagaatttgaaacaatttactcaccggggcactctcaagaggttgagggaagctgtggagggtttagacaaggttgcttcagatattatgagcattctcacagtcacagaacatctcaaagaggttgcttcgtgtagtcagcagcaggagtattcaacgaacgatgatcgtgcgacaggtttgacattaactccacctaaatttgttggacgagaaaaggagaaagaaaagatagttagatggctgacaaaggcatcaactgacgcttctggaaatttgatgagcactaaccatattcctattctgtcgttaattggtcacggtggcatggggaagactacgttggctcaacgtgtttgtgaagaaatggttaggaagaatttcaaggttatatgggtgtgtgtatctgatcgctttgatgtaacatctgtgacaagtaaaatactagaatctgctacgggggcaaaacctaatgctaattgtttggagacactacagcaaagcctaatacacaaactgaagtattctactgattttttgcttgttttagatgatgtgtgggaagataagaaaatagataaatgggaaaagttgtttgctcctctaaggacagggaagagtgggagcaaaattttgttaacaacacggatgcagtcagtagctgttttggccacagaagccatgggaattgaaacagagttcttgtcaatagaaggactagaagaaggtgaaaatcttgagctcttcagtcattctgtattttctggtcagaatccacaagattttccaaatttgaaatcagtcggcaaacaaattgtgaagaaactaggaggatgtcccctggtaacaaaggttgtcggtggccatttgcggagcaatatgagttttcaacactggaacaatttcttgcaagaaggtttgcaacattttaaaggaagtgaagatgatattatggaagtcctcagactaagctactactgtctaccaaccgaccttcagatttgctttcgatactgtagtatattcccgcaagattatgcatttaaaatgaaagacctagtgctgatgtggataggttcaggactgatctcagaagctggaaataaaccaccaaaaaggcttgaggacattggagaacagatcttggctcaattagctgggaaatcattctttgaaaccaatatcaaagtagatccgtatagtcaaaggaaagaaaattattacataatgcatgacttaatgcatgaattggcaaggtatgtat

SEQ ID NO: 20610 - DNA, 1175 bp, Oryza sativa
acacgattggtgtatccactagaaatctcttgtatgagctttctgaaactttcttctccttgtgcacttttgtctgatatctttgatataaagcaaactcctcaggatcaaaatgtgaccttctcattttaatttcaagctttcttcttttctggggaactcttacagtatttttgttcacagagctttgctttgagctactagatttatctggagcatgtgtagacacaatgatactggttttgttctgctttgtctgattggtgactgaatagaagttcagatggccattgcaggcttttactgctaaaccagcaatatctccatggcactccattgtcatggccagcttttctgcaatagagtttggagaaatatctgctactactttattgtgattagcatccttctccttaggcaatgcacgtctgatttctgccactatttgaaagcttatattacatgtgtacaataaatcttgtactgcttctcctactttcttgtcttgtgatgctcctcctactttcttttttagttgtggtttaacagtctttacaacagctttagggagttgaacatcagaacctaatgtaccaacttggaaggacatacccactgcctcattaattttgctagacaggcaactgatgaactcatcttcttcaaataaatttggacatttggctgcttgaaaatcatttgttaatgtcttggatatttttgagaccggcatattcataggttcagcgagtgaatgttttgtagggctagttttattctgtggacttccaacctgtggatcaagctcaccatcaaggaacctgtgaaatgaagcgtgaagacatgacacaggacaatttagtgactaaagctaaacgacatatgttaacaatttcacaggtgcatatgcaaaatataaaacaaaaggtgtgtacctttgcatctttttaagtacacgaccttgctccttcgaacaaatgaaatcatttgccttcaagcgtattgtatattgaggacagcaagtacgttccatctcaagtttgtaaagaaaacaaccagatctcctccacccacggtcaagaagagctgtaaacagtagccataattttcaatcatgataaattatgccagcagaagaactactttttaaaaaactatgaatatccaatatctca

SEQ ID NO: 20611 - DNA, 675 bp, Oryza sativa
tcatcagattggaaatccttattgctttcttttatgcagttttccaagttttgagcaaaagcttccatgttaagttttattgttgggatttcatcagtatcttcatcaaaatcttcaatatcattctctaaaagttctcggcattcttcctctcttggacttgctggctcctcaattattggatttgtgttgttagcatgaacatcccttgcatggatactcccctcgagctgaagcagaggagttgaatgtggtgtgggcattgtaccattctggaaatcaaattgattgctcatattcaccaaccttttgtcctgaggagaaggaagtgcaagtcttgcacttcatttaaaaaagtcaaacaaaatataagaattaataaggaacaaaataacaaataaagaaatatgcaaaatgaaggctcccagataaggtcaactggaagcgcaagatatatcaggcatgcgcgcacacacaaacaaaacaagaaagatagtggaaagaggaaatacgtgaacacaaaattcccaggtaagataagtgaaagcagcaaaaatattttgttgcagacagaaacgtacataaagtgccatgggggtgtactagaatcatgtactgatttttctcctagaatattttcccttttattcttcaaaagcactattttgcactctt

SEQ ID NO: 20612 - DNA, 9471 bp, Oryza sativa
gaagaatcggaaacggcagtcagtcgatcgtgacgtgaattcatccataacaccatctaacaaccttaaaagaagaaacatcaagaaatgctcaccctctgaaacaccggacagtgcaggagccggcataaagctccgacgcctggatcccctccccgtcagcctcctgtggaacaccaggatacttatcggcacctgcgtgcatcctgcaggaaggttgtaggatggccgtacggggggcccaccatgctgctcatcggcgctgctcccggaacccgccaccagggctgcctgtggaaaggagccctcgtgcatggcgttcagcaacgccgtcgacgacagggaggatcccgggaacaatgtcaatggcgggcagctccggcctgccacggccgtcccaacacccaaatttggggtgcccctcccaactgacacgccggaggtccagctctcctggttctcagcaggattcccctgcaggttgagccctgagggatccatggctgcttcttccacaacctacacgaagactaagatgaaattgcacacaaagcgaaatacaaacgacagcaaccaatgaaaatggaacgagaaaaacctccccaaaacccagaaaaagaaggggaaaaatatagccaaggcgcgaacctaacgtggattgccggggttcaactgaacccctaaattttttttcgattcgaaccgaaacggaggcagatggaaggaggttggccgcgtcgatcgatcccccaccaaacctcctcgccggctgtgcgcacgccggcgccaggccacactggccacggaggaggaggctacgggcggaatcgggaaggggaggacgccgtacacaccgccgcctgcgccttctcgccgaggcgacgcctacctgcagctcgcactgaccattggaaagggaaagagagtgtggaggatcaaggatgaagacacggatgcgtgaagagagaaatatcagatggaggtaagacgggttctcgtctttcgccattttctaggtagaagatgttacatgcgaaccgcgccatgcagtcgttaagtggggatgaaaatggatcggatatatatatatatatatcaataaaaccgttataatttttaaaactttagcagcacgaaaccaatcaacaatacaaatataatattttaaaaatatattggattcggattatccgaattaaaaactattatgggcgtttgtctcaaacgtgaagataaagataggcacttaatctcggtagggaaaactctattggaggcctacaaatagggttaatttatctttctaagagatgcggctaccctaatcaagtgaaacgggtctgaggacgttcgttggcacctcatccttagagattaaaagcccacttaggaagacttaaatatcaaatacggataaaaaagatcctagcatcgctcgtagagttgtttggttgttaaccatactttatcatagtttgtcatgcctagagggatggtaaatagatgtttctagcaacaaaacttacagtggcaagtagaattgatccgataaatcatgtgccactgcggatagtccgataacacatggtgttggacaatctaatcaaacatagagaaaacaggaaggaactcacctattacatgtatagatctgaacagttcgacaataccaagcgtcacacaatctgaccataagggacaatccggttttatacagagaatatgaaacctatatgaggtatgacactttgcacactgttggtatttcttacgatcacagataaatccgcaagtacacggaatatactgatgtagcacttcactcgggattattctcatgcatcgatttccacagggaacgtgtgtgctaactccagtttaggttcatccaaggacacgaagctatagataggcaaaggatagagaggtttcaccggtgaataacaatgtctacgaaaagcttaactttaatcctaataaggtacttcggacactggccagctcgctgctcccagatatcgctctactgcgcacccggacagggaggacttcagtgatattgaggactgtcaccacctctacacccacctcacacctactgtgggatgcggagcaaacaccggaaatcaactacctagacaccacgtctacgcagttaataactattttagtgtttataactcactaaagcaatcactatagtttagttgattatagtgaacgatgatcccatctgaataggaactaactaagaaataattctcaccgagtaaaactaaactactcaaaagatatttcaattataataagagtaataaacagagcagaatgaaataggaagaggattaccaacaactccagaattcctcccacttcttctactctactctttccctaatctagtatacaataaagtacaatagagcctcttgtaattcaactcatgcttcaagtatgtgtttacaagtgaggatgagaggggtatttatagggggagaagtgtcttgggagtgtggagatgctccaagcaaccaaagagcatcttctctcttctcatgccaagtgtcccttctgatgacggtttctaccggtattaacgccataaccgtcatagggagagcgttatccaccgaatgcaacctggttctgggccagcggcctccacagtggttcggccgaactcagggttcagccgaacctgggacggcaccgtttgctccgaatttcggcctggacactcattttggccccctcattctattggtatggatagaaggcccatttggaggtgtttaattgggtttctgggtccaaaactccatatgttcggatacacgtttgattctcctcctccttcatgtatatttcttctcaacttaggtagtttgtcacctgcaaacgaatatacaccaacactcgtgaaaattgttagaaataaaccttaccactatgttggatgttttacttttatgatttatgcaggttttgacggcgttaatttggtacttcataaccgtcaacacacactaattttaaactataactaagtggtgatcaaaagatttaagcatgcatagtatgatcgccaaaaatctcaatcatgaaaccataagtgcaaagtagagaaacacaccgatttgtttacagaattcgaatccaaccaatcatgaaaccataaggaggtctgaagagccgggtttcgattaagccttttcctcttcaagctactacctctgatagtgtcttggtctcttcaagcaaccaccaaggacaagtttgtattccaagcgacccacttgattccaagctcggatgccccgcaactcccctctgatgaagcttgctctaccaagcgtccaccaagatgcagcttggtttccattattaccttttcccttccgagacgacttatcaacctgccgcgacgagaaaatgatgagaatgagtagcgactgacagctccgttcaccttgacttgctcaactccgttgaggtctctgcaaccgtcgctaggtatcctcgatcgccgtatatcttggctttctccactagatcctcggagttcacctcgatatacaccagcaaagtcaccttctcgaggtcgcggagcgcacacttccactccatcctcggggttgtcgtcaccaagaaccaccaccttcaagtgtcgtcggccccaagctaccttcgagtagagaaagtggaaggggagagtggcgccagtggtggatggtgagagagtagcgactgtggtgccgaccggcggggggcggagggagagtagtgtcatccgtgcagtaagggagtgggtaaggataattttatattatgctctgatttttgaagcgttcggtgcaaaatattggagtttcctataaattatcaaaacacaaggactaaaataaaaaaataatagggactgacatgccaaatcaaagacaccacttgaactatttgcactgtaaaaaaggagggtggtctcaggctatgtggcatgttctctctcctgtagagaaatggttagccatgtcttgcacaaatggccttaggccaatagtagtgggtcactcgtttgttttgcctcacgtgccatctcagcccaattcataagatactccaccatcagtgcaaagagtccagaaaagcctaatgtctaagaaaaacaatgcaagcgtcaacggggaaaaatgaaaaatggagctccacaatgcaaagaaaattgagcgatgtagcgggtgtcagcggggcatgttgttagggatacgagagacataatgggggcgcgcatgctacggacgagaaggagaatatcatatgtggcacctcaaagctgaataccatgtaggagcactatgactgctcttacaagcacattttctcagaggtgactagggatcggtcgcccaatccaaatctccaaaaatcgggcgctgacgtagtgccacccatatatgcaaaaccactttaaaataattttttttaaattatttatccaaatcataattcgattgcaccattaaattcattgcaattaaatcttcaaaataagaccacacatggatatattccgacgaaaataagcttattattgaatttttttaaatgttacatgatgttccaccaggtatatcggaattgctttactaagtagatcgaaaatgtttcaatcgtttaaattgagcgttgtttcacattatataaaaacaatgtttcagcaaatagcgaaaaaatgtttcagttaactgcaacatttgatccatacatagtgaaacattataagtacactaggtgaaacatttttagtggaacaaaaaaatgaaatgaattcccttaatagatagtttccaaaatatgtgggtgatttgttgcaatggaatatttcagttcactgcaacattagatctatatatagtgaaacattgtgagtgcactagatgaaacatttttggtggaacaaaaaaaccaaattccctaaatagagtatttctaaaatatgtgggtgatttgttgcaatggagtatatggtggagacacgtggtgggaacaggaggagtcacgtgcgagtcaggaggggggggagcgcccgatccagctccccccacgccggtcacccgacacgcaacattttcgcattttctctgtgcacctcaatcttatcttcaaccacgattgccactgaactcgtcaaatctatcataaatggacgagagttttctgacatattagaacactagatatttaggtcttgtttagattccaacttttttcttcaaacttttaatttttccgtcacatcgaactttcctacacacacaaacttctaacttttccgtcacgtcgttccaatttcttcaaacttccaattttaacgtgaaactaaacacaaacttatatggtcttaccgttgtttttttatacaaagttcagtcgtgtcgccgccgccgccgctgcaccatatcttctcgtacgattggtctttccacccaacattggcagaacccaccccctagacaaatagcaatccactatgctcacaaccagcgatgggacgcaactcacagttgaggcagggaaaacctacaagaaggttagtgaaagaaatgaattgggcatctaatgtgataaaagagggtcaagcctagaaatcgggaagaagttagcgctctgcagggttgtctattcctctttggcgcaacaaagctttattgctccacagtagtgtcgaactgtcgattgaattcattcgctgccgaaatcatccagaaataccagtgacaagacaatgaaaaacactagtgacaagacaatgaatgcaacataatttctgaacttatcacggcaacacggtgggacacacgatgagaagccccaagtgcatccccaaggacctcgggggccccatgtgtgttggcagttgccgtcccgcgcgatcaaataaaaactgccttccgattccgacggggtctcgcttacccactgcagcagagcgtgggaccaatccccgtgaccgagcgtggatggatcccacgcgtctgtcacaccgtctcgctggcctctccgtcgccggcacgcgggtcgccgctcccaaagcgggtcacgccaaaggcgaccaccgtctccatctccccttcccgagcatcccccgggtccatcatgactcggaatgtgtgctgcattttttgtcccggcacttttttcccctaggatgtgtttaggccgagttcagggtatttttaattcacgacaaaattagaagtttggttaaaattgaaacaatgtaatgaaaaagttagaaaattttaaactttttctttaaactttcaacttttccatcacatcaaaactttcctacacacaaatttctaacttttctatcacatcgtttcaatttcaaccaaactttcaattttagcgtgaactaaacacacctttagttcacattaaaattgaaagtttggttgaaattggaacgatgtgatgaaaaagttagaagtttatgtgtgtataaaagttttgatatgatagaaatattgaaagtttgaaaaaaaaattggaactaaaatcggccctactcggaatagaacggtatcgtcttttttcagctctgtgaatctgtctattgatggccacagcagccagtagcaccgctctgcagtcctggctcttacgtgtcagtgtgttcgtccgtctggttgtcatgccaggcacagtagtggcaaggtgtggcatatggcagctgcggtgaggttgataggtttcgtggccttcgtgtgcctcgggcgcggagccgagcgaacaccggtggtgaatgtggaggaaatggcagaggaaagcgggaatctccccgcatgagacgagccgggccgacggagccaagcgaacaccggtggtgaatgtggaggaaatggcagaggaaagcggggagggaatctccccgcatgagacgagccgggccgacggagccaagcgaacaccggtggttaatgtggaggaaatcacggaggaaagcgggaatctccccgcatgagacgagccgggccgtgccgtgccgctggcatggtgacggaggtgtcgtgacggcatctggtggcgagtcgtggtgtcagcacggccaacgcatgccgtttggcttttgcaacgcgccggtggtgctccccacctaccgtctagtttggagctgtgcaacgagaggcttccagcttcctgctcccagtacgatgtacctgaaactttgtgcttgtgagttgacacagtacaagcaaattttggaacaagcggtgttgctgcttcccgtaaccaggaacagcatgcgggatgaagccacagtgaaatgctgtttaacagttggacactctgtaaatcacatattcttctcatttcaacgcctgcggtcctcgagttttttcatcaagaaacagatgtgctatttttatgtagaatcatgtgcagaaaccaaacgacttgtgctatacccttcggccaacagtttatggaatacggacttcaatgacagataacgaatcggccggaaaaatgtgtcattccagcctccaacctgaacccaccagaattcgactgcgaagcgattagcataaacatgttattgtacctctaaatggtcgcattgctcccttgggacagaattgcaggccaactacagggaataaaccatgcgatcagatagctccttccctacaactttcacgtatttgctcaattgcctttctagctgttcgaggtgcctcctctcgattcgtccaacgactcccagaagatcctgaaagcgaaagtaaaaaaaccaatgttgcagtacatgagcaaactaaatagcagtattaaaaagcatcaattaatgcattctgcataaatcaacagccttgaacatattgtcggatagataaggtaacacaatgagagcaaagaaatataattcctacacaattattatgcagtttcaatatatgcagcatatatagttgttagcatgttctgtacaaaggacttgcaaaaggatgggcaatttaataacagcatgacaagattaaaaaggaaaattgcagactgcctgattacacgcctccgttgcaattcttttgggttgtaggtcaaattttatgtatatgcagtttgtagtaccttatatttaactcgagaaccattcagatccatcatgacattttcaaaatcaattatgctggaacaatcctccattacatcagtgttggattctgatcgaaccatctcttcatcaaccatcatgtctgagtcatcataggacaaatcttcatcatcctcatcgatgggagactcacaattgtcattttttgataactcagtatcaagatgagaattctgtggctgaggcatctcatcttgtatttgggcaaaatcagataggacagaatacaggctcttatctagtaaacgtttggcactgtcatagcacacccacctgcacaaaggacatgaatatcagagatgtatggatagtttagcagccaaagaaagacaaaatagtcatccttccaaaactttatcataaacgctttgtttcaataagcaaaacaaactatcgcctagaatttgaaagcctgcggtttgaatatttgggttggaaacataaaattagctatgttcgtgataatctttttgagcaggagaaattactgtattttttcatagcatgtagttgaattgtaaaccgtgatttacagaaaactcgtgcaaattaattatacccttaagactgcctgttaggatgagatggactctttttgggaacctcagttcagacttgaacaaaatccttcgaatttgaatcagaatcctcaaagatgcagttaggagatacatcctagctactccttccgtcctaaaatataacaacttctagccttcaaaactagtcccaaaatataataacttctccacctacattctcttctcaatcaataacaaccttccaccattcaaattcactacccacctcctcaaacattacaacctccccctatttaattccaccaattttcttaacacctgtgtccaatcctaaaactccttatattttgggtcagaggtagtattatttttcaactaagactaatacacagaacacaaccgtgttgcttctctatagagcctgtgctgttgcatttgcatcataaaataatacatggatgtgtcaaaaattaagagaagcgtcttactcgaaacggactggacagagaagttctgatggtcgatacgcagctttgtatctcatcttattgcaggaatgtatgtaataaccaagataataatattgaaggttggggcagtgctcctgtgttgtcttgacccaatctatctccttcagagctgtatactttccaagagataggaaagcaaagtcaggatcccagaacaaatacttgcttgacaggcacttaggaaggatatcaactacaccaactgccacaagttttccat

SEQ ID NO: 20613 - DNA, 21984 bp, Oryza sativa
tgccatgatggattggtatttggtgttgccagacagagaggaatgaggaaaccagagactcaagatctatccgttttccccctgttcgatgcatgtacccatccactgaaaaagcttcatttgcgaggaaaatgatgtcatgttgaacttcactgatatcagagtgacaagagatgtcatgttgaacttcactgatatcagagtaccttgtcacgagggcatatcagagagaatatcagacaaaactgctgcttataagcaccaattattcacagattggaatactagatgtgatacatcactgtcaatccgtacgcagaattgatactacaaaaagcatcctactcagactatactatgatttctaagaatgcatagctataacgtccacttattcgagcagtaatcgccagcaaaatggaacagcatcccttgatctccaaaaggcatccctcttctattgctagaccttggaacttcagaggggaaataagcgtcgcctactctgaaatctgacactgggttgctacatccaccaaaagttggtgtcgacagcaacatagaattaccagcactgaaacaaggatccggtgagaactcggagccatatcctgaaagagacagatttgccctgaaatgatttgagaggttttcccgacttgttgctgtcaaactgaaccttgaatgatagccatcagctgaacacaactcattttgagcaaaagagtctgttggcaaccggaacaaaccagcaaggcccaccggcactttcacgtcatcccgtggtatgatcctgctgcgatactctgctggttctggtagcgccaatatttcctggctaggaaacgttgacatgcaaagtgaaagctctgtgtctctgactggcgaatcatccgttgcgtagtgatactctggtgctggaagtgctaacatttccaggctaggtggacttggtttgctcagcttttctctaagggacatcttggcacgttgaagggcctccaaaacacctcccacaccatcacttgaaggttgatgcatctgtgtgtcaatctggttatcagtgtggttgtgaaagcatgatgagctccattcagagactttgctttaggggtgtcacttgatcggctagcaactgatggtgtgttgatgtagtgctcataagagcaagcatttacatggtagcctggaccaccgtctgagctttcatctactccatcttcattatgtcttgcattttggacactttcgtagtttctttgtagtgaagaggacaacttctctatattattcccacttccttcaataatttcagtgaaacttttgtctaccaactcatccttcctaatctgtgggccactatcaacagaaacaactgttgaagtagcttccccaaaatcatgatcacactcagtaactttgcaatgcttaatagcattttcttctggtgcattttggggcactccggaaacagaatcagttgacaaacattcagagggactgtcattggcaaagagatttttgtcacttggccctcccacttcagaaacttctttatccttgatctgagcagctttgtccctctgctcacaagccttttcaatttgatttagcttattgcatagctcaacatcaccctggaaatcagaacacaaatgcacaagtgaaaataacaataattttagatattttaatttttatcaagtcaactgcaagttcaacagctttgagaaaaacaaagttaaggaaaattgcttggtttactatattgacagcaagtataccatcagataaaaacattgacagcaagtatctctaacaaaagaaattatatggttatcggcatattggcatccatctaagaagctaaaataaccactgaaccaccaaatacatgctattttgttaaacagatcttatgcctatatgaaacagcattttgtgattaagaaggacagcgcataccgcagttgaatcacgggaattgttgaatttcctttcccactccctctgagcatattcttcttcctcgtattgctcaattaactctgcctgcttttcaagaactctctccatctccccatccttctcatactcaacagtatatggattgtcatcatctccatctcttccattgccacaggaaccctgcccatcttggctcacctcaccatcaatatcaggctgctcatcagtacagacagtacaatctgatctctcgtgcccctcctcagtactttccatggcattgtccttcccctcgtctccttcagtgtgaagcctgaaaatgcagtacagctacatttatgtcagcttagcaatgcgcagacagggatgaacaattatcgcaaatttgggtaatttcccggtgtatggacctcagctccttcctcttgaccttccggcacgattgccctgggtggtacttgggcgacgaatccgcggccaccaagtaaaagtagcctctcctatggctatgcctcggcctaagatgcctgcctttcagttgctgctgctgctgctgccgccgcctctgcgactcgtggctcgcggcgcggcccttccacgacagccccccggccgccgccgcagtagcagtgcctccaaactctgaccccgacagcgcatcctccgcgtccccacgagccttgctgccgctctcggcggactcgaggccgtcctcatcgtcggaacctgaaccggaatccgccacatcggagaagcgggcgaggccctgggactcgaggatggcgagcacctcccccgcggcacgctccgccttccggcgctgcgccgtcaccgcccgcacctgctcctccagctccgccacctgcagcagcagcagcgacaccgtgagccggagagaaaatgcggtcgatagggagagtgactgcagctcacgcacccgcttggtgagctggtcggcgcgctccttggcggcgcgggagacggagcgctcggagaggaggcgcgcgcggaggaagtcgattgtcatcgccgtcgtcgcgtccgccgccgccgccatctcgaacccctcctctccgctgccttctcgtcgcagctcagggtgccgctcgtgccgccccgccggcgccgggaagcccctacaccgctcgacgccggaccgcgccaccccgacctcaccgcggcggtcggaggacgaggaggagaggcatggcggccggaggaggggagaggagcggcggaggtcccgggaggccacgccggcgcccccccggggaaggggggggggggagggccgcgtcacgccagatccgccctgtcgggctcccgctagccgccggtcggaggaggaggatgggtggagccccgctcgtcgccggcgccgcgcggctaccgctccgctcggtgccggcgcacacctcgcttcctccaccggggagagaaaaaggaacgatgcgactatgcgaggcgagagatggagttgaagagaaaattgatatttagccattttcaaaaaacggtttcgctgaagtgccatgctgaaaacgtttttcgttaaaatgtcaatataaagcgcgcactcaccgtcactttaccattttagctattttgtgcattttcgatgaaatgcggcttaatgagaccaaattgcccttgctcaccagctgaaagaggatcgatccagttcatgggagaaagaggacgagcgcggcgaggtggtccgcgtggccgaaatagaggaggtggcaagcgaaagcaaagcagcggtggcgacgacggcaacgccgcagcgaagggagacgcacggcctccatgccaacgacaacgatgccttgtcctccggcgtctccaccgctcgatgccggactcgtgcagccgcgatctgttggcggggacctccacaccccacttcctcgtcgacacgacgagcatctgcgtgatcctcgttagcgggttatcaccggggcgctagtgcctgcacagcagcgtgccgacgaagaagctgacgacggcgacggccatgatgtcgccgaacccccgacaaagaagctgacgatggctaccgtcggcggctgcccctcgacgccctcctgtgctagcgccgctccatggtccccggtctccatcgccaccgaggggagggccgccgccgccatcctcctccactcccttagtcccttctccgccacccggatgccacgccgccttcgttcgccatgccggacgccgtttctccggagaccggggggacaagcgcccgccctggagggcctcgccgccagagccgggtgcttgtggccatcgccgaccggcgtgccggccatcatccgcgagccaggacggctcgggctctgccccgcttaatccacgtcgcctaggtcaccgtgatgccaaggtgttgtgtcccctgctcgccacgctcacgacacacctgaaggacaatttcgtctcatcatccggtggaggagcgaaaatgattttgaaaatgcataaaatagccaaaatagcaaagtggcgatgagtgcgtgtttcatattggtattttagcgaaacacattttcagaatggcattccagcgaaaaccgctttttgaaaatggctaaatgtccattttctcggagttgaaaaagtaaaagtaaaggagagagagatggtgggacccaccgctacatgtagcttgtactgtggtgctgtaagagcaagtttaatagtatagtccactactagctctaattcatctatagccaatctaatagccaatttataaatagttgcctattatactattaatatatggtcccatctgttatctgtggaggatgtggtttgtatcgttattgatctatgtggcacggaaagaatggtaaaatttggtgacgtagtgtgaatggccttacaatgcccgcctctccggtccgcggcgacaacgcgatgcggtgtgtgtgattctgtgccagaccggccggtgtgcctccttttttgtcgcgcagtgtcactcacaggccaccgtcctgccgtgccgtgacgggcgtgtgcgcggtgtcgttggttgtgtgcgcccccacgcgatcacgtgacgctggtgtgcttttctcccccgtacgtcgctttacccctcggcccgccccgccccgcgcgactccttctccgtgacgactcggcaaaatcgcgcgccgtggtggcgaccgtaaccgacgaaggctcaccgatgcctccaccggcagtgtgccgccgatctgaccacatgagcgcgtgccttgcaacttgcaagccccgcaacgtgcagtacgggtgcgctggtacacaggctccacccgtgtagacgcacttcggctacgggcaagtggtactaaactctacccaactctgttgtgtgtgtttgtgactttgttctcactgggacgagacgggacgtgtgttcggtggatccgaggaggggagaatagctacgacttcacacgttccacaggggggctttgattggttcggatagtcaaggtcaactcgcctgccgcgcacaaaacgaaagctaaactccattgcggccgtagtagactcgttaaacatcttttgacgtcgtacagggcatcatttatttgctgctctctccgccccaaaatataaaaagtttttaaattagacacggttattaaaaatagttgatagaattaaatgggggatgtcataattggttgagaagtgaatgtagatggaaaaagtgaatggtgaaaggtttgattggttggtaagagaatgttggtgataaattttaaatgctagaaggttatattttaagacggaagataggattattacgttatttgcaagttacgttcaaccgtctgcacatctcacgtcaggtacccaagaccccaagactattgcagtccgcagttgacaccttaactattacagtccgatttctccgtagttgtcaattgaaaccttgttctcaaccttgactattgcagtccgatttctccgtagttgccaattgaaaccaaccctcttctcaaccttgactattgtagtctgatttctccgtagttgctaattgaaacctacttctcaagaggcatttaactacttgtctagattttgggacggacggcgtacaagactactccagtaaacatcctcaagcagggagatatttaactatttgttactcttatacccccgtcccaaaaaaaaaagcccaatactagctactaatctggacatatagtttgtctttgctttgtctttttttgagacggagtagtaagtgccaattaaggatttgtcactagactcgtatgtcatagacacatgagggccacatgtcatagacctaagtcttaaacctaagtctagacaagtagaacctaaaatcggatgagacatttcttaatatttagacaagtagtctattcagattgtagtactataaaatattccattggaaggagagagtacatagaacggcgagcaatgacctttggtattaagagcaagtttaatagcatacccaactactggctctaaatcatctatagctaatctaatagcccattcatgcaatagttaactataaaaatatactacaccatcaatacccggtcccacctctcatacacacataacgtcttggagtcagtgttacagctggctacaaatctgtagtccgctttcttctctctcttcttttttcttctcaatatgtggttatagctggcttatagcctgctattatacctgctctaaacccaattgttatccaggcagccggtggacgggtggagaggatgtgatactgtcaagtcacaaacaataagaaccaagagtccaagaagcgtgatacagtatattgcagaaaacctgataactcaacatcatcctaatacctctgtagcaaggaagtgttcatacagtagtattgtagtaagtaggtctagcggggtacagtaatccatcaaacttccagctagtttctactgaaccatttgcgaacacaacatgttgagaaatcgtcattactcaccagacacatgccatagcccaagagtttacagtacaccacacgaatcgcctgattatatggtcatatggtgcttgtcttaacagagatcaaacacaaggaaacatctcgagcgattactctcagattatttgtagccacaggacagcgacttcaatcaccactggcacaccctctgcacccacaatggacacactctataaccttttcttccctgaggtgcttggggaccctacagacacaagtggttgcaaagttgtggtctcgtgtctgtatgcatcggaggcagcaaagacgctcataacctggctgcaaatgtttcagaaaaaaagatggatagcagtgagcaatcagaatgctgatttgtagattcaaggacttctgatatctacgaaagaacataaaaatgagcatagcccaaagagtacataccactcaattgtctcaactttagctttatactaccctaaaaaaaacttaagctacataccacccaaatagttgagcacactaaaatcccgttaatgaagtagtcatgtcattgttaagaacttcagataaagagggattgcacaaatgagaactcaagcctagcagtctctcagagcagctgggttattgcccatcaggatattcataaaaccacaactgttacaagattctagagagaataggtatgcacctgtatttctctgaaaatttgtttttggcccaaacttatttcttcatgctaatcatgtccaaatcagtgacttatatctgtgatccattcagtatgcagacagtgttacgagattatttctttagtagatgtgggcgttctcagtaaagcattatagatgtgctcttggttggttaattgaaatctataggctcattgtgaagcctactagttcctgagtaaacttttgtagaggaaagactaaaaagacgtagcatatccagatgttctaaaaaattttatggctgttttggtgaatcatattttgttctgtttgtacaaggaattggaacatcacattggctgcagtgtgcacaatcaaatagtgtctcagctgttcgaatttgtgttgaatagatttaagagaagattgtgtacgtgagaatcaaaatttcaagattgtagcattttaattttagcaatggtttgaatcttttggctgtatatagtgaagccagattcttttcatgatagcaaaagtttgggttttcagggctatatacccaattttctcttaaagagtgcactttgccgttataaaattcacacgaaatattttacatcttaagacaaattctacaattacataggtttcagtgatcacattgttttctacagtctcatttttcaaatagaaagccaaaccttttttttgtcaacattaccgtgacacagacatagtgttaaacataggtacatctggaatggcattagcatcactcttgctatttttttcatgaggatgacataagttcagatattataatatacaagaattggaacataaactgcatactccaaagtttaaagaccacgtatgcttacctttttccacttcgcgatcagatttttatcagcatgaccttggtccaaacaaaattcatacagctcttttgatatctcctttcttcgatagtaaagatcatatatgtaacggcttttttgatgagaaatacgaaagattggccagagagcttcgcacttcctcttcccatcatgtggatcattctcggctgcatccgaaaatcacattaccttttagcaatcagaaaatcacatcattaccaccctgtggtaggaaataataaataacaatatatatactgggaaaagaaatcgacgaactgttacatattacagatatgtgcataccttccctcatcttggcttccaaatcacgcagagttggttctataagctcccatccttcaggatacttgacacggcttgtctttatcttaggcatgtcgtctcaacgaacaaacctaattacctaaatacctaacagaagtcagaagaccacgaacatgtgaaatacctaaggaaaaagagaaaaacctagcttccagatctcgaatataagataaggttaatgcaaattcgaaagaaagaggatgtgcatgcgtaggaactggtcctcaccggaggcggaagcagcaggaggacggcacccaccgctgctcccctccgcaggatggactgaaatcgacgcaggcggcgcggcgggcgaactagcgaggagacgggagttgaggccgagaagacagacggggagattgacttggcgcaaagagtcagaggggagagtatgcgtagcaggacgccggcaccagggccggccctggccctatgtagccgaccgccgggggcctatgatggtggaggggccaacacctaatactagtagtctagtacctcatccgatgttgagatcaatgatttttattcagaattaaaggtgtgattcttggatgttcgcgcctgagattctgaagttcattatggatgcagattgctatccaaatgttttagttgcctatcgaaatctattaactgtacctatgacggtagcttcaactgaaagaagtttctcaaacttgaagttttgaagaactatttgagatcaactatgtcacaagaaaggttaaatggcttggctatgtgcacaattgagaaggatatcttgaacactattgattttaataccgttattgataattttgcatcaagaaatgtccgaagaagtatcttttcatgggagcaacggatatgatggggttttgttcttcattaagttaatgaataatgatattagttccaagttataaatatattgttatttttatttcttcataattactagacatgttaaatttaatatatggatgtatttgttatcgttttgcaagtaaaattattatctatatatcataaaattttatatatagtttagagggcccatcgcgatgagttcgcttagggacctcaaaatcataggaccggccttggccggtaccgctgctcgcagtggcaggcgatggagataggcggcgacagcgcagaaaggagacagatggagcctggtggatgctgtttttttttttaaaaaaaatatttttggaccttttctaaaacttatttcacatatacaccctccgaaaaactaatcccaaaaataaatccctgtctcgacgccaatgtttatcataaagattacacgttacgtcaccatcacctctggcaccgagaatttagcaactacgtgttgatgaaaaatccacgctcggccgatggcaccgaatgtgtgttgacatgaactaagtcgatgaacgcaatggcataggagccgcaacaccgcttgttccaaaatttgcttgtattgtgtcacaactcgcaagcacaaaatttcaggtacatcgtactggggtctgggagcaggaagctggaagcctctcgttgcatagctccaaactagatggtaggtggagagcaccaacggtatatatgcaccaagttacaaaagccaaacggcatgcgttgggcgtgctaacaccacgccttgccaccagacgccgccacctctctcaccatgccagcggcacacggcacgccccggccgtgggcggagctacagtgatgcctgtgtattcccaggaatacctaatattttttaccaaaaaacaactatatctcagtatatacacatgtatggctctgttcgttctggggagataggggagattgattctcgttttcctcgcgcacgcatttcaaactattagacggtacgttttttgcaaaaaaatttatataggaaagttgttttaaaaaattatattaatctatttttaaaatttaaaatagttaatactcaattaatcatgagctaatgacttaactcgttttgcgtatctcctcaatctcttcgatcccttctgctcaaacacaaccagttgtccccactcttcctgagtccctggctcggctcgcgctcacgcctcacgcagtcacgcgctgctcgcccgctccccaattccccatttccaaaccctaggtggtggcgttcggcggcggcgaggtgaccggcgggagcggcagccggcgtccggcgggcggcgacaggattggcgacgggagctagaccggcggcgcagtgaggcgttcggcggcggcgcggcgaggccacgaggcggcaaccgacggccgaccagcgacggcgggagcgaggccgcgaggggcaaggcgccgcggccagcggctgcggctcaacaggacagcgcccggcggcaagcacaacttcaggtgagcaatcaagagttcaagattcaatcagcctaaattcactcatcatgtgtccatgtctttttaccttagtctctgagtagttttttttttctgtacttctgtagttctatagattgaagagctctcaaaatgaagaagaaatcgattgatttgaagacttcgtgggatagacattcaaagtttaggaaggtagggtcaggttctggttctggatcaacagcacagcccgttagaattgacagcgaagttgttgttccttctgttcagccgattacatatgcaaatgtgagtccagttcagattcagattactgcagttgaggttgtgcctgaggtagaaaattagaggtaacatgtaataatttgtagttttatttctcagattatcagtattgacaaattttgaatcattgattttttttactatgaatttttttttgttagacgggaatacccaactttgaaatcctgactctgctgaggctcgtctcacgcagggagatttccgctttcctccgcgatttcctccacattcaccaccggtgttcgctcggctccgcgcctggcacacgacggccacgaaacctgtcaacctcaccgccgctgccatatgccacgccatgccactattcctggcacgacaaccggatggacgaacacactgacacgccagggacagaactgcagagcggtgctattggctgctgcggccatcaatagacagagtcacatagctgaaaaaagacgatatcgttctactccgagtaggtgagaaaaagtgttggaaaaaaaaaagaaaaaatcgcaacgagaaatgaagggaatgtttaaaaaatgggtttgggatatgatttcccaccccctaaagggtaagttttaatcctagccatccattcatatcactccattttatcctattcctccattcatttccatttcccaatcccacctctcctaacccattttccaaacacacccgaagagataatgcaaggcacacattccgagtcatggtggatcccggaggacgctagggaaggggagagatggtggtcgcctttggcatgacccgctttgggaggtgaagctggtggtcgactctgtgcctgtcggtggcatgggaccgggagtatcatgactagaggcttgaggcagacacaatcgcccacgtggcctggcaccctcgggggacgtcgggcccgagggtgatgtgtgcgcccacctcttggtctccccgaggggggggggtcggaccgcttctgcctcgcccccgagggccgaggcgccccgacccctcgcgggttctactccgcgtgaatgggttaggtgagcacagcggggctcacctaaccgcatttattgcggctcggctaaacgtgtcacgccgcacgaaatacagtgcactccactcgtttatccggtctgtgaccagtcacagaccggtcagatcgcgggttaggtggcgacaggcggtctgacgcacgcttcgccccatcccgtcaagacgagagcttctaggcactcgtccccggctggagctagcgtattacatcccagagatggcacgttagccccggtcgatatatgccaggcttcatcctaaccattacaagcaagatgttgtgtgaagaagggcaaacatgcacgttgctaggctgacgcgtggtgggcaagaatgatcgatttgtgaccggtctgacactggtcatgtcgtcggcagacagccactttcccacgacgcgcctgcccccggcagaagtggaggtaggtatgggccgtcccgtcagaaggatgttcggagggcaaccgtgcaaatctccgtccatttatgaaaagaagaaaagtccagtttggaaagagaggggtgcatgtggtatccccttgaaatataaaaggaggacctggcccattaaaaagggggttggattctttccagattgggtagctagaacaaaggggaggttggctcacactttgtagctccttgatacacagatccaccaaaacacaggagtagggtattacgcttctcagcggcccgaacctgtatacatcgcttgcgtttcgtgctctttcgataggtcgcgatctttccacatacagtgagagcttgggatctcaccctgagcccccggccgaaccggcaaaggggggcctgtgcggtctcccggtgaggagccccgcgctccgtcatctggcgcgccaggtaggggcctctgcgagtgattttcggagctcttgcgctctttcgtgagcaccaagcttttcctgttcagcctcatggctgagcaagcgaaggcgcccaacctctctccgagtgtgagtggcgacgacggggagccgaacccacgccgtcgagctcgtactccgccgccccctccacgccaaagtcctgggcgggagaaggcacccaagagggctgaagggtccgcgacttcgacatccacaggagctgggaaagggcggcgagatggggagcgtcgcctcctcgtctatggtgacggcagcacgccccagggcgcgctccaagctgcgggcgcgctcttacgccacccgcctatcatccctgacccggagtctccagcccaacgatggctggacgacgtggccaaattggtcatgacggcgcggcagcgcctagatgctggtgggcggtcctctgccaccaaggcctctggtgctgctaccaccggctctgcgtcgtcaagacggagggcacgacgagcggcagccgctgttcgccattcggctgccactccttcctcgactccttcgacccaggaggatctgcgtggggagcaggacgcccgcaccagcatcgagcgccggcgtaatgaccgacgtgctgcccacgcaacggagggcgcttcctcgtccagagtgtcacctcgacacggacgtgggaatcagccctccgtgcccccggttggtggtgtcggctgtagagcctttgtggcgagtcttcggaatgtccgttggcccccaaggttccggcccaccatcgccgaaaaatatgatggcagcgtcaaccccgccgagtttctccaggtctacacgaccgggattgaggccgccgggggtgacgacagggtcatggcgaatttctttcccatggccctgaaggggcaggcgcggggttggctaatgaacttgccacctgcatctgtccactcttgggaggatttgtgccaatagttcaccatgaacttccaaggcacatatccgcgccccggtgaggaagcggacttgcacgctgtacagcgaagggacgacgagtcacttcgatcgtacattcagcggttctgtcaagtccgcaataccataccatgcatccctgcacacgcggtaatctacgcgttcagggggggcgtgcggcacaaccgcatgctcgaaaagatcgcctccaaagagccccagactaccgcagagctttttcagctcgcggaccgagtggctcgcaaggaggaggcctggacttggaacccctccagttccggtgtggcagcttcggccgcccccggatccgccgctcagacagggcggcgtgacaggaggaggaagaagaggtcagtccgttccgacgacgagggtcatgtcctcgccgtcgagggcgcttcgcgggccacccgaaaggggaggcctgcgagcgacaagaagaaggaggccagcgctcccagcagggagcgccccaccggcaagtggtgcaccgtccacaacacttcccttcacgacctcgcggactgccgtgcagtcaaaagtttggctgagcggacgaggaagtgggaggaagagaggaggcaggagcgccgagagggcaagtccccggcggttccttccggccatcggcgaagtgaggccaagcagaaggcccccgccgaggacatcgatgatggcgatgatgacctaggtttccaagagcctggggccaccattgccactgtcgatggaggagcgtgtgctcacgtttctcgccagagcctcaaggccatgaagcgagagcttctggccgcggcccctactcatgaggcgacgcgccgggcgcggtggtcggaggttgccctcactttcgaccagaccgaccacccaccgtgcgttgcccggggagggcagattgcgatggtggtttctcccaccatttgcaacgtgaagttggggcgtgtcctcattgatggaggagcagccctcaacatcctttcccccgcagcctttgatgccatcaaggccccggggatggtgctccggccgtcccagccgattatcggtgtgacgccggggcacacttggccgctaggtcatatcgacctcccggtcaccttcggtggacccgcaaatttccgcacggagcgggtgaacttcgatgtggcggacctcagtctgccctacaacgcggtcctggggaggcccgcgttggtgaagttcatggcagcggtccactacgcctacctccagatgaagatgccgggccccgatggccccatctctgtccatggcgacctcaaagtcgcgctcgcttgcatggagcagcgcgcggaccgcctcgccgtcgtgtccaagcccgagggtggcgacgagaggcttggcacatccgcccccgccgccccgaggcagcggatagtcacgggcgatgaggtcccggtcaaggaggttgtcctgggcgacggcccgtccaagaccacacggatcggtggtctcttggacggcaaataggaagacgcgctcgtctccttcctgcgggcaaacgctgacgtattcgcatggagaccggcggatatgcccggggtccccagggaggtgattgagcaccgtctcgccgtacggccgggcgcaaggccggtccggcagaaagtacggcgccaggccccggaacgtcaagccttcatccgtgaggaggtggcgcgacttctggaggccggattcatccgcgaggtcatccatccggagtggctggcaaacccggtggtcgttcccaaggcgaacggcaagcttcggatgtgcatcgactacaccgaccttaacaaggcatgtcctaaggatccttaccccctgcctcgcatagatcagattgtcgactccaccgcggggtgcgaccttttgtgttttctagatgcatactctggttaccatcagattcgcatggctagggaggatgaagaaaaaactgcgttcattacccctgtaggaacctattgttatacttcaatgccctttgggttaaagaatgcaggtcctacttttcaacgtactactcgaatttctttgggtagccagataggacgtaatgttgaggcttatgtcgatgacttggttgtaaaaacgcgcaaccaagagactttactctcagatctagcggaaacttttgagagtctccgctccgcccgcataaaactaaaccccgataagtgcgtgttcggtgtacctgcgggcaagcttctcgggttcttggtctctgcccgaggcatcgaggccaaccccgagaagatacgagctatagagcggatgcgcccccccagtaaacttagggatgtgcaatgtgtcaccggttgcatggccgccttaagtcggttcatatcgaggctgggagagaaggcgctacccttatttaagctcctcaagcgctctgggccgtttgcctggacggaggaagttgaacgtgccctcactcagctgaaggcatacctcagctctcctccggttttagtcgccccggagccaaatgagcccctgctgctctacttagcggcgaccccccaagtagttagtgcagcgttggttgtggagcgcgatgaggacaatcctcatttcgcgcacccccaccctgtgcagacttggcccgggagcgagcagggaggagaggcccccgagccgaacggtggcctaaggcccctgacgaccggagtcggccctctgcccgctcgacagacggtgctgggtgcccccgaccctcaggaaggccccgaggtcactgcgggaaggccgcacctatcgtcctttgaccccgaggctaaccttgtgcgaactcgacccgggagaaagcagggagaagaggcccccgagccgaacggtggcctaaggcccctgacgaccggagtcggcccttcccccgcttgtccgacgacgccaggagcccccgacccccaggacggtcccgaggccactgtgggaaggccgcctctgtcatcctccgaccccgaggtcatcggcacagaagacgggtgcgccccgagaggccacttggacgaagagcgccccggggatacggcccctagcgaagaggatcggccccaccgaaaggtgcagcggcctgtctactttgttagtgaggccctccgggacgccaagacccgataccctcaggcccagaaaatgctttacgctgttctgatggcctcgaggaaactgcgccattattttcaagcgcatcgggttacggtggttacgtcataccccctcggccaaatcttgcataatcgagagggtacaggacgggtggtaaaatgggcgatcgaactttctgagttcgatttgcactttgaaccacgccacgctatcaagagccaggcccttgccgattttgtggcagagtggaccccggctccagagcctgtctcaatccctgaggtcaactcggacccctcgcagccgccacacaccggccactgggtgatgcagtttgacggctccctgtctcttcagggcgccggtgcgggggtcacgttgacctccccgaccggagacgtcttgagatacctggatcgcctcgactttcgagcgaccaataatatggcagagtacgagggactccttgccggactcagagtggcagccggactggggatccgccgcctcctggtgttaggcgactcccagctagtcgttaaccaagtctgtaaggagtaccggtgctctgacccgcagatggacgcttacgtacgccaagtgcggcgtatggagcaccattttgacgggatagagcttcggcatgtgcccagacgggataacatgattgccgacgaactctcacggctcgcgtcctcgcgagcccagaccccaccgggcgcctttgaagaaaggcttacccagccgtcggcgcgacccgaccccctaggggagacgggtgtgcctgaccggcccccgaggcccgtcggagtccaggcctcgggacccgaagggagcgctccaagctcccttagattgattgcttggatctccgagatccaagcatacctcacagataagactctacctgaggaccgcgaagggagtgaacgcgtccaacgcatttccaaacgctacgtgctggtagaagggaccctctatcggcgcgcggctaacggaatcctcctaaagtgcattcctcaggaacaaggcgttgagcttcttgccgatatccatgaaggcgagtgcggagcccattccgcctcgcgcaccttggttggcaaggcctttcgtcaaggattctattggccgactgctctcaatgacgcggtcgacctggtccggcgatgcagagcgtgtcagttccacgccaagcaaatccatcagccggcccaggccctgcagatcataccactttcatggccgttcgctgtctgggggctcgatatcctgggaccgtttaggcgggccccgggcgggtttgagtacctgtatgtcgcgatcgacaagttcactaagtggcccgaggcttatccggtcatcaagatcgataagcactccgcacttaaattcattaagggcatcacggcccggtttggagtacctaaccgtattattacggataacggcacccaattcactagtgaactcttcggcgactactgcgaagacatgggcatcaagctctgcttcgcctcacctgcccaccccagaagcaatggtcaagtggagcgcgccaatgcagaaatcctcaaaggccttaaaaccaagaccttcaatattctcaagaagcacggcgattcatggatcgaggagttgccagcggtgctctgggcgaaccgaaccacaccaagccgagcaaccggggaaacgcctttcttcctcgtctacggcgcagaagcggttctcccatccgagctcaccctgaggtctcctcgggccaccatgtactgcgaggctgatcaagatcagcttcgtagagatgacctcgactacttggaagaacgaaggcggcgtgcggccctccgagccgcacgctaccagcagagcctgcggcgctaccatcagcgccacgtccgggcccgatcactctgcgtcgacgacctcgtcctacgccgcgtccaaacgcgtgctggattgagcaagctctcaccaatgtgggagggtccgtatcgagtggtcggtgtcccccggccgggctccatacggctggccacgggcgacggcactgagctgcctaacccgtggaacatcgagcaccttcgtcgcttctacccctgaggggggggtcgggtgtcaggtttcgggctcgggccaaccccgcacccccccctcgggtgtgcagggctggccgggggctaccacacatgcacattctcattttctcttatttcagtatttcaataaaagcagtttcaatttcctaggggctgtatctgtgccgttttttcctttttgaagaattttgacttgaaataaggtcactcgtgctcaaccttgccctcgggggctcggttcggtcagctaaaatcgccaaacggggcctagaaacgagccgtgccctggggcgtggtgaactccgggggggaatcggcaaaaacccacaatcgggtcacccataaccctcggtcatcacgttcccagcctggccagtctcgacatgcggatctccccaggcactagccccgacccgcgcctttcgagaactgggacttgggcacgggccctaaaatcaagctaagacacaaaagagtaccacggcacagatcatcctcatctcattcgcatagcaaaataaaattaacacaaagaattttatggaaattcaggcctgcgccgggggctgactcggaagtcggaggcgcgcttcgtcggcgaggggggtgtagaaccagtcgctcttccagtcatcccacttcttgcggaggacgcaggggatgtagcggttcaacaccggcccccgcggcaggaagtagcagccaccaaccaccgatggcggcgacaccgactgcacggtgaagaaccaccggaacagccgaagagatgggcgcaccccaatgaacatctcgcacagatgtgcgaagatggccaatgtcatcattgcgttgggggtaaggtgcgccatctggagatcgtagaactccaggacatccatgaagaaagaagaaaatggcggaaccagccctgccattgcaaaggggagaaagaagacggaccgccccgggtagtctggcgccgggcgtccctcgcccagcatgactatctcacggccggtggcagattccggcatgaagcggcgcggcaacccagcctgcttctcgctcgtgatgcgggaaggcggcagcacgctaccatcaagcagtgcggagccccgtgccatggcgccggacgaagagaagatggagagcgagcgcgtgtggcgaaagaagggcgcagggaagaaggagttagggcgcaagcggcgaaggcaaggggaatgatggcgaaaggaaggaaacaaatcccatcctcagtgcctttatacccttgccaacgctgtgcccggttcctcgtttctcgcgcccattatttcgccccctcgtttctcgcgcccacgtttccactaaccccattcgctcgcttgcggcgcgtgaggtggatatgcggttgtggcagtcgagatagatcgtatcgtgcgcgcgttaattacgctcgccgaccgaagcgacgttaccatatctccaggcgaagcaaatcggctcgcccagatttgtgcgctgctcaggtgatgtggcagtcttgaagagaccgcccattattgacagccaagttaccattaccgatgcgcatggtttgagaccgttgggtttctgcccaaccatagagaccggtcccacctgtcaccaggctttaggagtggcgtcacgcccgaccgcttcccttgagaagggcgatcgccctggcataacgccgggggctactgtcggtggcatgggaccgggagtatcatgactagaggcttgaggcagacacaatcgcccacgtggcctggcaccctcgggggacgtcgggcccgagggtgatgtgtgcgcccacctcttggtctccccgagggggggggggggtcggaccgcttctacctcgcccccgagggccgaggcgccccgacccctcgcgggttctactccgcgtgaatgggttaggtgagcacagcggggctcacctaaccgcatttattgcggctcggctaaacgtgtcacgccgcacgaaatacagtgcactccactcgtttatccggtctgtgaccagtcacagaccggtcagatcgcgggttaggtggcgacaggcggtctgacgcacgcttcgccccatcccgtcaagacgagagcttctaggcactcgtccccggctggagctagcgtgttacatcccagagatggcacgttagccccggtcgatatatgccaggcttcatcctaaccattacaagcaagatgttgtgtgaagaagggcaaacatgcacgttgctaggctgacgcgtggtgggcaagaatgatcga

SEQ ID NO: 20614 - DNA, 10122 bp, Oryza sativa
aggttggctcacactttgtagctccttgatacacagatccaccaaaacacaggagtagggtattacgcttctcagcggcccgaacctgtatacatcgcttgcgtttcgtgctctttcgataggtcgcgatctttccacatacagtgagagcttgggatctcaccctgagcccccggccgaaccggcaaaggggggcctgtgcggtctcccggtgaggagccccgcgctccgtcagtgccagtggtcgatgcggacaagcaggtgaaactgctgacgcctccgacgacgagatggacgacgacgcgtacctgttgacgagaaaatcgaacacaccggcttgggagatctgcttagctcatgtgcaggtccaaatcttgattagatgcgagcgtgccagtcagtttgatcctgcaactgacaagatatgcaaatagtagatatgcaaatagtagatcaaaacagccgatcggctgacaagccgatggagtagttccagccgatagccgataatagccgatgccgataccagccgatagcgatagggtttaagcaatcggctatatgtccaacgtagataatgatatgaaggcaatcggctgatgaggatgtaataaaataacaataatataatccgatagaaaccaatcggctagaaacaatatataataagcactgatctgaaggttaaagcatacatcggctggaggtccgatgtcattaaatccacaagattagattaaacagtgaaatctatgttgcgatcggctaaatccaacttatatgtatatgcaatccttatgagccgatgtaacgtccaacttatatgtatatgcaatccttatgagccgatgcaacgtccaacttatatgtatatgcagataactcatcggctgaaaccccgataaaacccttattggcaatcaaaaagcaagctagagattatggttctaagcacgacttagtatatcaaacttaactgatgcagcactaagtatgaaaagaaacacaatatctagacaatcaagccgttgactgattttcagggtggtagatgtctaggctaatctactctagcaaggcgatttagccgataccggcagaaaccctaaagcgagagacagccgatagagctaaattgagatgctaggactagattaacatagacatatgataaatagccaggcaaatatattatccaaaccagagtaacccaagaggtcgaatgtactgatgcagccttgaacgacgccgacgtagacgatacaattgcctggaccgacggaacatgggacttatcccttcgccggagatcgaacaccgatgcagccccacgtcaagtgccaagtcccgccggacgataaaataaagtagaaaaggtaaaaggtggcgatgcgccgaattgtattgatcgtggagatagattacatagaccccgggtgtacatatttatacccatgggttgatacaagtccttgtcggacaagaaagaaactaacctaaagataaaaggaaaacataaattccttatcggacactaaacacaccttcctaaagataaaaggaaactaacaaactattcctaattaatagataaactgccatgccgcatcctctttaaactcggtcacttagggataagcttcctttagtagattgatttccttaagcgaatatagcaggaatccgactattggcgacttgataactcccatcggctgattccgagatgctgcagccgataatgattctaagctgatgacgtctttgccgattaccaaatttcactgttaacagtaccccgagtgctacgggcgggccaccgccaccaactcactgctctcggctggcggcgggattgacattgatgagatatcatcaccaccactgtgcatcggcagtaataaggccgtgtttaaggccaatttggattgctaccctaccaaaatttgccctaccaaaattttggttgggttaaaaccaaacacctctactaaaactctatctatgtcataaatttggctttgcctataaacttatctcttataggtaaattttggcttcaatccaaataaacattttcaactctaccctaccaaaattttggtagtaccaaaacttgcccaagatttgacactaccaaaccaaacatgcccttagttcaccccaactaccccaaacttccaactttccatcacatccaaaactttcctacacacataaacttctgacttttttttcaaactttcaacttttctcaaactttcagcttttttttgaactaaatacggcgtaagctgggtgattcatcaaattttcacctctggccggagggaggagtaggagtacgcaattaatgcaatgtggggtgatcaagaagtaaacagtttaagcaaaggcaaaatggctaagagcaagtaattctcctacatgctttttttactatcttccactatcactgtatcacaggaagaaccgggttacatttactagcgacattacattgcgtgatcaatcggagcaacaatggaacacaacacctccgatccaagaatagcagagagatgccgctacaagcctgtaactgccgcttcagtgaacttcatatgttctagtcggaactcagtcctgtacattatactgcaattatatactagcagtatatagaagggtatatttggtatctgtgaacaactggaaaaggctatttaatcatttgaagttcagattaatttatttcaatcgggagtactccctcggtcaaaaaaaaaaaaaaagacaaactctgatttccgtgtccaacttttgaccgtccgtcttattttaaaaaatatatgaaaaaaattaaaaagataagtcacgcataaagtattaatcatgttttatcatctaacaacaatgaaaataataattataaaaaaatttatataagacggatagtcaaacgttggcacaggaacccatagtttgattttttttttgacggaaggagtacttgtcatggatcttgtcgtccgtgcatttggtagcgtttgttccgaagacatctcgtgtggcggtggcttgaacatgatcctcatatgcacagaaatgatggtgctttctggtcataatgcaaggttaattcagtcgtgaaaaataacgaacggttgaacacttgaatgtgagaatatcatctcatcataattactgagatagtcaatttttttttgctagatactccctccgtccttaaaaaaaacaaactctgggttttcatgtccaactttgactgtccgtcttatatgaaaattttttataattcatattttcattgttgttagatgataaaacataattaatattttatgcgtgacttgtctttttaattttttttataattttttcaaataagacggacgatcgaacgttggacacggaaatcaaggtttgtcttttttttttctgacggaggaagtatatccagttagttctcggtatcactacgttaattacttcaaaatttctcattcaattagtttatgacgggatgatttgccagttctattcctgcatggagaggcggcgagtagggcttgcctcctcctactgcctgccccatccctggcggtgcgccttgccccaggtctgctgccgctgcccggatgccctatactgctgctgctgcttcttaggtgcgcgggaatgacagaagaggagaaaaggaggacagtaaggcggtgtttgggtctatggacttaactttagtctctttatttagacactaatttagagtattaaatatagactacttacaaaactaattacataaatgaaagctaatttgcgaaacaaattttttaagcctaattaatccataattagagaatgtttactgtagcatcacatatactaattatgaattaattagactcaatagattcatctcgcgaattagtccaagattatagatgagttttattaatagtctacgtttaatatttataattagtatccaaacattcaatgtgataaggacttcaaagttttagtcccatctaaacagggcctaaatcgaatcaatcctggtttgcggcggcccggggcgcggcgtgctcacggtggctggcagcagcggcggtagcccatgtgatgaaggaaggggaatggagcggatttctcttgattcgccgtttctttcgaacgacaaaccgactggatttctctcgatcggggtctgaccgaataacagaatgcgaaaatataaaaataccccacgcagaaagatgaaaagacaaatatgccctttttaatttatactgcaaagctaactgggtggaatatcagatgaatcttcaccgttagatcgtttatactgctagtatatacttgcagtatagtgtaccgtaaaagtcctcttgaaagaaacggtgtaagattgcacgaaaagcttattttcatcaaatcaattccaacaaaattatagaaacttaacatatatataacgagctaatttacatccttgcctccttggacctcgccgactaccaccaccgcaccaaccctgcccctgcccggctgccccggcagcgcagctgataggcattgatgagatatcatcgccattgccgtcttcaagcagccccgacgacaccaccctgaccctcatccagcagcagcagcaggatggcaagccccagtcccaagcagcggcagcagggcttatcatcggcagagggcagatgcgggcgtcgacgatgctgatgaacctcatctcgtggggcgtctcccattcctccatccaggagctgcaggatgggcaaggccagccacaacgcaaccgtctaccggcctagggtgagcagcgcgactacttccgcggaagcctggtggacaagaagagcagcaagagaaccagcgccggaattgacgagcacgcatgccaccgtcgccaccaatgagggtgcgtgggccacggacggagagcttggcggcgacgagggtgccggggccgagcttgtggacagggccggtcctgtgattttgagggccctaagcgaactcatcgcgataggccctctaaactatatataaaattttatgatatatagataataattttacttgcaaaacgataacaaatacattcatatatttaatttaacatgtctggtaattatgaagaaataaaaataacaatatatttataacttggaactaatatcattatttattaacttaatgaagaacaaaaccccatcatatctgttactcccatgaaaagatacttcttcgggcatttcttgatgcaaaatcatcaataacggtattaaaatcaatagtgttcaagatatccttctcaattgagcacatagccaagccatttaacctttcttgtgacatagttgatctcaaatagttcttcaaaacttcaagtttgagaaacttctttcagctgaagctaccgtcataggtacagttaatagatttcgataggcaactaaaacatttggatagcaatctgcatccataacgaacttcagaatttcaggcgcgaacatcgaagaatcacacctttaattctgaataaaaatcattgatctcaacatcggatgaggtactagactactagtattaggtgttggcccctccaccatcatgggcccccggcggtcgcctcggctgcatagggccagggccgttgtggaaacagatggcatggatgacggccttcgtggagaggatggagctgcagaccaaccgattagcaggagcatgtcctcgctgttgatttcattggtgcgacccgagaccaccgcctagccgtgtgagcagttttattggttacctcgttccacacgcggtcggctgacaagtgagccccacaagttgactcaacagtcaacagggtcaaacatgtcatgtaggacaaaactgtccgaaaagttgatttgtaacggttttaagagttgggagacagattatacctggttttgtggctgagggatacaattacattagggatatgagttaagggatacaaaatgaacttatggagtaggtatatggagtcatggaatcatgggccaaccaataaccaaggcctactaaggacactaggacagtacgtagctacctctccactgctctgctcatttgcttggcttttggctggaagtatacgagtgagccacgtgctctgctttccttctactacatcctttctaaaatatataagcatttttagctatgaatctaaacaactgtgtttctagatttatagccaaaaattaatatattttgggacagagagagtagtagagtattttacatagcatgcacgtccagataaagcacggtcggtgtgcggatgacatgctataccgttgcaacggtatttcggtatatagcagtctttttttttaaaaaaatatatttgattggtttggtgtcactaaaattttaaaacttaacggttcaatcgatgtatatatccgatccgctttcatccctagactgcatggcgcggttcgcaggtaacatcttctagttctatcagctagaaaatggcgaaagacgagaacccgtcttacctccatctgatatttctctcttctcgcatccgtgtcttcatccttgatcctccactctctcttcccctttcccatggtcagtgcgagctgcaggtaggcgtcgcctctgcgagaaggcgcaggcggcggtgtgcacggcgtcctccccttcccgattccgcccgtaccctcctcctccgtggcctgtgcggcctggcgccggcgtgcgcacggccggcgaggaggtttggtgggggatcgatcgacgcggccaacctccttccatctgcctccgtctcggttcgaatcgaaaaaaaaattaggggttcagttgaaccccggcaatccacgttaggttcgcgcctggctatatttttcctcttattttctgggttttggggaggtttttctcgttcccttttcattggttgccttgtcgtttgtatttcgatttgtatgcaatttctcttcttcgtttaggttgtggaagaagcagccaggatccctcagggctcaacctgcaggggaatcctgctgagaaccaggagagctggacctccggcgtgtcagttgggaggggcaccccaaatttgggtgttgggacggccgtggcaggccggagctgcccgtcatcaacattgttcccggggtcctccctgtcgtcgacggcgttgctgaataccatgcacgagggctcctttccacagacagccttggtggcgggttccgtgagcagcgccgatgagcagcatggtgcgccccccgtacggccatcctacaaccttcctgcaggatgcacgcaggtgccgataagtattctggtgttccacaggaggctgacggggaggggatccaggtgccggtcgccgcaatctcgtagctttatgcctgctcctgcactgtccggtgtctcagagggtgagcatttcttgatgtttcttcttttaaggttgttatatggtgttatggatgaatttactgtcacgatcgactgactgccgtttccgattcttcagcagatggagcttatgggccgattcctcaaagtgatttcttgtcgcttcgaggtccatctgaagtttttcctggtgatatggcaatgaatcattcagaaccggccacttcatatgggtacaattcagagtatgcacctatgcatcttcagccaaatggcttatacactgaagcttccaacactgaaagtgaaagagaagctagccaactgcaacaatcagcggaagctgttatctgtgacagcctcagtaagttggaatcggctatggagaaaattcagggtcaaaatcctcaagaatcaagtggcttagttgcagagggttccgctgatgataacattcacaagtaccatcagaaagctaaaagggccaggacacaaatcactcacagtgacaaaatagacttaccaacacaagctgtatctgcatgcaaggaaaaaacaataactcagatagagatgcagattgcagatgctgagagaactgaagcactcaagggtgaggatgccccagcacaaaagctgaagactcgaaggagaaagcacaggcccaaggtaatccgtgaggacaggccagccaaaaagcaaatggccacaacatcagaagaaaaacctctcaatcagaaacccaaaagaaaatatgtgcggaagaatagaaaccccagttctttggagaagtgcgcagaaccttttagtgaccattcaatttctagagaatccagaactaccgttagaagcagcattgcatcagttcgaagaaggctgcaatttgagttcggggagcacggggtgcagagggaccaatcatcaatgaccaattcatggtaccaaaaccaggagaaacctgttaatgctgagagttctttgtgctcagtgactaaatcgtccgtgcaggttgaacatggacaggaattacacatggaaaattcaccagaagggttgttttttggcatcaactccaaactgaacaaaattttagatgagtacatacatttgccagaagccgcaccaaaaccttcagagcaaatcccactggctgcttctggtcatgttagcgaggaactagcaaggaaacaatatgatgtgagacacactcatgatcctgattctacaagttataatatagaaaggagtggtctgatcacaacgaaagggcacaaaaaggacctagacctgaactattctaacacaaatggttttcagatgtattgttcggctagtttgttaccagaaatggactccacaaagggcagtatgactaaggtatcaaaaatggacaagaacaaaaaacgacattatggaggtgagtcctccctagctggcacacagagctccattatcatgagaactgcagctgagatgctagcagtttaccaagcttgtggtattaaaaagaagcgatcggcccgagtccgcaggaattcctttctttctgttatggatcttgagaagaatacttcacaagaatcaacaagattgccgcggtcatgcatggaagccctgtacgagagttcctacataaaatttatgaccaagaaacgttcacagaaggcacggctcaactctcccaattccattcaaccaaatatagatcagaaaaacaggttttcatctgaaaccattttttctggtgggttcaatggattgaaaagatcagaggaaactttccagaaaactttacctcagattccagatgataagaggatcaaccttgacattcattgcgaagtaccagtagaaaactcaccaaatacatcaacgccaccatatatggattaccttcaaggagttacatcaaagtttagatactttgatttgaacactgagcaggtgcataaaactgagatgcatttgtatcaaaccatgccctctctttcttctttaggagcaacaaattatttgccgaatgctctagtcccatatgttggtggggcggtggttccttatcagacacaatttcatttagtcaagaagcaacgccctcgagctaaggttgacttggattttgaaacaacgagagtttggaaccttctgatgggtaaagcagctgaccctgtagatggaactgatgttgataaagagagatggtggaaacaagaaagagaagtttttcaaggtcgtgctaattcattcatagcacgtatgcgcctagttcaaggtacttttagtgctggagtaaatccttttttgaagcccatagtatgctgagctcgttttccgcgagcctactttttaccctgtctattactgtgtagactatctcaggagcttgtcagccatatagaattttctttagaaacaaagggcaaagctcccgccagccatatagaactccttgaaatgttgtcaggttatttgatccattattaaaccacctaatttaaagaatttgtttaaatgcgctgtatatgatcttacaacttggtggaggaggaattacaaaagcatctcttatgctgaagtagctccactgctcaacatggggaaattagcatgcaaaggaacttttgagataatcgtatgtatgtgcttagataatcaaacatatatactttcttttat

SEQ ID NO: 20615 - DNA, 16923 bp, Oryza sativa
cacataaaatactatttatgttttatcatataataacaacaaaaatattaatcataatttttttttaaataagacgaatggtcaagtgttgaacatgaacaatggctgcacttatttttggacggagggagtatcttagtaatagtttatactccctccatccacttttgatagacatattttcaaatctgaaaaatttacttttgataggcatattttcaaatctgaaaaatttacttttgatatgcatatttcaatccaaccatctatcataatgactttctcggatttaatgcgtgactctccattcttccacacagaattggatacatgggtatcgacaaatgtaaatattaatgaatcgtttgtttacgaggaataattagtaagagtagcatgtttaaatggatgataagtagaattacttattcttgattattgtgctaagataaaatataactatcaaaagtagatgaagggagtagcttaggttagtgacgaacaatatttgtgcagcagtgcaggtgccaaccaaataaacctcacaaaaaaaagtactactagctagccgctactaccgcatttgttgtgatatactaatcggtgattagactcacgcccacaagatgatatgatgtgaggaaggtgagacacattcttctttgagagccgccgcttaatcattacacagatcgttcgattgaccgctgatagaccggtactactcctaagcacccaaaatctggttagtaattcaatgacgcgactaaattaacttgattaatcatttaatgtactgatcatgacgtgcaagtccaaaacactgaattgtccctagtacggtcgtaccaaaagctgaaatttgctcagcttcaatatactccctccgtctcataatagctgtatttagatccaaactttaaatctaaactttcaactttttttcatcacatcaacctgtcatatacacataacttttcagtcacatcgtattaatttcaacctaaactttcaactttgaaaggaactaaacacagccaatataataaattttgggtagatataacatactccctccgtccttaaaaaaaagacaatccctatatccccgaggcaagcttagtattaacgtaaaattaccaaagtgccctccttaactgcattcgtcgataacactgccattctctgcacacatcagtactactactaaaactccagtactttggaggaaaggcaaaaaaaaattgagttgcatttgcctcaaaaaaagattacattccgccggaagaaaggaaacaacctgcaagaactataccaagaaaaaagaacagataagaaccaagaatagagggaaaaaattgaaatcaagttcctaaatcagatctgccacatatagccctgcaaactttagccttcacctcctgcatcacaacagcatggccctaccatcgccactgcatccatctcccgccgtcgtcgccgccgcatccatctcccgtcgccgtcgcatccatctccggatgccgtcgccatcgccgccgcatccatctcctgctgctgcatccatctctagacactgtcgccgccgcatccatctccggacgccgaccgccgcatccatctccaggcgttgtctccgccgccatcgccgcatccatctccggacgctgtcgccgctgcatccatctcccaccgccgtctcaacgccgcatccatctctgggcgccgtcgccgccgccatcaccgcatccatctccggacaccggcgccgccgcatccatctcccgccaccgtctccgccgcaccatccaccgccgccgtagccatccgccgccgccgtcgccggggcatcgatccgccaccgccattgtagagaggagcgaaaggaaaggaggggcagatctggagggagagattgcactaaggagaactgaggaggtagagggagagagaaaccaaatgagagggaggggataaggttgccgtgtgaaccggagaaaagaaaagttgaggcgctttgactcggtgactcctcaagaggacccatgcctattgaatgtgtatcgaattttgggcaggaatcggttttttgtgggacaaacaccccactccaggaatcgatttttttggacggagggagtatcctagtacaataaatctaaacatacatccaaccaaaatcctttatattatgggatggagggagcaataagaatcccatcccttctaatacttgatcattaacaacctcatcaagcctcagtcatttgtccaaggcttttattttggaagtgttcagaaattggattcgtgctccaatttgagcgaaaaaaaaatacaaacaactatccgaattttgagtttttacccattaactcttgcggtccttttataatatatagacatataatagcctatgcctccgatcgtggaagctacatgggtagagaacaacatagccattagtccattatacatggtgcaggtcgctttccgtcaggagggctgaagaaagtgttcctatctactgctacatatgcctaacatttaggaaccgattccagcaacaaagctgtgagaagctgagtggaatttaggcagaatctcacccatatgccatatcaaaataattaggaggaaaatacttcatttgattaggtgtgtcagatgcatccttggtatactgagatatttaagtatagggacccacatgttatagattgcgagtaacaaatacttaattattacatctttaaagtagtgaatagttaaatgccccctacaagagagatctgcgttgcggattcatctgcactttcgtttggattcgccgctgcttcaggagagaataccgattcaaaagttgtccactactgcaattaagaaaaatatctcaaccatgtgtgtgtgtgaataccctcgcatttgcatacataccattgtcctgattccaaaaaaaaagaaaaagcaattttacggtccttaagaaggtacactttttctattttaaatttggtgtctcttgatgtaccaaattttacactaaattttttatatctctcaaggaccgtaaaattgctcaagaaaaatagtaaatctgtcatttttgatagcaacattatgtaccatgtcgctgcaaagttttcatttgatattgtaccagccacataccaaaggcatctgaaaattggaatgttttcttttccaaaagataaagaaaaaggcaaacaatatttcagtgctttcatgtcaagaaatgcctgaaaaaggcaggttccatagttttttttttcatgcgatccaaatagttggaaaaaaatggaaaagaaaagcaatatagattattgtagtataagacatcactctgcagatattcatgatccaaattatagctctagagatgaagaaacaaaaatttaaaaattccaactttgaatgtgacatttgtttttagtgtgatttgcctttcgacatgtatagatggaatcctgcattttatgcttgtgtaatgatggatgacatatttagctgtgatgtttgtttgtttaagattcttttataaatatttggactgcaacaaaaaatcaaggtcacatgctcttgaaaacttgaacagaaatcaagtacattgcctacttttgttgataaacttttagaaaaataaattatgttgatcaacttaaagctttgggtgggttgactgaagtgtgtgagaactcaaaactggatgtagatcaagactcttcatcattttctttgatatggaaggctgacacatgtttaaacattttctctattatataccaaccgtcgtttttgtgtaggttttggcttgaccgtcacaaaaattgtatttttttttctgtgagtcctttgtgggaccaacagaaaatgtacacaccctcaggcttgcttcgaagtgtgatagtgacatgtttaaacattttctatactaaaataaagaggcagtcctcctccacctccacgtaagaacttttctctctaaaaaccgttcaccctaaaaagccagatttcaaaaaaatcaacaattataaaaaattcgaacagagcaatgggcccaaataattctactaaactgaattaaaaaatgattctaaaagagcgaatttggtcactcccatcgcaaagaatattgagttgaaaaatgccattgcaaaaagagaggggctgaaaaaaaaaactagtgataaatgtaacaagctcttgaaaatactattgtggtttctttccaatcctgccattagtgcctttttcatagataaatttccaaatatgtcaatgctttttattggggtccacaaatatgccaatgctacgtactctgatcttgccatcacttctattttgcatttctgttctgctatatatatatatatatatcagcatctctagcctaggttaatatgcagtaaatattgggtttagttgcaattttccctaataagaattagcgtggtgttgaaaattaaaaaaaaaggtatagaatcattagagaaacaataaagaaattatcgtcaagtatatagtacagaaaataaaagtacatacaattaatatagatcgaattagctgtaaattatcaggagtccccactagaaaattcatgatggagaagtcatggaaatgattttccaactcaaatattcttcttgctgacgtcgtttagcagcctaaatttcctaaaattaatttggtctgctagcgtattattacagttcacttttgttcgcaacggtcccgggcaaatcatctcgatcattcgatctaaacctatacctttgcttgaaacctgatattccgtagggtggtgctccagaagttgacattgcaagggcaaggtgcttcctttcattaactaaaaactaattaaacatcgaggatatcacaggacagatcttagccatatgtcttatcgggcaaaattatgatgatgttcgccggtaacctgcccatctaatctatccacatagcctttcggaaattcgaatctaaagacacgctcgagcgtgcttagtgctctccaccggagtaggctagctattttcccaagcaaaggttagtttgcatgcgcatacttgaagcataccacattcacgtggggaagacttgtaaggtcttatatatagtcttacaatatttgccatcggaaaccacacgaggaacctgacagatcacataataatatgacaagattaggcttgcaaaagcagaaatgcaatatttgtgagttgtgatccgtttactatcttttgctgttttgcatggtttacacgtctgcagctcctttctgagctatatatattttttaacgactcacaccaaacagcgtgaagtttatattgacagagcaggaaaaaaagttacaagattacaatcttaggaaatcgtaaccaggaaaagaagaaaaaatagccgccacccacacaccgacagctccagcaaacatccttgtgagaaggctagcaccggaccggccgccgctaggccaacaaaggagtacaagtgatcgagggagagaggatgagagagaagatggaacctctctaccccctaggcccttcgatgtggccatcttgtataagctagggcatcgacacaggatgacaaagtctagagcgagcttgcaccatatgtctgggaggtttccgcaagagggttgccaagacgacatctccaggggagaagcaacggaagcaccgccgctgccgtccatcaaggtctcagagagaaccaagactagattttcacccggcagccctgcaagaggagatggaacaacacgacaacgccctcaagaggggaagtgacacccgaaacgccattgttgccgccatacaaaaccaggataggttttcacctgccacccgccgcctgtctatccacaactaatacaccattgctccaccacagtctaaacctctgttggcgcatggataccgctgcaccggttccccagccggtccagcctccgcgtgccgtcacacggccaccctcgtcgcgcgatccacgccggcttccaacacgcgtcctcacgccgcaccgacctcccgccgctgaccatgcatactcgcgccaccaccatggcctccagtcagcgccgccgaagcctcccctgcaagccagtggcgccagccttccactaccgtcggtgctgtccacacaactactgtctccgccgcacctccacagctggctgtcgatgccgacctcccgctgcaccatcaacggcctcccgccgtcaacacctccggccgcaccgccgaactccatcatcaacgactccaaccacaccgtgatgcgccatcctcacgctcccgtcacgccgcacgtggtttgctgggggcgctgggggggcggtgccagatccgccaccccacgccggggaagcagtcggccgccgcgtcccacccatcgcgcgccattacgccagacgtcgccccctctcccaacgcgttccactccacctcccgcatcgaggaggagcaacgccggctcggtttccccgccgccgccttcccagcccgccgcgcggtttccggcagcgggctctagcggcggcaaggcggcgagagaggtgaggagggtggcggcgcggctagggtttcacaggagcgtcgcgggggactttgagctatatatgggcaccgatggatttcattagtcggagcgctggctgctttttttttcagaagtgcacgggtagtccttaaacttattcggatgtgtcatctaggtccctaaattctcaaaatacatctttggtccccgaacttgtcatgagtgttatatagatatatctaaacgggctccaacccactcagtgagatgatgtggcatgtcacagtgatgcttacgtgtcaatgagatctatatgttagtcacatagaaaaattaaaattttgaaaagaggagagaagagaaagtgatgtttttaattttgaaaaaaataaatgaaaaaagagaggagaaaaaaatatgttcttaattttttttctatatgtgactgacataaggttctactaacacgtaggcgccaccatggcatgccacatccgcacacggagcgggttggagtccgtttggatctatatgacacgccggacaatttgagagaccaaaaatgcattttgagagttgagggatttaggtgagacacgcacataagtttacggaccacccgtgaactttactttttttttcaggagaaaaggtatcgcgctatgtaatcaatgattttttatttcctttttatgtaatcaatgaatttattcttgtactgaccaatgctgctgacatatcttcttgatatacactatacagaatttagataatcaaaagatgtgaatatatccaaatcattctgattgatgacgccttattagtttcttttcgcttttgctattcatcatgccataggataaatattcgatttttctaataatataaccaaaatagcaccctctgaatgatgcacatagctggttagcgtaaatatcttgggggtggggggggtgggttaacataggggtgtaaagatttggcatgtcatatcagatattatatagggtgttgtatagggtgttcggacactaataaaaaactaattacagaatttgtcagtaaaccacgagacgaatttattaagcctaattaatccatcattatcaaatgtttattgtagcactacattgtcaaatcatggagcaattagacttaaaagattcgtctcacaaattagtcgcaatctgtgcaattagttattttttagcctatatttaatacttcatgcaggtgttcaatcgttcgatgtgacagggtgtaaaattttgatgtgggatctaaacagaccgttgatgacatgtcaagcgccttctacctcgagttgagtaggaggcgcggcatattgtggcagggaggagtcaccaatggcagtcatattaggccgtgtttagttccaaaataattcttcaaactttcaacttttccatcacatcaaaacttttctacacacacaaacttctaacttttccatcatatctttctaatttcaaccaaacttccaattttggtgtgaactaaacacacccttaaaactcctgtaagttcagaaatttcatgtcacggctatcagatgtgggaatatagacctataggaaaccctggaaggggtgccaacaatacgagtgcagttctcaataaaatatcttgggttacctctagatcataatactaacggtcttatgcaatttcataaaataaaaagaagtaattttactccctataactattttattggatcagttaatcatctaaattgtttttcgttcattcataggatcaagtgctccaataattagtttgagatagtacagccgttcgataaatagaaaaatattgtattcttatagaataattaatactccatccgtatcttagcactatcaatctagagataggtcatgtccaaattcgtagtgtcctatagatttatagtaatagaatacataaagcctaaaccctaaaccgattctagcacagtgctatgaatcgcttgcctcatttcgtgcagttgagaagctcatccaaacatccatatcgaagcggagcctaagcgtgtcaagcgaagcactatagaagtggcagtgctactgcgacgtgcgtgttccccctctaaattcacacgtcaaatcaacgtgaaacacggtgcattctcccctcccaccgtcccaactcccacgtccggctcggctcgggcctctccgtgccagagagtttcactcctcgcggagaaggaaaaaccggaggcgcgcgcgcagtcgtggccggggttgggaagatccgagaggcaaggggcaagggcggcgtgcgggtctgcaggatcaggatcccgaaaagctagcccgcggcgaagtaataataactgctcctctgaatctctccgatcctctcgaaccacgagaagctcagcagtttcggctccgcgcgccgcctgcctctcggtcgacagcacagtaaattccgccggcgcgtggtgcagctttgccggcagcgtgccgctcccacggccatttacttcgcctcctctcctgaggcaggtcggtgtcggtatttatgtatacttgcacagttccacttcccggccagtctcctcactctcgactactcttctttggtttttgctgtgaaggcgcgcggctggagacgggaagaccggggaggacaggaggatggtgccggccggcgaccaggcggaggaggccatcgtggcggacgccgggaaggaggaggcggaggtgcgcgcggccatgggcgtcgagcaggacggcaagttcagcatgacgagcctcctgtggcacggcggctccgtctgggacgcctggttcagctgcgcctccaaccaggtacgaccaaccacgaacgacctcgtcatgcctctcgctcacatttcgtttggaattttgcaggtggcgcaggtgctcctgacgctgccgtactccttctcgcagctcgggatgctctcgggcctgctgctgcaggtgttctacggcctcatgggcagctggaccgcctacctcatcagcgtcctctacgtcgagtaccgcgcccgcaaggagaaggaaggcgtcagcttcaagaaccacgtcatccaggtcggcagggctagctcctctccttgcacatcttcgcgtcagtttcagtttcgtcagtttccgggttttcctgcacacactactgcttaattattttccccgacggaattcgatccctcgtgatcgatctcatgccggtatttcgagcagcgcctgcgtgcgagcgagcgttgcttgtccaacggaaagccgcttttgcatgctctcgcctcctgcaggttccttatctgcaacgcgatcagcatgcatatctgcctccagccagcctagtgcacgcatcagatcaactggcatatggattagactaaacttaatatggattatctaaaaatttactatttttgtgttctcttatgccactgaccagtggttcgaagttcttgatgggctcttgggcccgtactggaaggcggccggcctcgccttcaactgcaccttcctgctcttcggctccgtcatccagctgatcgcctgtgcaaggttgactcgccgagttcttgagacaaacatacatactcttctttttttttttgtaatctttgttcattgagatgtcactgaaattgtaatgcattgcagtaacatatactacatcaacgaccggctggacaagaggacatggacgtacatattcggggcgtgctgctccaccacggtgttcatcccctccttccacaactaccgcatctggtccttccttggcctcggcatgaccacctacaccgcctggtacctcgccatcgccgccgccgtccacggccaggtgagtcctcgatcatcgcccgccgtcgtcggccataaatcaataaatcatcagccggcacatgcttgaccacactgtttataagcatggttgcaatgattatgtatgattcgattcgatggggggctaataacgatgtgtatgattcggcgtggccgctgatcgaattcgactcgatgtcgcaggtcgacggcgtgacgcactcgggcccgagcaagatggtgctctacttcactggcgccaccaacatcctctacactttcggcggacacgccgtcactgtgtaagtgcactaaaagaaccctatgctactgtaaattgtgacgcataaaccatgcaatgcctctgctaattttgtcatgaatggttatcgacaactgggtccagtgtccaagccagaattccggagagccatctatgaaacaatgatgttcgttgttacctaccctagatttagtctggtttctgttttatctttagtctctccctccttggcaaacttgtttaatttacggaaaccagaagggttatcttctagccattggttacaaagaaatggagcatatagccactaaggttggcgatcaccctacagtcctctgctcaagttcctatgatgaccaccaagcatttcaatactcctagtgaacattcctttattcccgttgtccatttcttgtgcttaatctaagatacctgctatgatgatctttgcatcgcgattattaggaataattagaaccagtgagatgttcagacgccctggtattaaatattgagtcctttgtctttaaaattcagctactttttttgtagtggtaaaaatgttctttccaaagggtagatgatatggattggtttcagtccagctagtgcggagttaacatcgaataaaccaatcccgcccaacttcagtgatagcctggtaggacatatatcggatcgtgacaattcattaactgatcggttatggttcacgattccattttatctttccgtgataacctttgattagtgcagtgaaagactactttgagaattccttccctactcccaagtgtcagtttgacattacccttctcgatcgatcacagtttcttgcccaaagcaattcagggctttttgagtgatgagtgatgacagtaattgccattacctgagagtgttaggtgcttgtaatcggcaagtagcttcatttggtcgtatttgtcggtccccctctgcttacttaccatcaccagatgtgtgtccgcgtctgtgcagccgaatgatgtagtgaaagtttggggataatgggagattcctcatgtcccaatctttataaatatcctgactaggataagcactaccttgcccccctgcttgatctcttatcattcaatcaacttaaagtaaagttcttatatatcacttggcatgtgtatgaaaaatgtccgtttagtacgttttgttccaagcggggctaattctgatagcttcatatatgttactagtactgatattattattatttaagataagatgaacaatttcttattttgcataatcaaataatctgtacatgcatgctgaattagagattgtgctgttgatcggttcacgatgaacgaagctgacagtgaacaatcgtgcctgaagttctgaacagttgacgaagtttaattaactttttacgcgtgcagagagatcatgcacgcgatgtggaagccgcagaagttcaagtacatctacctggtggcgacgctgtacgtgttcacgctgacgctgccgtcggcgtcggccatgtactgggcgttcggcgacgcgctgctgacgcactcgaacgccttctcgctgctgccgcggtccgggtggcgcgacgcggcggtgatcctgatgctgatccaccagttcatcacgttcgggttcgcgtgcaccccgctctacttcgtgtgggagaaggcgatcggcatgcacggcacccgcagcgtcctcacccgcgcgctcgcccgcctccccatcgtcgtgcccatctggttcctcgccatcatcttccccttcttcggccccatcaactccgccgtcggcgcgctcctcgtcagcttcaccgtctacatcatcccctccctctcccacatcctcacgtaccgctccgcctccgccagattggtaagtgtgtgcagctacctttgccttttctttacttaccattaaattgcccgagtagattcctcatatatcaatatgaaacatgcactgtttgtctaaaaaaatttaaaaatatccgagtagaaatcgggctgtcagtcggtcaccagtgccaaagtgacacaaccacacattacactacaccaaggcactcttatgctagctaggatgctacacgcatgagcagaacggctgggtattgcatattggcacggattattggtaagcactgtgcagatatggaatggcccccacaagtactgtgatcaaagtaagtgtagccttccactatggcaccaaagcactagtgccacacgcacgaacagcgccgtgacgccgagagcgctctccctgtgctgctccggccaaacaccgacaggctctcggtctctggtgccccccaacaacgacggcgcggccacgcggatcggcgccggtttatttggtcgggtacgcctgctcgatcggtcggcggcgacagggatggccggggctgacgggtcgctgtcgctgttccgcctttctccggctgtgccggcccccggcacgtacgcctggaccgtataccttatcacgcagctcgccggcaggcggcagcacggcgtgaaggtcatatctgcgcaacatcaactgacgtacagcgtgtttgatttttttttttatgcaaacagaatgcggcggagaagccgccgccgttcctgccgagctggagcgggatgttcgtggtgaacgtgttcgtggtggcgtgggtgctggtggtcgggttcggcctcggcggctgggccagcgtcaccaacttcatcaagcagatcgacacgttcgggctcttcgccaagtgctaccagtgcccacccagggcgcacgccggggcgcccctgccggctccgccgcgccactagccaaaaaaaccgagtgccacgccgcgacggcgcgacgccgcgcgcgggccggtgacaaaaggagctagcttccccgcgggcgtcttgcctttgtgtagtaggacagcaggtcagcagcatacatggtaggacagcgcgtgggtcactgactagatttaccgccctgcaggggcttccctatgctgcggagtcttcagttcatgtgtgttgttggcaactttgcgtcgtcctcttttgtttgggagttggatgtgaacttggtcgtaatttgtaggttcttctgttcatgttacatgccaatataaaacgccatatttgttcatgtttcatgcgggtataaaacaccatatgaatatgattggatcatgaaagtaaatgagttattatgctaactaggaaggtggcccgcgcgcatgcacgggcacttatattattgaaaggtaagattactattttttaaaaaattttgtttcatagattaagggtaaattaaagttcggataatgttattttataataatttaagggttatatttttcttaaggtattttaaaaaaccattcacaaacgtttgagtaggagatggattaagtacttacgacttttgaatcatgtgtttttctctctcgagtaaataagaaaggagaaactattgctaattgattattatacagtccatctatatcatatagtgtagtttggctacaaatgaaaaatacgagactaagatactcaaaattcttgtgattaaatcatctcatgaaggcgcatgatatagtaagaaagggagggaagactatgcatggagaaaaaagaagaaagggaaaaatgaaaaaaaaaaagggaggggaagcgtagtacccacgtacgtaggtgtatacatgtgccatgggaggagaggtgggacctcgtagtatttagtttgttctaagatcgatttaatctaacaaattatgatattggacgtacatgttataatatttagataccttgcttttttttcttagaacttctaatatttgctctaatttattagagcaccatgtggcagcttgagagtattttaaggaattttaaaagacttaacacatgtaattagaatattaaccgcgtaatatgtatgtatggggtatatggtaatatttgttccagctttatccatggttatatacatgtaaagagaaattaattatgtggctagcaagccactagatgtctaattaatagcaaataattttgccgcatatttacagttattcatagtagctcttacatattcatcttatgactttgattatccgttgatccccaatttactgatcatcatgactcgcatgaaaaaaatgtactacttagggtttaggacaggtgaaattgatgaattatctgttttatgcgatagctatttgagggtataaacaaatcaattgacttctaaaaagttaaaatgttgtttaaaaaagacaccatttagaaacttggaaaggtgcaaaaaaaatccaaactatggaatcggaaaaaaaagatggcattaaactcccttataacacccttgtcttagtaagaattatattgatattagttagtattgtgctcgtatttataacataatgatttctttcaccggtacaaacaaattgtacaaaatccaaatactacataacaaaatacattataattattctgtaatcaactctcagtttcagcttaaacagagctaaatgttggaaaaaaaccaaacccttggtgcctaattcttctctcgctacatcacacttttaattttctttttatgttattagcaaaattaatcatatccatatatgatttgatatatggcaaagctgtagcgctgcaacggtcatgatcaccttagatgcctcagacatgatgctttgtcatgcgtgcgaaaggcaaaggtgcagacgtgcattatgcagcgggccaaaaaaaactttggacattttatttattagcaaacaatagatctgatgatttaaataatgggtccaccagtcctagtgtaagtgtaaattagttaaaatagattttaaattgttaattaaatgggtacacaatatataatggtatatactttattttaaaacaaaccaaatattatggagtcccacctctcctcgaaacagtgcattatttgagaataataatccgctgtaacaaaaaatagatccgatgatttaaataatgggtccatcagtttaagtgcacatataaattaattaatatagatcttaaattgtttatttgataggtacacaatataattgtgtaaattttattttaaaatagtgcattatttgaaaataatagtacaagtaatgagtacaccggtttaagtggaaattattttacattattagtttaatgggtaacatataatgtgtaaattttattttcaataattgtagagctgtatgacggtagactctttggttgtaaaattatgattatttaaaagaaatatatccattatataatgaaaaaaagaagaaaaaaaggaaaaaaaaaaggaaggaagcatacgtaccatacatggtacacgtttgcatacatatgtgcgggtgaaggaggagaggtgggacaccatattatttggtttgttttaagatcaattttatctaacggtgtataattttggaaccaccaatttaagtgaaaaatcaatggatagatgctttgcttttttcttagaatttctaggattttctctaatttattagagcgccacgtggtggcttgagagcgtttgtaagaagtttaatggacttttagtatataattgatggtgttccatgttcgcgtcgtgttcatttgtactatcgtacacaagacgcgttgtgaatttgtgatagttgaaaggaaatgtatgatgtaggcaaaattttgttagaggacaatcaaatgtgtaatttgctggaagacatcgtaaaacgtgtcatggctaaaagacactctaaaaacctggtaatttgcttgagaacacttttagctcaattgaagagagaaattattaaaaaaagatgaaaatacctctatggtcaaaagattttgagctgagactagagtgaagatgaaatataatgtatactagtgtgctgtaattggggtgatctaaatttagaatttcataattggaaaaagtacgaattaccacccccgaactatcatggtcatccgaattacccccttgaaccacaaaaccggacattcttcacccccaactatgcaatccgcggtggtttcggtctacgtggcagtccattcagcaatttatttattaaaaaaataggtgggccccacctgtcagtttctatctctcctatcgcttctatctcactgtctcactctctctctctgcctcttctccctcggacggcgacgg

SEQ ID NO: 20616 - DNA, 14013 bp, Oryza sativa
ctcgcctccgcccccgccgctcgcctctccgccgcccccgcggcactcgcctctcctctgcccccgctgctcttcaccgccgccgccgcctcgcctagcctcgcctcgcctcggccatcgccgtcctccgcttgctggctcggccgtcgccgtccgaaggagaagagggagagagagtgagacagtgagagataggagagagagatagaaactgacaggtggggtccacctatttttttaataaataaattgctgactagaccgccacgtagaccaaaaccaccacggattaggtcgaggggggtaatttgtccggtttgcatagttgggggtgaagaatgtccggttttgtggttcggggggtaattcggacgaccgcgatagttcccggggggtaattcgtactttttccttcataatttataaagagagaatccattatatgccactgactttgtcacacgtccacgatttgccactgactttgtcacgttctacaatatgccatcgatttttgtttaacttctacgatttaccatcgccgtccggttagtctccgttagtattgtacaaatttgtcgaaatgaccaaaatacccctgagacaaaaactttcaaaattcggatacaaattctaaaatatcagattttaaatttttggccaaattttggatgtttacaatcttatatttataatatgatattttgttaattttatccaatttttggaagtttttgtcctaggggtattttggtcatttggacaaaattgtacagtgctaacggaggctaaccggacggtgatagtaaatcgtagaagttaagcaaaagtcgatggcatattatagaacatgacaaagccagtggtaaatcgtagaggtgtgacaaagtcagtggcatataatggattctctcatttataaattattactctcctatcagtggcattcttgtcttcttcaagaactagcatggtggcccgcgcaaatcgcgcggctagcatcattatattttctctcatttaataatatatatgttttctcaatgtattattcaaatatattaaaatgacaacataattttaaaattttgtattacctttacgaaactactaatgtataatattcatattgtattttatatacatgttagttattaattatttttaatatcaaattttagttatttgtaaattatattcctatatggactctagactcgtcttttaatatttatttgtttttaatttcgaattttcgttatctataaattgtatttctatatagactctaggcacttcttctaatattatttatttttaattctgactttttcttttttctaattgtatttctatgtggaatctaaactcatctttcaatattctttaatttttaatttcgaatttcagttacttctaaattgtattcttatatttactttagattcttcttccaataattttttaatttctaattttagttatttgtaaattgtacttttatacgaactctaaactctacttttaattttattatgtttattccgaattttagttagttttaaattcttatatggactctatactctacatcgaatattccttatttttaattctaaatttctattatttcttaattgtatttctatataaactatatactctacttctaatattccttatttttaattccgaatttctattatttcttaattgtatttctatatggactctatactctacttctaatatttcttatttttaattacaaatttttattgtttctcaattgtatttctatatggactctagtgtcctcttccaatattccttattttttaattccgaattttctattttttttctcaattgtatttctatatggactatagtgtcatcttccaatattccttattttttaattctgaattttaactatttctaaattgtatttctatatggactcagtttttctttttctccaattaatatgagaatttctaggctatgagagcgaacgtggaggctcttttttctatttctttaataagttaatagatttatctctaattaagttaaaagtgtcatctagcaaattcctaattttttagaatatcttttagtcgtgacatgttttttctatgcttatcagcaaattacacaagttttgggtgtgctgtagcaaaatttaccgatgatctatggtgggctgtggccgcccaaatttattttcacgtttgtaagcccatactgtcacgccggaaataacaattcgtttaatcctaaattgggcttttagcccatgtagaacaggagtactagtacaccacaaagagtcctttatggtaacgatttcgtagaattttgtgatttaggcgaccagaaatcagttaatactcggtttgagatggcgatgaggcgatgagatcattgccttttcggtcgaatctagcagagcggcgagcaacccccacccactttgactccgatcctccccgcccccagcgcgatagcccatccgatcccaaattccggcgagatggcggtcagcctgtggcgcgcggtgatgggcgcggccggcggcggcggctcctcgtcgtcgtccgcggccggcggcgacgcggggggcggcgtggagttctggcacggcggggagcgcacggggtggctgaacaagcagggggagtacatcaagacgtggcggcggcggtggttcgtgctcaagcaggggcggctgttctggttcaaggacgccgccgtgacgcgcggctcggtgccccgcggcgtcatccccgtcgccacctgcctcaccgtcaagggcgccgaggacgtcatcaaccgccagttcgccttcgagctctccaccccgaccgacaccatgtacttcatcgccgactccgagaaagagaaggaagagtggatcaattccatcggccgatccattgttcagcactcccgctccgtcaccgacgccgaggtcgtcgactacgacagccgccccaactccaagcccccaccgcagccgaagacgagcgaagagagtgaaccgtcagcgtaagatagcggtgatctctggctctcaatatgcatatctattgtatgattttatctactcaagtagtagtaattgtgaatttttagtttttgttttcttctcttggttaattatatgtatattattgactgctacctgagaataagttcaaggttttgccgtgtggctagttcttttacattatggattagttgcaacagcataattcggttggtgtttacttgtttcatcctgtatgaagttactggcttggatcatcggtgctgcgaaaaattttaagcactcagttctttaattttcattatggggattttcgtttgtcaccaatgggagcctgaaatgtggttcagaacatcagatgcaatcctctgtattgtatagtagtactgaagtttgggctgtattcagctgcatgtttagctttgatcttaatcttgtcatttggagtggatgccccagctttgtgctgacctcttcaatatttgtttgtcatgacctgattgtacctgaaatctgaagtcttaatggttactatactttgcggtatgtcaccttctttttaaaactgtttgagtagaattctagtcagaagtcagaactaattagtatatattcagggcttcatgacttcatgcattggatatgctaacaagcaggctgtttcataatgttttaaacctattgaagcctcaaattttctgataacaatactacttgttgaaggtagaaataaattttactcttgttagtcctaaagatagcagtgatattttgtcatctgatatttgttttcttaatctgaatagctttgattagtttacagcctacaacagagcttgttgacaggtttgtcatgctgaaaactgttcattgatatgtctgcctgttttgatgttaaaagtgagagaagtattatgcatggtagttcgttggaagtccaccgacttggtattatgtcttccgtcttctgcttgttttgatgttcaaagtgagaagtattatgcatgatatactccgtatgtagtttgttggaagtctgctaacttgtgatgttgagcaagattcatccatagggtttgatattttttgggacagaaggagtagttcgaagcaaggttgatttaggccctgtttagcttccaaaatttttttcccaaaaacatcacatcgaatctttggatacatgcatagagcattaaatatagataaaaacaaaaactaattgcacagttatgggagaaatcgcgagacaaagcttttgagcctaattaatccatgattagacataagtgctacagtaacccacatgtgttaatgatggtttaattaggctcaaaagatccgtctcgcggtttcctggcgagttatgaaattagtttttttattcgtgttcgaaaacccattccgatattcggtcaaacgttcgatgtgacacccaaaaattttcatttcgtgaactaaacagggccttaaacagattgaacccacaccaaaagtcctaaacagatgtccccaaaactgaactgcaatgatccttcgttcgtattgatagcagtggaatattgggtggttcaagtctggctatccatgtctccatcactccatcaagtcctttgaaatttgaatttctggatcttgtcttcttcaactttgtcccttaccactcactatggtcctcgatgggcatgtaatgatctttttaatgaaaatgacccgatcagcgagtaaataaattctgagtgaaaatgaagcgaagtaccttactccacattttatcgctggttttctcccatgtacatgtagtctattctaggccaagcggactatttgcacttcttgcatggttacgtcctcctgcggtcctgcctaatatacctccctacctgtcattttgaggtcgattattgcctaaatgaaccgtaccaatatttggtactgcttaattttagtatagtttagcgctatcaaattttggtagaatttgatgcatttggtttaatgccttattaagttttactagtgttttaagagtagaagtttccaaaattaccagactttagtaaacataatatttgcaagagtagagctgagtcggggtatttcaattaggcacaatatattttaaaaacttttatataggactcaaagaggattttggagccaaacctagggctcaagccctaccttccctagggtggcctgctcctccgtccaggaaagcatgtcgttttaaggttgattgaacaaattaacaagtaaaaatgactatattaccatcatttaatcattgcatttgtcacttcaaattatgctgcagataattaattaatcacttatagtagaccatctattgcattgcacacacatgggtaatactagtagtggtactgttgtatagggaaataataggttcaaatgaatcgatggaatatactaggctcagcaagctggtcaagatgctcgaacaacaaattttgtgggatatttttttaacaacagcggctttctgggatggagaaagtaaaaattatactctgagtacaaatgacacgttctttgacagaaagactgttttttcaatggaaaaccttccgcaatggaaaacccggaagcttgggcctctgggcctaaaattccattacgtaaaggctgggaaacacccggaaaaggtcgagctgacctgccttgctaatgctaggtccacctcccggttggcgcccgcgggaaccgtgtgaggtggccgcgtgtaacggcggaactctctcgaacaccgagacgctctcctctcctcctgagtcctgaccgacgcgcgagatccaacgggaagccgaagccgaggagacgaaacgagggcccccgccccgtccccgcgcccgctcgtcctcgtcctctcgctgcgccgcacctgtcctctactgtcatctactccctcgtcggctcgtcgccgtcccccctgccaacctgccagtgccaggggatctcagcaccctcacttcctccccaccgcaaaaaacccccacgaaaccctcgtgctcccttccgtgccccaccacccctgcactgacgcgcctcgtcgccacccgatcgatcgatcgcctcgtgaagcgccccgcgcgcggcccctctctcgactgaaatcggaaatccccaccctttctccaatcttcacctctcccgtacgacatggaagccgccgcgcttggcgtgccgttggtgcaggtccgggctgcggtcgccgcctatggccgcggcgccggcaagggcaagggcaagcggcgcgtcgtaggcgctttccacgcgccgcccggccgccgccggacggcgctcgtcgccgcgctcccggaaccccttcagccgctctcgccagcgcaggacggcgccgtggcactcgcgtcgactgaggtacgtcgcctcgaatttgaaaccattgtacgttgcgattttgagataaacactggttacctccgttgctgcaggctgatggtggggaggaggtccatggggatgtggcttccgcagaaatctcgtctccctctggtggtgagcctcctctgcttggacaatggcgtgacagtagaaatggtgaaaactgaaaacctctggtggcgatggatattgtgatttattgtctatcaacctgttatttcagttcttgggaagacggtgcgtgttagatttgtgctgaagagggaatgcacgttcggccagagcttccaccttgtcggcgacgacccggcgctcggcctctgggatccgtcgaaggcagtgcctttggattggtcagaaggacacgactggactgtggagaaagtgagccttgcatcgtgcgcattgtttgatgtactctccttttgaggtaatcatcaccccttttcttctgtacaggacttgccagccaacaagttgattgagtacaagttcgtgctgcaagatttgtcgggcaagttgcattggcagaatggtcgtaatagaagcgtacagacaggtgaaactgcaaacattctagtcgtatatgaagattggggtaatgcaaatagtcagacagtagaagaggagggtaaagtgtccattgggatggaggagggtaaattgtccgttgggatggaggaggctgtagttccagatgatagtgaaagcagagatgatattattgtagcagatgagctacaggtggatgacaatctagcggtcatgcaaaatgaatctagtgttcgagaggatgacaagaaatcaacagttgggacagttacttctgttcaagctgaattaatgaagctacatgaagctaaccaaccagaggtaatggcttaatgagatatccattgcagataccttcatgtgtttaagtctattttctaccgaaaccccagagacattctatatattctcaactgtcggctgaaaataattagttcagtgtcccctatatgctcgctgattgaaatgtgatcctttttttatctcattagttactctgctttctcatctcaattagcttagaggagtcatgatgcaaagtagtgactggttggatttcatatgagagtttttaaaactatttactgtttactggaacaccatattgtttctatttcctatttcctgataatgtatttagtgtgcaaagaaactgaattatcaagtgtcagatcatccattcattagaagatgtgacataggtgtaaacatggataaaatcaggggctctgaaaaaatataggtggtttttagtgtacaatgtgagctttttagtgcctaaatctcatcaaaatgtcccatgactttggctgttgtctagacatatcatcctatttttatagttagctgttacttgctcactctatgctgctatcatacttatatataatgcaatttctgaatcagttaattgtagatgaaccacaaattcaagaggcgcttcctgaaacagcggacacagaaccagagaacggcggtgtggcaacgtgcgctgacgaccgttatgccgaaagtacagatgatgacggtgttccagtaggaggtacagatgatgacggtgttccagtagaaaatcggtggaccggtgcttttgaacatgagttgctttggggttggaaggccctgcagcagctactcatgagcctgggcttcaagatggatacatcatgaacgagtcataaggtactgcaatacataggtggcaatcttgatgtattctgttccttccatcgatttagtactagtagtaaagactagcagctgctgtctgttggtattgtttgaacgttcagttctgtacatattatttcccagaaccaaacatcaataagctgtcaagtttgttctcagctaatgagcagccacacttcaacactaagaagatgtgtaagggatgtccatcagcagtatatatacttgtcgtgagaattacgaccatgacaagaatcgctcaaaaatcctagtatgatatttgtgctgcacagctctcctctagtgcgttgtaatcgacaataaatccgattctggaacagcctgccattgaaagggcgggcttgagttaaggctgagttcatttcatcgactccagacggtaactttctcattttcttagtctagactgctagtcggtgtgttgtgtaaaataatttatataaagtttttcaaaataaaataaatttatttttaaaaattataatagttgatacataattatgcgctaatgatacgcctatatttttccaagcggagctactgattcgaacagggctgaagaccagcttcacaatggcagacaaagcacagcattttcaattttgaataaatacaacagaccttttcaaggcatagtacagggcattggaacaaaggaaggatctccctatattactatgaatttcctatgaaatggttcgatccatttgaattttggagaaaatataacagaggtggtagccctcgcgtggaaaatctgtgtgtttgactcactctaaattcatgtgctcttttattgtggaccatctttataaaatgatgccttttgcatagagttctatagaggacctaagattttgtaacacccctttagcaacgacaacacaaacatattagtagcttattaggcccaacaaatttcctatatattttaagacatctagctgtggtaactcaaaaaagttgtgaacttttcgtatataccactccaaaagtctccactctccgctgtgaaaaaaggcttgtttgaaatttagaatcttggaattagaaaagatgctgccaaaacctatatgttttaaaaaaaattaaaaaaaaactaaggacaccagctctaccaacttgatactagtaatacggaagagaaataaaaacaccatatcttaagggtataataatgatgtcacgcttggaagaagatggcatatactacctctgtacctaaatataagggttataagggtttttggttggatgtgacacatcctagtacaacgaatctggacagaccgtaggacggagggagtaagaatttgatgagtggaagaaagagaaaaagggggaagatatcgtaatagatggcttaatacacactcatatagtcgaataaataattatacaaatatattgtaacaactaaatagacaacatattatatgagttatcaattcataatatttggcattctaactaccaacaagattttacatttatatttattgtgtaacatactttaataatataacatgttttttaatctttactcatttatttaggaaatataagtggctaaactaaaacaatacaatggggttgtttagattgtagccaaataaaccttatcaaattttggcaatattaccaaaaatttggcaggatttcttacgtatttaccaaagattggcaaaaaaaaaaaactaaatgtagacacatttttggcaactttgctaaaaatggtgtagtttgaaatggcattattttgaatagccgcaatgttaaaattgccaagtattaagaaatcggggagtaacatagcatccaccccatatccccaaatatgaccttattatttctttctcatttagtactcttatcagtgctaatactggtcttcttttgctcctcctttctaaaagcgaggctactaaggaaagtcactccataactttttgccccctctatcgatcatctatatgtaaacaaccgtgtagattaattgcttgatttcactttcacatatctcatctttcttctatctctatcttcttgcctcaaaaagaccaattgtggtcgatgtaagattcaatctaagatgattgagcaccaagtgtgcaagcaagcaatgaatgcacatttttatcatctagaccaacaagcataatactcctctccatctagttttgatcgacacatttggttccagcatggtggcaaaggaggacacaagttcctccatattccattaactttgcaatccgcatgccacttcaattacgtacatgtatgtatgtgataggttgttgcaagcatgcatgcgactacgcattaactatctgagacattgttatgctaaaagcattgtccgcagccaaatcatagatcaatcctacgagttttttttcttaggaaactatcaaaactatatggagggagtattatatattcttggattagagtatgttttatatggtttcttgtggaaagttattacaaaataactaacaacgataatgtaactagggaggcggagtcttgtgcaaaaccatagagttcattatctatcgttatggacatgcatcaggagatagaaattaatcattttgtaaaggaagaagacaaacaagaaaaaaaaaggtttatccattataactggatgatcgatatcaaaagaaagtcatgacgtaacttacattcaccatattagaggatctgcatctcagcgagacatgtgttagctgagtagttgagccatgataaaattatataatgaatagcattgtaagccattgatccattgtagataccgacaacacaggaggccggtgcttattggggcaatggaagaccttacaagtgggacgaaggaagggcgcacaatagagactatgaggaggagactctgagaaggggattgcattaggaaataggataggggataaaagtacaaatgacatttagtattagtgtgttattttttctgaaaaaaattaatttgtcatatatatcgagttttgccaaacattcagtcaatccaaaagcatgtcttcccttccataattagttttttttataagagataccttgaatctaaacacctttcaattaaggggcaattacaaatttaccaatgttttgaatcgttattgcaagactgccactaaaaaattgcaaaaatgccactaaaatagttattcgagtagcatccttacaaaattgaaaaaaccgatggcaaatttgcaaatgccccttcaattaaagaatttcatgtactcccttgatttttaatagttgtcattctaacttctttgatcattaatttttaatttttatagatctgtagtttaataacatgtgaattatgttatgaaagtatttctcacgataaatcccaatacataaatgctagtatgatattaaaacattatgaatttttaaaaaactgatggttaaagatacattagcacaaagctaaaatgaaagtaatttgaaaggggctgtaaattgtacattaactttgcggcagccgtgcttgctagtacaaattataagtaacaaacttttgtgacgtatagtagcctattctctagaaataaaaaagaaagaaagaatagacgggagaggaaaaaactatggatggtttttggacttctccgctactctagaccgcaagggacgcgacttgttcaatggccattcttctctgaaacactagactagagaaccccgcatcccacttcttccaggctccagctcttcttcaccctaacccagatccgcggggacccagccgattcgcccagccacgccaccgagcgctcgtctcgtctcgtctctcgacccaatcccgtcccccggcgcgacgccccgccgcgcgatggccgacggcgccagcagcagcggggccgcctcggcctccggccccggtggcgggggcggcggggagtcggtggtgatcgactacggccggcgccgcacggcctgcggctactgccgatccaccggccagacgagcatctcgcacggtacgatcccggaaaagtccctttgggtgaaagggaggaaaaggaaaaaaaaagaagagataaaatagaggactagcggactggggttctgtctgcgtgcggagttgttctgtcttcggttcgagtcgatgcgtatgattgctagatgaccccgaaacaatcgaatttcaggtgtagatattgccgccgatgaaattggctaagtaccatgtatttagtagcacattacgacaccatgtctcataatttgggttgtggagaatcgattcgttgtttatgccagcttatgctcaggaattttgttagagcctatgcgaatacatgtgtggatggtaatatgcatcgttggacgctagtaacgcaggccacctataatcttgtggcctgggtctgcccatgctctcaaggaagtaacatttggccaccaaactacaggatgtgaagtactgctgatagcctatcaacgctgatcttgaccccctttattttactagcgtatgctactgatcttgtctttattagatatggccttagagcgtttcagatgcctccgttttgcgcttcaccttgtttacatcaatggacatccaattctgtctctgaaatgggatgaaaatcatgctgccgacgtgcttattgtctactctcagtcataggattagtatagaacacataatgttatcaacagctagtagagtcgcctgttgcaatttcatggttattcaaagttgtatctgtgacgtgtcccttatggttatgactacaaatatgttatacgatggtgatagttgtaatatgttgatgcaattattctgttgttaatgtccctacctaaattggtgttatagattctttatgtttcttttggttagtgatggtatttttccttttataattttcaaggtctctaaggaacgggccttcaatatcataggttgtttatataagaataaatttcacaaaaccccaggttttgaaacataattaccacaaaccccaggtttcagggtctactttaagaaaccccataatttgaggtattccatttcacagaaccccacttccgtcaataacacgttgttccctgtcatctcacatgaagggcctgctggttagtcaccattcagctagcctgtcatctcacgttgttccccgcattcatcttcctctactgctctagatctgagcccaatcttaaaaaaaaagatctgagcccatacttgcaccaccgagtagcagaacggggaatgtaggatctccatgttggctcatcacccggagaaatttccctcaccgctctcctactcctcaccattgggatccttaaccacgccttcggcttctcttttgatcttctcaatggaaggcagggaaggggaaggagaaggagaaaattgtggttgacatgcaggacccacctgtcatttgccggaagttatagcagaaccggtgttatgtggtacatatgtctcaaaaagccagggttttatgataaaaacgtaatatctgggcttttgtaatacatgtgcctcaaaacctggcattttgtgaaattgttcatatttatatagatagttcatccttgtttttctccatttttttgttattcttttgaagcctattttaaaaccttttactaggatccttacttattctacttatcttgcaggtctatgggctaacagcctgagagctgatgactatcaaggtactacttttatttaattgcatattttccttctgtat

SEQ ID NO: 20617 - DNA, 1585 bp, Oryza sativa
ctgagtcatttaccgtctaagcacaaggttttctcatttgtgtgtaccattaaatcactgatgacttaaaactagaaggtcacgagcttggtagttgaagcgtggcacagccaaactaaattaaactaacaaccataagaaaattatgtttgtgagtaaagcaataagctctcacatcgacccatcagagaggggtggttgcaaaagtactttccttgtctttttcttatttaaaaaagtgtcaagtttgatattatattatataggtagtctatgtatatgaaatactccatagtgttacctttgtccattgcagaacatgatatcaaaaacaaacacacaaatgtctacctgcaaagtagtcaaaatatagtcagataaaaaagacacagttacaaaaaaaaaagatggattagtaagcatattatgcattcctaataggtactgccactaactatttgtctatccacacactttctttcaactttcatcacaggcatttcagtgcaaatgaacatcctctatgctaggaaaactgattcatgctatgaactatgaaccacaaaaaaaatatacgtatttgtggaactgtaggaatatctaccacagaagttgaaattttgtcaactacatatctgattattttagtgataagtaataagcactgaaaaaacccggtaactgcaaagggacttgttcattcaattaaagttgttggtgacaaacataaacaattgagtacaaatttctttgattatgtttccttgtgaaattctataattataggaattcatcatgcaaaaatattgcccgaaaataatgttcaagattccaaagtaacaagcacaatactttgtaaataaaagaataatggcatcacctttatgttctgaattgcaattgaggagtgcttgctccctctctctcttgaagacagctcttggaatgacatcagtttgtttcctttcttcctatcgattcccacaaccttgttttgaatgcacaagcacaagaaacacaagcctaaggtgaaggagtgttatattatgaagaaacaaacaaatgtgagttcctcacgaacaaaacttacctcggcgtcaagtataaagctggatacttcgatgctgcacagctctttgatcatgccaaccagatcaggaaatcgagaggttgactctttcatttgccttgaaaatatttgcacagatccatcatttgatctgtgaatctgggctcgctgaccatcatacctggaagcaacattaataaatagagtgcaattatttggcaggaaagatatgcttgctaagtcaaaattcctacaaactggagatatttaagaagttgataaggggtcatgcaagaaaaggtttgaacttcttatgttaatcatagatatagatttcagattttactaagaagagtagacgacttcttatgaaattcaagctcaacaactagcatgagaatagggaagctactcatccattctttcttccttcatgatccacggttgtcataattcctcaaatataatccattagtttgcttaagaaagagtagagtcagaatagggctgcaggaa

SEQ ID NO: 20618 - DNA, 2880 bp, Oryza sativa
aactccagatgttgatagcgtatgtaagttagtcaggaataccttagtttgcgaagtgtggaaaacacatcgcgaattgagaggggacgaggaggagcaagtaacatttgattctggcggcattcttgggcaacatcacctacaaattacactacatccactgttaacactacacaggatcatttcagcataattaaccagtacatgaagctaaacaaggcagttggacctggccgtaagcctgccaaatgttgcatgcatgcatcaaactcctattttgcaaagacacagcctacaccatacagtaattttttccccacaccatggacatcaacaatgctggtacttctaacctccaaacttaccaagatcgccgaacgttttgtacatctcatgtattttagatctgctggatcctaatgcctcctccagagcagatacaaccaaactcccaccaatgtttagttcctagcttcattaacaaatatgggttattgtattgattgtgccacacgacaaggcataacagaagggtaaaccaaaatatttataataggacatgacacagttactcattagaaaataatgaaagaaagaaagccttccaaaggaaagggccagctaattaagaaaatttcaacttaagaaaaagaatcaacttatcctaattgaaatgctgctagaaaatttcagcctgttggaacatagtatcctcacagggattttgtaggacacctacatccatgttcctccaggaagtcccatatttcaaataaagctttagaaagaagcaaagagcagtaaatagggggaagggaaaagtgaatgaaataaaacacttacaatattttcatggtcaggagaaattttattagtacataaataaacagcaggtagcacatcatcaggtgataaggcaagcaaactgcacttgagaatataagatgttaagtatattccccaatcataaacatatagatgataatcaaaaactgcacgcaatgtaacttagagggttataggaaaaaccttcggaacatgttgcaaagcatggcagtagttttgatctttcccttttctctttcaaccagatcaaaagtgcgagccaaatgtaagtatggtgcaggctgtcctgctgtccagcaagctgtagaagatcacatacatggtattactcactgtcaagcaagatgctaagaaccataaggagggtaggcactaaccatgctcgatcggtagatacttttcaattggcaatgatatacagactgaatctgcttgtgccacataagattgtacacataagttcggcatctttggagtggcctcagaagagttgcgaagcaagcccgtactactagatttgtctgtcatttcattttctgtgttttgtgtgacaatattcatatcattttcaagtacattactgttgtcggttttactgtaaaatatatcaactgctacattcacatccccttttgccttctcaagcaatgaaattgcagactctctggacattccaccatcgacaatctgaagaagctggcttacactctgcttctctgactctacaacttcagtaaactggtcgtcattcctcacattgttttgatttgcgtctacagttactttatcggatgtatcgcttttagaagcagctagcatggttctagcaaaatagttcgtaattgtggactgtttgcgcccactggattctgtcaagggtttaaaggcagttgaccgccctttcttttttggtttgtccgcagaattagagcccctcttcctttcccttttagaaagatttgacttcattctcatagcgttcaaattcagcaacttactagaatgatccatgggcttctgtgaaaataaaggaacttcttgctgactacttgcatcagcagaagatccatgatcagaagagagatctatctctgacttaggcgtttcactattataaacatttgcttcctcaaagaaatctctttctttctcaaaaaaatcagttgctgcttgaacaacatcaccgcctgacttaattagcaagtccaggatcaggtcctggctgacccatgagggtaggaaatctgataattctttcttcatttccactgtaatcttctcttgaaaactatctgatcgttcaaaagccaaacttgcaggtaacaaagtagcctcctccagttcttgcacctccccttcttgctggctcaatccagtaactgcatcctcagggccaagagtagcatttcttgagcttcggtggaatgccatcaggaactcctgtttgtttgctgtctcatccaccaaaccagcaaaatgcttctgcagagcaaatgcctctttactatcgagctttccaccatcaagccccacggttggaattacccgttttgggtgcaagaacttcacgtagtcccgcaactcattatagctcgagtgctcgctataaggcacaagatggatctcaagtgaatcctttgttctaactgcaaagccttccttcttggtctcgtacatccaaccggtcggtacaaatccaacagccttgttatatcctctctccaccatgatctccttcatcttcacaaaatttggccgaaaatagggccatgtttcacctaaaatattccacccagtgacatgcacatctgttgctgcagcatcctcagtaaaaactccatcctccccaccaatccccaatagagtcaggatttccatcttcctactgtccacatggatcttacagccacagcgtcgtgcaacttccagcaaaatcctctccttgcccaccacgtaggtcgcgatcaaacacagcacgcgctctccagatgctctgctctcctccttcacccgcttgattgagttcacgacata

SEQ ID NO: 20619 - DNA, 2146 bp, Oryza sativa
ccaccccaccccaccctcccccttcttccttattccccagcccgacccgatctccaaacccctaccaccattccccgcagcgcggagccgccgccactcccccccaccctcaccccgcagaccattcggaaaacctagatccgagccttcccccttcccctcccccggcggcggcggccatggcgacccgccgggccctcacctccgtcctccgctccgcctcccgcctccgcgccgcctccccttccccgtgcccgcgccgcgcgccgctccacccccaccgccgcccgtcccccgcgggcttcctcctgaaccgcgccgccgccgcctacgcgtcgtccgccgcggcgcaggcggcccccgcgcctccccccgcgtcgggcaaggccaccgggggcggcaagatcaccgatgagttcacgggcgctggcgccgtcgggcaggtgtgccaggtgattggcgccgtcgtggacgtgcggttcgacgagggcctgcccccgatcctgaccgcgctggaggtgctcgaccacaacatccgcctcgtgctcgaggtggcgcagcatctcggggagaacatggtgcgcaccatcgccatggacgggaccgaggggctcgttcgcggccagcgcgtgctcaacaccggctctcccatcactgtaatgccctcccccctcttgttccttgtccatcactatgtttggaactgtttatttggatctagtctgacgaaatgacggaccagtagtcggtagatttgatctagatgtacggatccgtgtattgattagggcaggctcaccttacagatccgcgactatagtttgttaatgaatccatgcactgatttagtgcggattcacatatcaaatgccaaatggcgaggccacaaatggaatttgactcttacgaacataattatgcaatacattttctatgttcaaatgctgccccgtagattcatttttccagtccagtcatgccatctggagatggagaaaacatttaccgttggataatttggtaaaggtactgaatgcccttatgggccttttccttttcgtctctatggtcccagaatcacacaaatcaaggaggggccttttgtcttttgggtgtaggggctttatgaagggagggttgagagaaaatgcatgtgacccaatgtaggttcccaatctcaaaatgtgctatgggataacgggaagtccaaaaatgtttcttttaaaataaagttaaagttatcatgtgaagttgaaagttatatttgttttcctgagaaacttaggaagcttaagattaggtgatgggggttgaccctttttttttttgttttgcttacagatattgtggtttgctgattataagttctgtcactctgtgcggcttataatgtgtgtcaaactaaagatcatttgttatttacctgtgacaaaaggctatatatattgtccttgaactttgatgttgtaatgtcagtataaccatctttgatctaaaccatgttctttatatttctttgttttgtctgttttaggttcctgttggtagggccacacttgggcgtattatgaatgtcatcggtgagcctattgatgagaagggagatatcagtaagtctaaatgatatccatttgtatattgtaggtgtatgcatacatactatattttcttccttatgatctttagttattgattacctttctttgccacagcaacaaaccacttcctccctatccatcgtgaagcccctgcttttgttgagcaagctacagagcaacagattcttgttactggaattaaggtacactaatttctgtctcttctgaaatgattttcttaaaccctgtgtctttttaaatttcctagttggttaggtttcttaattgtcaagaggcgttcctttttgtaccattttgtcttacacaaggattgcacatttatcaggtcgtggatctccttgcaccctatcaaagaggtggtaaaattggtctcttcggtggtgctggggtgggcaaaactgtacttattatggagttgatcaacaatgttgcgaaggctcatggtttgctttctacagagcttgatggtcatatccaaagtcttgtgctgtgcattgccttatctggttgacctgtttattttaggt

SEQ ID NO: 20620 - DNA, 11979 bp, Oryza sativa
ttttgactgttgttatttattcccctttggaacaacatttccacagtagagtttttggctgcaagttacaatgtttaggctatcgtgattatttagatacaagaagagagcagggttttagtatttaagttggaacttggagatcatgtgacaagaactgtggttcatgagatgaactcatctgttatggtcatagaacataaattaaaacctgatgtggcataaaaatcaatttacctgctatttagctatgctaacttgacaatatttgtcaagccctgtatcatcttccttttcctaagtcaatggttacgtggctacaatatagtactccgcaaggcagcagcatattgttgcagtgtaacaagtaatagaaagtagaagtgctaacattactcttgtgaactcgtgtcaaacattaccagtacatctggccattttcttattagtgaagagatatagtttttatgacagccaaaaatgcgtctaaaaagcaatatgttttgttatccttgtttctcatggtgcattatctttgtcctcgggggtcttacaaaatcatcactccaatgtctactctttttttccaccagtcatatgatcatgactcttatcttgtgctgtctgcatttctaccgagtaatgaattttctcaacatgtcacagggtgtattggacgggaagtatgatgaccttcctgagcagtcattctacatggttggaggaatcgatgaggtcattgccaaggcagagaagattgccaaggagtccgcttcataagcgatgcaatttttaacatttggaggtcaacatgttgtgccttttatgtttgttagccaggacatgtacttacatgcaggaggcccggccctgctgatcgatgtttttcccctccacttttttccaaataaggatttgcagtgacctatttgtttggcttactgcccttcaaggaagaattgagttctctttttgtgtgatgtgcggccagtccggcagtccgtgaacttgttacttgctgaaaacactgaaatattggtctcccatacagcacctctgtgaaaactcctcatttatacttccaacatgttttgagagccgatataagccgtgtttcgattcaaaattttttcttcaaaccttctatttttccgtcacatcaaatgtttggacacatgtatggagcattaaatgttgacgaaaaaaataattgcacagtttgcatgtaaatcgcgagacaaattttttaagtctaattacatcatgatttgatgatggattaattatgcttaataaatttgtctcgcagtttacatgcggaatctataatttattttgttatttgtctacatttaatactttaaatgtgttaaaaaaaattttggcacacgaactaaacacagccatagagcatatcattgaggtttctagctgttccgaatcctcttcgagtttcgttttcagcgtaatttgtatggttctattaacctgcaatttcgaaatttcgatgttcattttttatcgcctcgccttgcatattttccatgtcgcctatatagttaacatcttcggtgaaatattgctctttttttaagaagccttcctgaaatattgcacttgtaatacgtagcgataattttcgcataaccagcttatattttgtagcttaacgtgagacagaggttaacgggcctacaaatttcgcgtttaacacctggctagcaaacaatgggccccacctgtcagtacaccgtgtcccgtctcccacgtgtcccattcgcatccgatttggcaatctcctgcgcccagaaggccggaacagctcaatcgcgaccgcccaattcaaaacgtaggcccggagatgcgatcgctgcggggagccggcccaataaaggctccctcgctaacgtctctctgccgctgtccccttctccggatcccttcgaattctgaaatccccaaattcttctccgcctctcctcccctccccctacagtatttcaaaatatttcaaatcacactacactctccgtcgtctcctctcctctcctctcctccccctctcctccgcctctctcgcatctgaggctccgatcgccggcgaccccagccagaatccgccgccccgtctcgccctccccgctcgacgagaccgcgccgagcggcgaagaggtaagcccccaactcgcctgcggttttctcgggcccgaaaccctaggcttagtcgcgatcccggcgggttactgacgcgcgctgcggcggcggcggtagcggcgcggcgggtgtctcgctgaggaggttggatttgatatctgtgactgctctgcaggcctagtgttcttcgcacctcgcgatgagtagcgcggtgaaggaccagcttcaccagatgtcgacgacatgcgattcgcttctactggagctcaatgtatgtcaccgcttgccgattcaaccatttcccggctactcgtgttggttctggcatggcagtggaggatttacggggtttttttcttctctcgttctgtttcaggtgatttgggatgaggtcggtgagcccgacacgacgagggacaggatgctgctggagctcgagcaggagtgcctggaggtctacaggcggaaggtcgaccaggcgaaccggagccgcgcccagctgcggaaggccatcgccgagggcgaggcagagctcgccggcatctgctcagccatgggcgagccgcccgtgcacgttagacaggttagtttctggctccaccaatggctgtaaaagaggtatcgcatggttggatcaaaagatggaagtcgaattcctgtggaactgtgctaattggcgatggaagaaaaggaagatttagtagagaactaaaagctacgatttctgttgtaagatgatagtactactgcttgcattgttgatctgatggaggtaaaccgtgtagaactccatcagcagttaacatttttctaactgattagtagtagcgtatcaatatattaagggaaagtgttggcagagcttacatttctttctcacttctattctcgactttatgcccagttactgctcaatcggttctatactttttactgctgttcccatgcattagcaatttaggatatatgttttgtaaaatttatctgtttccttcagtttgaatatgttcagcatgaataatatatttactgttttaccggcagcatgactaagttactgcctcaagtacgttttatttgttgaatacattctaccttcttgactaatcaattctgcttgactgtagattttagcacttcctcagccattcatgcagtaacatgcatttcatctgaaattttgcagtcaaatcagaagcttcatggcttaagagaggagttgaatgcaattgttccgtatttggaagaaatgaaaaagaaaaaggtcgaacgatggaaccagtttgttcatgtcatagagcagattaagaaaatttcgtctgaaataaggccagccgattttgttccctttaaagttccggttgatcagtctgacctgtcattaagaaagcttgatgagttgacgaaggacctggaatcccttcagaaggagaaggtcatcatcactaataccatctttatccattttcaccagtcatgttgtcatcgtgtctctatctatcaagaatccttttcatttcttgtataaaatctcactatgccatatacatgtttgtttctcacagagcgatcggctaaagcaagtgatagaacatttgaattctttgcattccttatgtgaggtgcttggcatagatttcaagcaaacagtatatgaggtgcaccctagcttggacgaagctgaaggatcaaagaacctgagcaacactacaattgagaggcttgctgctgccgcaaacagactgcgtgaaatgaagatccaaaggatgcaaaaggtcagcattgcctgtaccattgtagaggtatcaatgaacactttcagtctttaacttggttaatctgattctggcagcttcaagattttgcttctagcatgctcgagctatggaatctcatggatactccacttgaagagcagcagatgtttcagaatataacatgcaatattgctgcttcagaacaagagataactgaaccaaacaccctctccacagatttcctgaattatgtaatttatcatcactgagattgcaaaaatttatgttcgtactgtgttatatttttattaagatatgaatgttcatcgactatacttataactgtaggtcgaatctgaggtgttaaggcttgaacaactgaaagcaagtaagatgaaagatcttgttttaaaaaagaaagcagaactagaagagcatagaagacgtgctcatcttgttggcgaggaaggttatgcagaggagtttagcattgaagctattgaagctggtaagatactctcctgccttactgccttttattgtgcctgacaattgtcataccagacagagttcatatacctggtctgtgttctgttcgcaggagctattgatccctcactagtacttgaacaaattgaagctcacattgcaacagtgaaagaggaagcttttagccggaaggatattcttgagaaagttgaaagatggcaaaatgcttgtgaagaggaagcctggctggaagattacaacaaagtatggatgctagctgaagctacgtggtctttgtatatttgtttagcaaataatgtggtactgatatttcctggctttggctttttttaggatgataatcgttacaatgctgggaggggagcacatctaacactaaagagggctgaaaaggctcgtactttggtcaacaagattcctggtaatgttactcaatgatttatgtgtttggaacttccttatcaagtgcatatttaatttacaattttaactcttgccattactacaatctgatatcctgctgatttgtgctgagcaggaatggtagatgttttgagaacaaaaattgctgcatggaaaaatgaacgaggaaaggaggatttcacatatgatggtgtaggttttcttactcttacacattacattgatcgggtctatttttgtttcttgctgaagtgcctttcttgcaattcttacaggttagcctttcgtcaatgcttgatgaatatatgttcgttcgtcaggagaaagagcaagagaagaagagacaaagggtattatgctctcgcctaatattcatgtattgtctaaatcatcttttcaccttctgtgaatacgctctaatacttgaatatacctgcaggatcagaagaagctccaggatcagctcaaagcggagcaggaagctttgtacggatcaaaacccagtccatccaagcccctaagtacaaagaaggcacctaggcactctatgggtggtgcaaaccgaaggctatctcttggtggagccaccatgcaacccccgaagactgatatactgcattcaaagtctgttcgtgctgccaagaaaactgaagaaatcggcactttgtcccctagtaagccctactagctatcatgtgtcgatatatttctttttcctcttattttcacttgaacatatgtctaactcaagcaaacaatatcaggtagtagaggtttggacattgccggattgcctatcaagaagttgtctttcaatgccagtactctacgtgagacggagacacctcgtaaaccttttgctcagatcacaccaggaaacagtgtctcgtcgacgcctgtgcgccctatcaccaataacactgaggatgatgagaacaggactccgaagacatttacagcactgaatcccaagactccgatgactgttacggctccaatgcagatggcaatgactccctctctggccaacaaggtttcagcaactccagtttcccttgtttacgacaagccagaggtaacattgcaggaggacatcgactactcctttgaagaaaggcggctcgccatctatctggccaggcaaatggtttaactgttgatcaatttatgtacgtagttgaaatctgactgcattttcttgtcggtggccattgcgtatgttggtcaacaatagtcggcctttccagtagcactattctgatttactgcaattgttttaatgttttctacaaccagtaaaacagctctatacattagcttgctcactactcagtacagctttctcggcagcacgaaacatttctgttctctttgatgaatacttcttgctgtggatagggatagttactgttacatatactgtatgccctccagaatagaaacctgttagtacgggaggtattataggaaggatcgttttggaattttggtggttagcctgcacagtaagttccatcagtttctggattgtccctcgcaaagaaaaaagttttcttgattctggtaattcgtttgtcccacctgactccttgaaagtcttctggacatgggaagctatcgtatcgtatcgctcgggcgaacatgatgtgtgtgtcactctcgagtgagcaggccaccgaaggctgacttgactgactccagcaaccaacaaacgagccagtcatttttcaccccggatttttgtcccaaaacacttttccaccaccgtcaagcctcaagcaaaaccaaaacgctacgtaacgcccatcaacaccatgaaatcgagcagctagttgtgcctgctactggccccccagtgccctgtaccgcccgttcttttcagccacccgggggacagaagagtttccctctcaattccggctggagccagagccgcacgtacgacacagtacaccacccgccgcgccacgccacgccacaccgcgcgccgagggcgccgtgaacgtcaagacggacgcgagaccgcgcgcgacgacgggtgtgtggccggcgggggcacaaccgcacgacgcacgtacgctcgcccgcacgcataatgccgcccaggcgcgcgcgggcgggcggggcccggcatgtgcgcggccccggtgtcatgcgctagcccccgttgcaacttgcaagcactctcgccctgtctgtctcccccatgcgtgcggcttccgggcggtttcgtcggtgacattatctggtggctgtgtggacttgtgtactagttgtgtgtgaggagctgtattgcattgcatcacttcatcatcatcggtacaggttacggttggatcatgtcacgtttttggtgatgatgagggcctggagggaccggagtgtgggagtcaagtcctgcacccttttccggggtcaagctgcgtgtccccccttaacatcgcacactgatcagctcagctgggcttgtttcgccctggactgtcgctgtcgctgtccgcgtcctaccgtttgggtacaggtcgtacagccttgtactacctggaatttgtaggcgcgacttcgaggtgcagtgaaagcgaaaatggtgacgaatgatgaactgccgtcctggtgatgaactgcgtgctgcttactcaaagttgacgggcgcgggacaagcaagttccgggtcatttatccagcggatcaagtgtgttctataaacgacacatcatccacgtactgaggccacacactgatctattaatgcctatcatatgcgcatcaaatttagacctaaatttccaaaatctcccaaatttcgggttattttggctgctgcactttttaaatttagcaaaaaaagaacttgttcgaaaatagcaaaagttcttcattttttcaatattatttaattgaaatcttgaagtttcagtccaccccgaaatgattgtgcataccaaaaagtaaaccctgctcacgagtcatggaaattcctgcgcttcaaacaaacctacatgttgttccggtgtttcgtgccaaataaatatgtcgccctgccatctcatccgccctactacatccgtgcaccatctttccctttcaggtgtttgggattcaccgaacacacgagacggaagaacgaaccagcaggttccaccacgcgccgtgcggccggtcgagccgatcgaatcgatcgactctctcgtcagttgtcacgtcaccggcggccgcacgcatcgcaccaagcaaagcatatcataggctcatagcaccggacccgagccccccgcgcccgcggcgcgccgtggtcggtcggccccacgcccggccctacgcgcaaatccactgcgtttccacacttccaccaccaccaccaccacgacccgcccgcgaatccaccgagccggcagcccggcaccacgtacgccaccgccatctcacgcaactttcccctcagaaacacatctgacacaacacaaaatcaccaacacacccatcgcgccatcgaacgcccagttcgccgcccgctgcgccttttccctctcacgtcgtcgtactcgtacgcgtttccgccaagcaaagtccacgccacccgcaaccaccactccatcaccaccaccccacctatatatctcgcggcctcgcatcccaccgcgacaaaccagacacacactcgcgcacacacacaaacactggcacgctgatcacccagaacaaacgcaacactctcttcagctaccaagcgtagccggcgagctctacctcgttggcatggggaaccacctggcgtcgtgcacgatggcgagggtgccgggggcggcgaggggggcgaaggtggtgctgccggacggcgcggtgagggcggtgaaggtgccggcgaaggcggcggagctgatgctcgaggcgccgggccacttcctcgcggacgcgcgcgcgctgcgggcggggggaaggatcgcggcgctcggcgccgacgaggacctcgagctcgggggcctgtacgccgcgttccccatgaagcgactgggcgcgcccgccgcgccggcggacatggcgcgcctggcggccgcggtgtccagggatcaggccgccgcgcggaggtcgtccgccacggccaaggtggcggccgtcgtggtggcgccgcagcacgacgccgcgatggccgaggaggaggaagacgccgcgcggccgaggctggacgagatggccgtgggcgacgcggcggccgaggcggagatcagcgagctcaagcagcggatcagcggcggccgccggtcgaggcggccgacgttggagaccatacacgaggagagctacgctccagcagcaagatgctagtgatagtttaattcagtagccaacaagtaacacaactgggatggcaaaaggccatttctcgtaatattttttccttcttttgaacgctatgtaaaatatttctttctttggcgccacctcttttttcatgttttttttgagagaggaaaggggaatatatggaagaaaaagctcggtggaaagatgattaatgaaatgaagatatttgaacatttcacctacttatgcactctgattcaggtctgtttgcaatgaagaaaattgctcagatcattttgatcagtaggaactagtgcatattttctagaaaacgaactacagatccatctgttctataggcttaaatctgtacttatgctgatcttttaagaaagaattccaagaatctcttcttttttccttctagaatattagaatggattattggaattgtatatttctagatccaaagtatctaaatctagcgaaaaactgttgattttatagcataaaccattttctgcaaggttgcaaaagtccaaaaacaattctgtatgtcagatatttgtggatattttctgctccaatcctcacaaaccatatggtcaatatctgaatggcaagttctggtttgtttggtcaaatcgtatctcatgggctccttggcaacttgttgagctaaaaacacattaattccgtctctccaacactggccgtgattctattggcacaccaacacaagtggctactgcttcagttagagaactgaacaaaagtaggttatggagcagtataaatcattgactatcgtgagggtagaatgactcatgaagtagtagcactcacgcatgccgtgctcaagacatatgaaccgattgtctcgtcagatcaagcaaatcataatgcaaatgatgctagtatatgctaagggcttattttgaaatgtaggatttagaaaacggagaaataggtaaagcatgggattctgatagaaatttaagtgtaaaataaataattctaaaacacaacaatatatagaatcatagaaaactttctatgaggtttggacctcatgttaaaaatcctccaaaactctttatgaatttcgtaggattcaatagttttcaatcatttgttccaaagggctatataagaaaaaatcttttatgattggaattctacaaaacttttattcctatattttcattttaaataaagggggcctaaattcacataattttcttttttttcttgaaaaaccaaaccagctggttgattccagagaccgaagaaattaatggctgatcctttcaggaaaagtggagaacagtgttcttggtcgttctctggtctaccatatactcatttccaaccagttatttgaaaaggcgtcgaaattatagaagtctagtgcaaaaaaagaaagaagaaatgtcttgctccatttatttatgtgacgcccatacgttgcttccaagctttatcaaacagcgacagcaaaggcacgtacgacatctacacagcagctaatgaaattattggctctcagcctctcacactgtgtcactgctccactcattgtatttttgttagtgaatagatcaatcaaccaaccatgtaatcaaagtgggttaattacgctgttgttttcgaaacactgttccttcccccaattcttcagaggaaagcaaagctgcagagtgcagacatacacatgagagaggagagcagaaaaagaaaggttgacagattaattgacgaaatgcagtgtagctactactagcaagcaagattaaagctaatataaagatgctttggaataatgccatgacgcaacccacactatatggtggtgctgtgcttgctaggctagctttgacggtgctgatccggaccagcgaagccacaagtccctccactatcttatgcaactgcaagagagagacagagaggaagagagagaaaccgggatatcaaatcatggcctgcgaatgattaagggggtgtttaggaacttagggactaaatttagtccctctcacaaaattataagtccctatggtagggactaatgtttttgtgagagggactaaagtttagctccactttagtccctccaaccaaacaccacataattgcttggagttcacttgcatgcagaacaagttgcaatggaggatggtgagggattttatttctcaggtcagagccatctgctgattagttagcggagatctcatgcatatcaactacaggctctagctagcagcgcagtgtttacaatttcgttttgcacatttctataggcgagaccaaaatttcgggacgaaaaacgtaaataaattttgagtgactttaaacaaattcacacacacaaaatttgttgggcggaaaatggttttcaaaccctggctagcagtgacgaaggaaattttttcttccagttttaccagtttgcggtggatgtactggcttgtccatcaaccaatctggtaggttaatttgctgcgaaagctgctgtttactggttacacaaatatccagtgactttgtaaagatttcggggtgtggcttagaaatattctatgactaactgttacacacgtactaacacgcgcacacacatacatacagaggccgtagaaatgtacttcctccgtttcacaatataagttattctatcatttcctatatacatattgatgttaatgaatctagatagataatatctagattcattaacatcaatatgaatgtgggaaatgctagaatgacttatattgtgaaacggatatagtagaatacttcctccgtttcacaatataagacttta

SEQ ID NO: 20621 - DNA, 10626 bp, Oryza sativa
  unsure (1)..(10626): unsure at all n locations
tgtttcgatataggggtttgttgaaacgatagaggatggcggatcacttcgcgctgatggctggtcggctgctcacggagtcgacgctgcagtcagccgtgcaggaggctctcgctgtcgcctccgtgaagatagttcatgatcagcctgatcttcccgttcatgaagatgttcaggatggaaaggcgaagagcggtgtcatggtggaatgcagaatctgccaggaggaaggtgacgagtcctacatggagaccccttgctgctgcaagggcagcctcaaggcaaggttttctctgttcccattctgaattctctgcatcattacatgattaggtgttgccattttgataacctttatgtatggaagagcttgctgaattgattagtgatcgggatataaattatttcaatctctagcccttttttttttttggaaaacgtattttctagccctgtttaacccccaggacaaccacaagttcagagtttctgggcacaaattcagaatcattttattcccattactgagtttccaatcacacgacagttcttaccaggtcttctactgctgtaaccaacattcagttttccatattgcaattaataggacatttggggtttcatcccttatggtgaatgctgataacttgagttttccaatagatggtacttgaagttgaagattacttctacctcgaattcaccctaattcagacttttcttgaaacagaaaactcccggtttccattagatagattcttacaatttaaaatgttatcattcatttcagtgttatttctgcctgccattcttacccaacagatttccctgctgtccgaatatttacttgaattagtttgtcactgtctgcagtacgcacaccacgcatgcatccaaaggtgtgcaatgagaagggagacacagtatgcgagatatgcttacaggtgaacctttctgaaaccgtccaacaattcatcatccaaatcccaacaaattctcttcaaaaaaaaatcccaacaaattcaggaaagaagcagatgcaatgcaatctgtccttttcttctctcggaagcaattatgttattatactgaagaattttacagtccaattttaatattcgatttgttacttctgctcttttaccgcagcaattcacgccaaactacactgcccctttaaagttgtttcggcatggaaggaacctaattagtttcaggtaccagctgatgctcctactgatattataagaaggggccatccagtatctactggtatcttaaatccttttctcattgtaggagatctggagaaagatcagataatattgatactgatcgcagtcaagaacactttgcgcaaacctcagatcaagctgccggtacatccagttttgactctcagaattccagcccaaaaggtgtcttctattgccgtgtagtcgcaatatctgtaagtgttgcagagcatgaaattccatttggacattagtactctcaatcatgccatcaaatgtttctgaaaaaaataataaaaaaatgcaatcttcagctgatggccttgttggtgctccgtgatgcgatctcacttatcctcggcgatcctgaggtctactcgatagcactgttcactgtaagatactgatttctgaaactcgattagcatctttcgtgcttggataacctgattacaaatgactgacacaaatcacttgaatgagacagcttttgatgattagaacagctggaattgtcataccaatatacatcatcttggtatcagttaccacattgcttcatcgatacaggcaacatcaggtctgttaccacattgcttcatcgatacaggcaacatctgtcaaaacctcaaataattctgttttctccctttaaaaaatcagttgcatccataatttgggtttgtatgagatttcaggcagtgcacgaggcaacggattcagaacctggaggaggagagggcttgcggccgatgccacctccacagcatgttatcagcatccagtagaaatctgcaaggagataagtaatcaggctctgtaaataactgatatatgacccatcagctcagtaggagtcgttgaatgaaaagtccatagtaggatatgaaaaaaaaatcagtggttgtacagcgatttgatagtattcttgtacatacgaattttagacatagccactcaacttcaccgaccatgaagatgcgaagtgaagattaagtgggcttgatgtgtatattacatgacaagttggaaattggagtggaatgcacatgttttcctacattcatgtcaaagaataagcttttttttcagttgaagcaccgcaaaagcaaaagcaacacgatgcaattaaaagaaagttcatttacctggcattttcccatttttaaactgaacaagaatccaaataaagattttacaagggacttaaaaaagatagtgtgacatcatacaaccaaacttcataataatggaccaaccaatcagtgcctcgcgttcacaagtgaaatgcatatatcatatttgaaggaacgttagaacgtacaatatcatattcttccccccaaaacaatttgatttaaattgaaaccagggaaatctttactacagtagactacatttagggccagaattaaaggggaaaaagaaagaggaagaaaagcttgacaagattacactcgctgcctcttgctctgagtggcgccaagctgatcagcacatctcttcttcttctcatctttcagttcgccattcacctgaaccccaggcgtcttcgcgtgcttctgcgtgcgccttatccggagcatgtctgtgaaggtgcgctcgtcgccgtgccggacttcgaagccgctccacttcgcccagaactcctcgtcggcgtcgggatcgccgtagcccgacgcgtgcacgaacacggcgcgagcgcgggcggcctctcccagcgcttcctcgagcgcggcgaggcggaggcacagcgccagggcgtcgcggcgagggaggccgccggactcgatcgcctgctcgtagacccgcctcaccttcggcacgccgcggagctcggccgcccgccccgcgtaggcctcgtagacgctcgccctgtcgctcgccggcacggaccgcgccgcctcgtcgtacgacggccatggcgcgcggcggagccgaactcctcctcgtaccgggcgtggcgcaggaagaggcgcgccctgtcgtggggaggagcgcggcgggtggcctcagcgaagagttcccgcgcgcgctcggccttgctccggccgtgcctcgccacgaacctctcgaggtaggtgtcccagatgggcttgctgtgcgggtggccgaacagattggcgcccgtctcgtacgccgcgaacgagtcctcgaagtagccgcgctcctcgaggaacgaggcgtattgatcaccatctgcggcgtcgcggcgcgcgcggccatggcgccctcgtaggcggcgcgcgtcgacgccagcgcgcccaggctctcctccaggtcgacgtagaagctccacagctttgcggacttgtgaagcttcagctgggcaggctcgtcgtcgccggcggcggcggcggcggctcgcagcttcacctcggccgagggctccgcggtggcttgtcgcatcagggcgatggccttgtcaaagcgcttgtgccggagctgcatctccgcccactcgcaccacacggtggccaggtcgtcggccgatctgtggctcgcctgcgtggccttcgcgaacacctcgtcggcgctgtccaggttgccgtgcgcctcgtacatcttcacagcgtgcttggtttgcccgtcgccttcgccgggtcgacggtcctgacggcctcgacgtaggtcgccgcctgccgcgcggggtcattgtcgaagagcttcacccgccggtgccactgtgcgacgtcgtgcgggttctgacgcaggaggacgccgttgagaagctcctgccggcggtcgagcagccgctccagcctcgccaggccatgtcgccgtcgtcgccgtcggccaaccagcaaccggtcacgagcttgtcgccttcctcgtccgccgtcttctccatcttcgccgcgaccaagctctgctcgagctgcgcgtacgcttcgaacaccagcgcgaactcagctgcggtggccgccgtggtcaccccttcctcgaagacgtctctggctttgtcgtaaagccctcttcgtgcgtagcactcggcgagcagcgcgcgcagccttccggcctcgtccggaaactcgcgcatggcgccgcggagcacggcctccaccttgagcccggcgacctcgtcggcgtgcttggcgagaaggtcgcacagcttgagcaggagagcacggttgttgtcactgacgtcgcttccgccgttgaggaccgagacaatgtgatcggctgcctcctgccaccgcccagcggagacgaggagctcgacgagctcgtcggcgcgggagggttcgaactggaggaaccggcggtagatgcggatggaggtctcggcggggcaggaagggagggcggcgaggcggaggtagagcggccagacgcggtggtgctgcgtgacggggagcgcgcgcagcgcgcggtcgaaggcgcggcgtgcgcgcgtgacgaggcgctgctcgaggagcgcggcgaggtacatctcccatatccgcggcatgcggtgcagcgtggcgagcgcgcgctcgaaggcgcggttcagggcctcgttcgccgggtgctccccgcaatgcggcttggcgcgcgcggcggcggcggtgcgctcgaggaggtaggcgtgccagagcttgtagctgcccgggagggcgcgcacggcgcgctcgtagatgacggcgcgctcctggaggggcgcggcggcgcgggcagcgaggtagcggcgccacgggcggatgctgtgcgggtcccgcaggacgtcctcctcgtacggcaggtcggcctccgacggcagggccagcgccaccggcatcgcgacgacggcggcggccattacctgcgctgcgcgcgcgcgcccgcgtttcccgctgtctacggcgaggtctcaaactccctcgatccgtgagaagttgagagaaattatggggcatggttatgcttttatagcggcgggtgatgatacaaaggagatccgactccgactcgtcagcggcgtcagtgatactggcgattccgattgcgtatggccacggcagtccgacacggaattctgaaaattcatttggagtgcacacacactggaaagggtagtgaaccgaaagtccgaaactaaagctctgaaaaatataatttcaaacaaaaatacggtgccatgcttatgctgaattaataatagtacatgtatggccatgctcatgctcatgccaaaaaatttgtttataaattgtcctaataccctctatacggataactgaaacgggacaggtaaatgaaaaggaacagtcctatgctctgtagtagtctagtcctatacattgaaaactcaattcataaattaaggggatatcctcatttttgcatgttacttaaaaaaatcatcaaaaaaattgaaaaaaaaatattacgatagatcaatatgtgatatgtcatttcacaaacatgcaaatttaaatttgacttatacaagtataaacaaaaataataaatttgactataaatagaacgtgtaattcactgtcaatgtaccagaagatctggggcacattacctgcaccttcctatcaaaaccgcccaagttccaaaaagaaaaaaaaagatcaaactggattcgaatttcagcatagtttccatatttcaaacggttttcacaaggtttgctgcaaaccctgcgctcaacaccgatacaaattgcaaattgcaaggcaataacccagcaaggatgatcaaagagagataaaccctaaatatgtgagacatttcagcatgaagaacacgacacgttattagagtgctagattattatgtagctacaattattgtcaaataaaaaactccaacgacatatggtcctaggtgacaaaaactttggcagagtcgtggtttgatttgagagcaaattttgtcctgctacacagcccctaataacgaccatctggattggcatactcccaatccaattaaaacaaccaacatactaagcaattgcataataagattgcgaaaggaaagaacacccacatacttttagtccaagcattgaagattttcattcttcaggtttgtgctgtgcttgctgtcaaaactgaatggcagacaacgctgaatcaggagtacaaatgatattcactccagttcgcatcaacaaaccattaagcaaaaccatccaagtttcaaaaagagaaaaaaaaacgaacataattcagatattcagaaaagtttccgaatttcaaatggtattgtaaataccaaagcagctgctcaggagcgaatttcgatcagctgcaaacaatatcaaacaacttggcaaatcgcagcacaattatccaacaaggacaatcaaagagagatgttactctaaatattgtggccaaatccatttcagcatttcagcctgaaccacagcgctagatagataataatataacaagtagctagattagttcgtcgcacggatacagaatcaataaggaagcacataatcagtttcgcaagtgcatcaatagggtcctaggctatatagagtgacgataaattacgagttgggaagtgccttcgacccaaaacacgatacctagaaagtaataagcaaccttgcatatagaatcccaactccgcactgccttgatgaacattccctgcctccagttaactcaagcaatcctgccagacaaaaacatcatagaacttagatggtaaccctgctagatatttttcagtgatataaacaagacgaggcgtgccgtgtgtgatccacaagaaaaagcaaagtacaaattttacaattcaaatgatgtagcagtccttacagtagaattactttgtagctagtggggactcatcaaggtgttggaatgcattggtagggaaggcagccggccggaggatattggagcggacggagtactgcgacaactggattttcttggtgcacatgtcgagcccgcaaatgtgatacatttgggggtcactaggtccggtcatcggtttcggcaccaggaagtagagtgtgccatgtgcgtgcggccttaggaagggccacacgggtaccatcctgggcaacccagactgcttgtagtcccgttgcgaccatatgttccccagcctgaactccacatcctttttccagcacaggccaccttggtccagtgtccacacggccactgttgtgttggctaatgcagtggcgtcatgacagggcctgcccggcggtttgcctgccgcggcatcagtagccggagtgttgatagagacgaacttgatggagcccccggagacgcccatggtccggtacatctccatcgggccaagctcctgggatttgataatgtcatgaagcaggtactggtgggggaagctgaggtgtctgaaatccacggtgtcgccagagaagaggacattggtgtcgcagcacatgaaaccctgtgagagatcgacccagaaagtgttgcccttgaacgagaagatcatgtccgggcagaagaagcccaggggccccgttgggaggcgcatacccttcttcttctccatccactgatcggagcagcaggaactctccttctccttggtaaacagaaggagaacgtccccgtcttctctgctcttcctgctgaggtacctcgctatgagggccaggtcatagcccccagtggcgcggcgccttaggacaggccgcgggtggaaggccacgaagcggtgcggtgacaggctcgggatcatggtgagtgactcgtcgatgccgtcgtagacgaggtagtagatgtggtgggcgtggtcgaaggacgcggagaggacgacgaggttctcctccgcggcgtgcaactcgcagacgaaggtgacgcgggcattcatacttgcctgacagcggaagagcgggcggatgaggctcttctggatcttcgttggcgccgcgaccttccgcagcatctcgtcggtggcacggacggcgagggcggagaagagatcgtcgctggggccatcgttgcggcgcacgtacagcgtcaggccatccaccagctcctgaccgaactccccgcagccgtaggcctccttgcgtgcgcacttgacggccgcccacctgggatctcgctgcgtgtcgacgagatcggcatccctcacgtacctgtccagcacgacccacggattcaaatccggaaccgacgccatgagatggatcaaaaggtggtggtgaacgtacggcgtgagagggggagaggggatctgcgtggatagagacggcgcttcggcctccggagtcgagacggacgaggagaggaggggcgtggcgacccgtgaccgtgagaggaaaggagaacggcgcaaaactcaaaagaaacacacgatatgcggatatatggccttgaagaaaaaaacgacgagaagggagcgtggattcggtgcaccgtagaccaccgtcatgcaatacgtttcctttccgtcgattgcacccggatttcttttggagagggtccattctaattgggaattgctaaaagaaactatataagtttctcgattaaaaaaaatcaaatttaactataataaagaataaattgtactggcggtccttaatcttatgaggagatttcatccaggtccataaacaaacaaacccggggtcaagggcataatcttattttattgtatcaatccggntccatagaacgctttgacccgtttcgtgcatacgtggacaacaacgtgtcgcgacacgtgtgatgccacaccgcaccgccccgcaccgtgccctttttcatctaagcccctctgttcgctcgaattctccaaaccctaaccctctcttctatctgttcttctcctctggacgacgaagcagaggcgatcgccatagaaattgagggctgcgatcgctggtgagatagggattcagaggttgcggggagggtgcggagtcttgacgctggcctcccgaaggtgttgaagccggtgaggaggcatgttgtttcgactagtaggggagccgccgccggtgtacggtatgtagaatggacccaaaatttgagttttttttgggttgattgcagatgggtggtagttgtgctagttgtggtctatttctttgatgactcttagccggaagccctcccccgccgtcgactctcagccaaaagccctccctcgccactcctcttcagttgccctcccacgccctcactcgtcgtctagaggagaagaacagatagaagagagggctagggtttaaagaattcgagtgaacagaggggcttagatgaaaaagggcacggtgtgggatggtgcggtgtggcatcacacatgtcgtgacacgttgctgtccacgtatgcacgaaatgagtcaaagcgttctctggaccggattgatacaataaaacaagattagtgcccttaccctggatttgttagttcatggacctggatgaaacctcctcacaagtttaagaaccaccagtgcaatttactctataataaaattagttctaattaactacatggtacctttatataacaacttttgtataaagttgtacatatttttaaacacatatacttcatccgtttcatattataaaaccttttagcattgcctatatttatatatgtgtctagattcattaacatatatatatatataaatatggcgaatgctagaaaatcttataatatgaaacggagaaatataactattatatggtaggtatagttattagggtagaattatggccatgcctttattatagtggggacttggtaccatggagatcggaatcgtcatcagcatcggcgatgctactggcgattccgattgcgtaagagagtgcaatactagaaaagtacggcttgtaaggcctttagttggagaaaatttttaggtttagttgtcacatcggatatacaaacacacatttaaagtattaaacatattctaataacaaaacaaattacatattctgccaggaaactgcgagacgaatttattaaacctaattaatccgtcattagcaaatgtttactgtaggaccacattgttaaatcacagtgcaattaggcttaaaagattcatttcgcaatttacacgcaatatgtgtaattggtttttttagcctacatttaatactccatacatgtgtcaaaacatcatatatgacagcgtgaaaatttttgttttggaaactaaagagggcctaaatatagcttcaaacaaaaatgcggtgtaaaagctcatggtgaattaatagtacaggtaaggatgcctgattgcaaaaattgcttcggagatgtcctaatactctctttctgggtaactgaaatggaacagtcccgtgctctagtctggtatagtaacagttataaccaaggatacattgagctacaccgtacagaagggctaaactacgatgagcagagatgataataatctcagaggtgaagtacgtaacttccttctctctag

SEQ ID NO: 20622 - DNA, 15417 bp, Oryza sativa
cactagaaaattttagccaggataaaataagatatggtataagcacatgaacaaagacaaaaggttcaataagtccctagttagttctaagaaagtcaggaagaaaacttatgtgttgttatctgatagtttgattcaaatatattctattatccgccaaaaacttattttattgactttttaataattaatgaggcacaactatcattgttaaaacttttgaaattgtatgaaaagcatcccagtccaataaacaaaagaaaacatggaggtgtcaatcattcagaagacaaatccgaaacaaaattcggtgcaatgcacataaaagggaggataattaagccatatttaagaaaacattaggttgtacccctgcttggcaagtgcttgcaaaagaagcccattcccagttccaacatcgagcacagggtagttggatagttgcttctcatcaacttcacaattgatgctttcattaccagatggagtcccaccattaataatgtctatacacaatttttttgtccaaacagccatggtgtccattacatctgcaccaaacctacaaacagagaaaagctctgttcacaacccaaaagacaatcctgaatcaaccaaatttttagagaaatgccaatgaatcatcgagtaatttcctataaataaaaaccaccccatgagagtcaagttaagtaaataacaaggcaaggtgatattttgatatccaaattctgagtttgaggatcaaactctggccacaggtttgcgaagcttgtgattgatgcatataccaatacatctgtaccattaaaaaaaattgaaaagacctaaacagtcacatacataatcaaagcaggtactaaattggattttcagcagatagtgaaaaaaaacaacaaaagaatgatagtacacctccaacaactttaagttcacactaccaggttcctttacattccttgggaggtatctactttaaaaaaagaaaaagaaactctacacaaccatacttgcatttttctgagtttaagcaatgtcaattatcaacagataaaaattataactaattagtgtcaacttattgggcttttttgcatcaactgatatatcaacacttcagttttctatttacttaatctgaatgaccaaatttttcggtataaaaaatcatggtatgtagtcaccatatttctccagcatgcccatgttcctgaaaatttgcaagatcttctgaataagaagcatcccaataactttggagccccagcattgagccttcaacctcgctaggatcttgatcatctttgtcagaactgtgtcaacacagcaatattttagaatattaaaacaaaaactgctgataataacagaccaattataaaactaatcacaagaaaattcaaaggaaagaaataagtaggcaacagacacgtttcccctcttgccatttatgctgatatgcaacatgccataaacgatctagtatattgatccatccttaaatagcaaaatgtaccaattgtctacaaatataatgtatgtattctgattatacactctggagcatgatatatgctcattgcatcgatccatgtcatatctattaaagagtgcgtagataggccaccttcaaacaatgaggtggagtgatacagtattacaatctcaacctcttggtctcgtccttcaacgtgacatcagaatggactttgtcttttagaatggagtatatttcccctggaggaacttacatggttctagtggctttctagtcctatagtggacaggcagtcaggaagctatgattatacctaaaatgtattttctgccactggttagtggacacctacccataacccaacctatctagcagcaatagataaaataaagtctactttatattggattaggcaatcaaacgcgtgtaggtgatgggtccatatgatcatcaagtatcactaactaaacagaaagggtcttctaaaaaaccgtcatgtgtaatttgtcacatttttcagtgctaagggatgatttgcactgcctcgaggcttaaactccagcacaaaaacaaagtgggtgaatttgctttgcttttcaacaataaactcgcttggatgtctgaccacagtcaatttggatgcgcatctgacttccgatgccaacttgcccaataaccacgaagctggcaaagacatctctagcacttcctctttccacatatttgattacaatcctaaatgcaatcatcaagctagtcgcaaccagaaagtgcacaaagtaaaaggtacggacggcaactccacaagagcatgagactacataaccctgtagggtatctagaaaggcaaggcgtccatgagatcaagcattattatttccaacaaaattcaccagatccacattccagagccgctagcgtcacagttcgcaatcccagacagacaattcaacgcgagttaagtagggccaggagccaaaataccagcaatcggaggcaccggaggggaagttggcggaggccgcggccgccgcgagcacctcggcggcgtcggcgtaccgctggtcgtcgtcgagcgtgctcccgtactcgctccgcacggaccacgagtccgccgccaccgaccgctcgtcgtccgacgccatctcgaggccgccgccgccgccgctgccactgccagccaggacggcgcccgcgccggcgaaggcgggcggcagctgggggcggggcggggtgccctgcggcagctcgggctcctccggcgtcagccttattccagccatggtggggatcgggaggaggaggggaagggagatcgcggcgagggctgcacggacacggcggcgattgcgaagggaggaggcacaagagagagagagagagcgaggaggggcaggggcttttggaccgcggacgcgaggacgcgtttcgaatttgggtcaagtttgcggtggtgaatgggtaaaataattccgcgtttgtaggagatgggggttccctcactcgcggggttctgcacacactggagcggtgatgtgtttgcttccatccggaaaagggttcgtgccactctcgtggccgccgcaccggtgcatgagaaaaagtttggacctgccgtccgtggcacgtgtaactttgcttggatttaggtttcatcaaagtggtccacgtttttaagttaagagataataaaacacgcgaagccacttatcaccttgtcaagaagtattgaaatacagacgatgaacggaacctagcttagaccagcttggcctctcattgacggtggaagaagaatatagaaaaacatatatatgatactatatatgttcctaacaatcgggtgagtgattcaattttcaaactttacatgggtttgtcgtcacgccgtgtactttacaccagtttataaagtatgttaagttgccaacatggtactccagttacaacctactcccttcatccaaaaaaaggcaaaccctggtttccgtgtccaacgtttgaccgtccgtcttatttaaaaaattatgaaaaaaattaaaaagacaagtcacgcataaaatattaatcatgttttatcatctaacaacaatgaaaatatgaattataaaaaaatttcatataagatggacagtcaaagttagacacggaaacccagggtttgcctttttttgggacggagggagtaactcgaacacatctctaagaactgcctagcactcatataatgtaatgtagggcttatttggtctagtaccctaccaaaatattggtagtgccaaaatctatgcaagttttggtactattaatattttgatagggtagaattgtaaatggatgtgtttggatttatgtcaattgagagccaaatttcaaattgtggtaagaatattttagaattgtgccaaattaagtataagcattaccaaatatctggctttaaaccaaatcattacatttactattcaaactacctaaaaattggtatggcacattttggtatcaaaccaaaacgccatgtaatgtttatgtgctttaaaaagtgaaatgatcatgaaaaggataaatacggcactccttagcccttaggccatctccaaaatatcacaaaatcggaaaaaaaatggagaaataagcttgatccgatcatacactacaggtattgaagctaaggaaaaaaattgtggttcgtaccattgaaggccatgtagccgcacatggcccccaattctttgggcccccatcacaaagtaggcttgcagcctagcctaagttcagcggcccacgaacgaggaggcaaggagtcaagagtgcttaggcagaaggcaaatttcgcttcggcttcgttattagcttgcggaggagcgacttgcggcgtgtagtgcagcaagtggtagcgacaatgtcttgacaacaagtagcacaatgttgacgtcgccaaacgccaagatcgtgaacaccaacgttgctgagtggagcagtgaggtgccaaggccgcaaggtccaacacccagcccatggccagtggcgaacgacaagaaggcaagcagcgcaccgacccaagcggcggcgatcgaggttccgaggctgcgaggtccaaccgtagcgcctagcaagcagcggcgaacggcaaacagctccgagtggtgttctcaacttctcaattctcatctgagtcatctattcgtcctcgggaattgaaaagttggaattggtaatttactaatttgaaacaaacctaatgaaattacattatagtattttgaatgatccatagattgattattgaattaaaagtaatgtgaatgtcttctcttttgtttataaaacatgaagacattcatttactcaaatcctcagcatttcatttagaaacatgaagtatgattcggatgctcaaaaacataagaagaaccaaagattagatgaagcagctcaatcataaaagtgctgttgataaatttgttgtgagagaaactacggatttaactaggcgaatgatgtttttcagtagaatataaggtattacctttatactctcttagcattaatacttgaaaatgtatttataaatattatacagaataatacatattaaagttatatagttgaatgaaagtaatattggtttattaaattttaggacccaatttgtattttgttccggggcctcaaaatcctggagacgattaaaaaaaattgtatgtgtcagctaaatccattaaaatttgacaaaatgatcgctgttgtgcaaccacagagccaatctgttttttttaattgttgtatggtctcacatttcgtgctatataaaccgctgtatacactatagatgactttaggtgcgaacattatacactacatttactaatgagtttttttcgtttcagtgcgttgaaaatatccctacaactggagagaacgaacggggccgtgcagtcacatatataacagttacaaatagagaggttgggcaaacacaaagcacaaaacagatcattgctgcaaaacacaggtaataagcacatgcactcagcagtcagatggccacgaacctctggtttcctgttcctgcaaggctggaaaatcaggggtagaagatgaccgtgcaagtagcaacaggccgacagcatccactgcacatgcaatgtctgttaaactatatctagttttgctaaactttattcgggaggtcaagtgacccattgaacatgcaaacagatcctcacatgcctatccaggaaggaattcaagcttcaaggtgacccatgcaaactactacgcgccaaaccgccaacgcgacgtgatccgatcgggcaagtcacggctccgcgcctccggacgttatccggtcaacgaacgcctggacgccgcggtccgacgagccgccgccgcccacggcggcgcgcgcattctcccccaggatcgccgcgcgcgccgccatcgcctccgcctccggcccggccgtgacctcctcgacggacaggcggagcgcttccctcgtcagcggcgtcgccggggctcggacgcccacacggtagacgtcgacgacgaaccgcgtgttgatgcgctggtcggaccacctcggggaggccaccatcggtacgcccgcggcgagcgcctcggcggtggagttccacccgcagtgcgtcacgaagcagcccacggcggcgtgcgcgagcacgcgccgctgctcgcaccacggcaccacctttccccggtcgccgccgcaggcgtcgatgagggcgtccttggggaggagcgcgcggttgccgtcgcgcagcacccacaggaacgggcggcccgtgctggcaagcccctccgctatctccaccacctcgtcgtggccgatgtccacgaggctcccgaaagccacgaacaccactgacctccgtggctgcgcgtcgagccacgcggtgcaaccgtggacgtcgtcgtcgtcgacgccgccgtcgtctggctcgacgagtggaccgaccggtataagcggtatatgcttgcgaagccccgccacggcctcgtgctcgagctcgtcgaacgtgttcacgaaaacccatggcgccttctccgtcatgctgccgagatccccgacgagcatctggcgccacatttcctggtcggaagtgtaaatccggagtggccgtagctcgtccatgtccagctccgggagacccgggatggtcacggcgccggaggagtcagcctcgtcgccggacgggaaggccgcgagcgagtagacatagtggtagtacacggacaggacggcgcacgactggatccacagtatggcgcacgggagaccgacgtcgccggcgacgcggaccgcccaggagacaaaggcgttggccacgacgcacgccaccggccgcccggcctcggcctcccggcggatgagctcctcgagcgccgccggcccggcggcctcgacgtggcgcgccatgtccccagggatgcggagccgtgggtcgtcgggctcccacatccctccaccgcggaggcgctcgacgcggacgccgccgccgccgccgtcgccgtcgtcgaagacgcggatgccgtcgcggagagccgtagtgaaggtgacgctgaggcccttgccggcgaggcggcggccgaggcgcaggagggggttgacgtggctctggaaagggctggagacgagtagcacgtgcggctgagccttcgccggcgccggcgccatgcccgtggccgcggcggctgctgattcttggctcatttcgctggctgcgcgcggctgcatgcacggcagtagtgcagctaccaacgaagtccaaatctccgatgtatcggataatggaggggagccgcttttctccgagatgagacaagaaaaaccaacaaactctactccagctcggcgtcgctgtgtctgctcctggaactatcggtatcacggcgtgggcaccacagtatctcctcagaaacgcacgccggttctgggctttgccgagcatgggagcgcgatggccaaccgaaccggtctggttattgaataaccaccgaaattaaacaagagctgttacgagatttcgagtggagagtaaaagccatgggaagctatcaacatactactccctctctccgtttcaggttataaaactttctaggattactaatattcatatagatgttaattaatctaggcacacatatatgtctagattcattaacatatatatgaatgtgagcaatattagaaagtcttataatatgaaatggagaaagtagtattttaagtcaggaaccacgtggctggcccgactgctacaatggcgcaactactcgtgctagcacgttagcacgtaaccgtctcccacacacaaatggacacaatagttctctctttcgagggaagcgagcataggggcacagactgttatgaaaatagatgcacaacggagacatgaattttacgtggaaaatccttgcgggaaaaaccatgggcgccgaccggcaatgatcactatagaggaattggatacaaacgcaagtgatacattgggctgtcgcaccctcccggtgtggcttacaagggatatatatagcagaaatctaggagccctaataggaaactaatcctataaagtagagtcctattagataactaatctgaatatattgtgggcccgaaattcggatcacatatttaacaatctccaccttgagacgaatttcccttgtagcataaaaatcttcaatctccaaagaacctcgtgatgataaaatcaatgtgcgccaaatagtcacttggactataatccataacacccttaatccagaagaggtagaccatacttcaaactcgccattggaaacaaatcctgaatctgttggtatgacattgtggaacccagcagagacgtgaaactgatgcacaaacttcaaactcgccatgggaataaaatcctgaatctgctggcattaatttctggaatccaaacagaaacgcgaaaaattcttgtgcacaaaaacgaagtacttagatcccctgataacctcctggtatgttggatacaatggtagcaaaattcaccggacaatttgatcatcttgtgatctagacaggagcgaggctccctctcgacgacttgaatgtacttttttttaatctcaggtgcatgacttatcctccttgaaacatgcgccaacttgcatcttcacttgccataacgagattgcatctcaatccaggagtggtagatcaaacttctaactcgccttgggaataaaatcctgaatctgctggtacaatttatcaaaccctaacagaaactcgaaacactctgggtgcataaaacgaagttgatttccatgcagaacctcctggtagactggcttgtgaatatagcaatttagaacgtgaatttgtgttcccctgaacagaaccaaaacaatgcaaggcttaaatccctggtgcgaagggcgtgtgcacgtaacaattccaacgtgaaatttaattcacatgaacagaaccgagaaagctactgaaggcttggacttttctccttcctcgggatgcgtgcggaatagatcaatggcttcaaccctgctgctgctgcttctgattttctcctgcgttgcttgatggacgtgattcatatcgatgtgttggagcacctgcttaaatcgatctggtcgacaccgcttcgggtttgcttcaccggtgattcaatctcaccgaattgatttctgcgatgatgacgacgcgttgctgctgcggccgattctctgcgacgtgcgctgctgctccttccccggcggcgtcgacgacgaggccaatcagatcgatatatactccgatccgaaaaatcacaccggtggctgtgtgattagtagatcgatctccaatgctctgataccacttgttataaaaatagatgcacaacggagacacgaattttacgtgaaaaatcattgcgtgaaaaaaatatgggcgccgaccggcaatgatcactatagaggaattggatacaaacgcaggtgatacattgggctgtcgcaccctcccggtgcggcttataagggatatatatagcagaagtctaggagccataataggaaactaatcctataaaatagagtcctattagataactaatccaaatatattgtgagcccgaaattcagatcacatatttaacatagactttgccggaacggtgaatcggtgatgtaggcagagagtagtgattaggagtacattacactagtgttctagtaatctagttgagtgttgagacttgaaacgaacggagactactcgtgccgtcggtgcgcgcgaatgcactgaaattgagcacccgggcggttcacgtacactcaccactcagttcccattccaaggctctcacgtgcactcaattctcattcaaattacgtgcatgcaatctgtagggctaaataagtgtcgagctgcaccacttggtgcttggtgagggatgctctagctctaaaacatttgcccagtgagttatggggatgcttagggttgataaaaggttttttttttatgggacagggagtacttccttaacgtatagtgtggaaatgctggtgttactagaaatgtatccgtcaattgattactttattcatacttggagtacacacatgtacgaactctgccggagtccacaaatatttgccttaatttatgcaccatgcaaacgcgaaaatatgggaggattaggaagtgatatacagccacatgtacgcaaccaatcccaacttgttacgtacaaacacagcttattttgacacgcagtgatgcacagttgtacgatgtgccgctagagcgctgacaagtcagcacccatgttctacggacaaggacagcagagcatcggcgaagtcccggattcccatgtccgacgacccgccgttagccaccgccgcgctcgccttgtcgctccactcccgcgccctcagccgcatcgcctccgcctccggcccgctcatgacctcgtcgacgcaccgggagccggacaccgacgccgtacacgtccgccagtaacttggcgttggtgatctggtcggaccacgccgggtaggcgacgaccggcacgcccgccgccagcgcctccgtggtcgagttccacccgcagtgcgtcacgaagcaaccgacggcggggtgcgcgagcactcgccgctgctcgcaccacgccaccaccttgcccttgtcgccgccgccgccgctctcgccgtgcgggtgtagctcgcggctgtcgtcgcgcacgacccacaggaacggatgccccgtgctcgcgaggccctccgcgacctctgccgtttcgtcacggccgatgacgacgacgctcccgaacgccacgaacaccaccgatcgcggcggctgcgcgtccagccacgccacgcagtcgtcgtcttcgcccgcaccgctgccggtgtcgaagagggggccgactggcaccaccggcaaatgagcgcggagcgcctcgatggccacgcgctcgagctcgtcgaaggtgttgacgagaacccagggcagtgtgtcgtggaggctgacaaggtccgcgacgagcgcttggcgccagacgttcggctcgggcgcgtacaccaatgctgggagctcgccgacggtcagcgccgggaggccagggacagggaccgggagacccgtctccgctccggccggggggaatgccacgagcgagtataagtggtggtagtacagcgacaagacggcgcaggactgcgtccacagcatggcgcgcgggacgcccatgtccctggcgacgccggccgcccacggcgcgaaggcgttcgccacgatgaacgacaccgggcgcccggcgttggcctggcggcggatgagcccctcgagcgcagctggaccggcgtcctggatgtggcgctgcatgtcaccgggggcgcggtaccggggatcggcgggtgcccacaggcggccgccgcgcaggggctcgaagcgcagcctgccgcttcccacgtccatggcggcgccgtcatcgtttggctgaagcttcagcttgagtccatcgtggggtacggtggtgaaggtgacgaggaggcccctggaagagaggcgcccgcccaggcagaggagcgggttgacgtggccctgtaacggtgcggagacgaggaggaggtgcggcagcgaacgccgcgccggcgtctcttggctcattatactgaattctgagctgaaggctgatcagtacggacggagctcgatttttcaagggccaaagtgtgggtcagtgtgtgggacaggatgccaggccagggttcttttcaggtcgttgaggtctcacttggataggcccatccgcccatgcataattatggcccaagatgttgtcatggaataagtagttttgcctccttcaactcatgcccccggttgaatagcatctctcaaccgtaaaatcgggtataacctatccctcaactcccaaaaccactctatggctgtgttcgttcacatgagaaagggaagattgtaactcgttttccgcgcgcacgcttttcaaactactaaacggtgcgtttttttgcaaaaattttctatagaaaagttgctgtaaaaaaatcatattagtccatttttaaagtttaaaatagttaatacttaattaatcatgcactaatggctcacctcgttttacgtatcatcccgcaagtcttttctgcacactttatcgtcactcgtgcgcacccgggaagaatttcacaagaatttctcggtcggtcactcatcccgaaattgctcaagaccaacacaacaacacaagaatttcccgggaaattgttctaggccaagcacgcttaactttagagttcctttgagatcgacttccgaaaaagaagttgcaacttgttggtacgattattctattaatcctattaagccgtgagccgggatgtcacagtttccctttcagatcagataattctcggatagtttggatatagatacggatatggatatggtatcggggtttccgttggatacggataataattcagatatctggtgaacagtgctattcggatatccgcagaagccatgagatataccctatttctttttaactctataaccttcaatatacctttatagattttaatagtagtttatctcttaacgctagtccatactattaatattatttaaaatttaaaaaaacatttataaattatacttcactttatataaaatgagctaattatatatgttgatatgtgtttctgttagaagttgagttggttttcgtattccgagaaaaaaatgtttcagtattcgtgtctgatcatattcgattcttatttgtattcgagataatccgtatttttttccgtattggagctatccgtattcgttttcatatccggtaaaaaaaatgaaaacgaatatggtattagcattatccgtccgtatccgctccgttttcatccgtagccgccacaggcatcgccccgagccgtagcgtgggcagagtcttcaacccgacgccatcgctggcatccatggtggtgaaaaccaagccatgaggcaagttggaaccttcctccccttaccagtcccgagtctccattgtcgccagtgcccttgaaccacctcgtggtaggagtgcggacgaaggtcggcgagggcaagggggaggccgtcagcagcggcagcaaagtgatgagcgctgcggtggcagaaccaacaagagggggactggaaggtgagacagtgagagagagagagagagaggaggaggaggaggaggaggaagagggatctaggaagagaggtgaggaagaggatgggatgagatggaggccgctgataagtgggtcccacctgatgactcaaccagttaacgggtcaaagatgccacgtgggataaaaccgtctagggagtcgatttgctacggtttttggaattgggggataagttatacccggctttacggttaagggatacgattcaaccataggcatgagttgagcgaggcaaatagacttattactaaaagaaattgttagtacacaagtggatggaaattttagcctatactattcctaactactactccctccattccacacaaaaccaaccgtgataccgattcgtttcgtaaaattttgtttatagaaaaatgcccttgcgttgcaacgggtgaagattattattgtgcagtttagctaaggtgaaattcactgtaggaattcgcttggatattctttttataaaatcatgagccgcaattaggggtccgatcatctcaagttagcatgcaagttttttaaagagattttttatatgactccttctgtatttctaaaaacaaacaaaattaaaaaccgactcaaacacggatatatacttccaaaagcgaatgaacttaaaaaccgattcaaacacggatgacgtaccaaaagtatcggcaaaaacatcttcaatttttatatttttgtttatttactatttgcaggttaagttcttttgtatggttatcgctttgtcgtttgtaaagaaacaaaaatttacgagtttgttgttcggagaactgtatcaccggctgatcgtgttgtaaataaactcgtcatagttcgttgttcggagaactgtatatagtttgtgaaactgctctatgagctatgacgaatttcagcgtcctattctcatagacaacttgaaggccattaccgcagtccatcggctggcccctgctcggctgctttggaaaaaagcccaagcacacatatataagactataagagtgtcttgatgaaattgcattaatagtgtttctcttccaagaaaaggtctatttcactccctcaaccataggccggatttaatttatactccgtatttctcaactataaaagcatagttataccgcctccctcaagtgttaaaatcgaatctttcatctcccctaagggtttagggtttaggtggtttcattatatgtggcatcccgtcatcccgaacatcatcaaggctgccagttgtggctagagcttgaagaaggacttgatcacctttttcatactcactctatcccataatataaggtgtgcaaatattctaagattcaactttaaaaacatttggccaacaattattactccatccatcaacttttaataggcatatttccaaaactggaaaatttatttttataggcatatttcaatccaacaatatattctcttaatgactttctcggatttaatgcgtaaatctccattggtccacacaaaattggctatatagacatcgagaaatacaaatattaatgaatcgcttgtttaataactagtaacatgtttaaatagactagtaatcatgcacgtagcggcatgagaaattaaaaaatatatattgcctataatcaaacatattgtttccttatatggcaaatctaacatcaatttgcggaagcaattatacttccaagaggtaaataagtaagatggcgtaggaacttcatatatattacaaactttacctcatgaatcaaacttatatggtttagtaatatgaaatgttagaaatagattcactctaaagaaataagcaattgtcaagcttcgaaatccacacggcaatcggcaaccaccagacatttggtgttaactcaaaagataaagatatggtagcacaatcttgaattatcggtaagatgaaaaaaagaagagaacttctaaagtcaatcttgaatggcagcacaatccattcgcctcactcgcacttgccattccactccaactctcctctacctgcagcgagctgccattcccctccaactcccctctacctgcagcggacacaaacacacaaccataaaagaccaagaacccaaaacaaaccattccgacactaaacctagtgcttgcatataaatggagaccatactaatga

SEQ ID NO: 20623 - DNA, 4983 bp, Oryza sativa
agctttttcagcgtgtacctggttgaggttgtagggattcttgcgtccgtgtcgccgctgctcatcatcccaaaacaacagtagaaaaatcatggtgaatttggatggatgtcagtaacttcttcagaaatggaccgatgacatcgatcatgatgaacaaagagcagagtaatcagaatcacatgtttgacttggcagatcaatgttaagagttcccctagtacttagaatgttcatggccattacaggaataacatttcttgatgacagaaacttcacctgtaaatccatatccggagccctgattgagtgagtttcttgacgattggaaggacagtcatgtcagagtcgttccatgctcggttgatagaattactgccaaaatttgtcacatgaacaatgttcagacaccacaattgcatccctgatcgcaatataaagcatatttttgagcagagataagagattactggcaaagggagtatgctccagggatattggcatgcagagctttctgaacatctttacggttgaaatattcagtcgcgtacgtttgcgagcatggatcatagcccattggtatcttcaggaaatcaaacttttgcacatgaaaatattaaaaaacatacagacacacattgatcaacgatcgtacacatgatatgcagagagaaaatgactcagaaattttttgcttagctattactgaagtcaaggttgcttacacggctgctggtccgtccgatttgtgctgcaaacgacgagttgaagtttgggtatccgagctcgcatcgaggggtgtaaaggctgtagatatctatgatgctgtagagagcgttgaactgatcgattgcagcgttgcactctttagacagatcaaccaaactgaagttgcagaacttctgaaagtcactgtaaagtttgtctgagatgagtgcgtgatgccatgcagaatcaacaattcctagcaaatccgtgtcaccatccatgtaagcatttcctatctggaataagcacaaggcaaatgatgaaattaatataacaaatcaattgttagtttagttttttctttttctgaaaaaaaagaccaattgctagatgcagccatgcagggatattgcaattggggaataccatgatgcctttcaagtttatataattttctttaggtgcaatcttgttctgatccacaatcacattagcaagctggggaacgtaatgtcctgcatggtggcaagaaatgttagttaaacatacaaagattagtacacatccatgagcaaattaatcatgatttagtataatgagcaagtttggtagacctgcatagctctctccagctatgtagaactccttcattttgtgctgagggaacctctggaaccacctgatcaggaaagtgtatgaaccatatgctgcaaatcattcataaaactcatctgttatggagtacttctttttctgaatgtgagtacgccattatacagtttatgtttttataagataatagaaatggtttatatctcgggtctgtgtattactagttatgtgattgtcaaatacataccggtggaattgtctcctggtggatcttttccaaaggatgtgttggtgtaagaaaacccaacaccagcaggagagtccaggaacagcaaattggcaactgaaaaagtcaaaaagatcatcaagtaaacttcacaaaactaaagataattttactaaactatcacaaaactatagaaggtgttgtatcacaaatctacagatttagcgacacgtttatcataaaactacaaatttaaagttaagtatcacaaaactacatatttaatattaaagttatcacaaagctacagattttagagtttaaatatctagcactactatgctagagttgtaaatgttacagttttgtgattaaattgatactaaacctatagttttgtgataaatttgctaactaatcttcatttattgatactccatcttaaatctgtagttttgttaaagtatctgtagttttgttaaatttactcaaaattattatatagctagtgagccagccccatttccaccactgtgttttgatcaagaaaagattgactgtgacatgttactactggtttaactactgtaattaccttggttccatgcgtatggattcagctcaagttcagccacatctttcttcaccagaaatggccctagctcctgtgcctgtccaaacccaatggaagaacatccaggtcctacaaaatgcaatttcaaacagcacaaggttacacttttaagctaaaattctctcttcaaatttcagcagttagttttattaaccagaattcccagctgtcattaattagagatagatgcacttggtaattaacctccatttagccacaagacgagtggcttctcgtcaggcttgtcagtggcctccaagaaccagtagaagagtgccttgccaaggtactcgtcagtggtgacatagccggagtattgcctgaattccggcgagtaggccggctgcccgggcagcgacatcacgcggtcgagctcctgcaactccatggccgccgtggctgatgcatcgaggctgcccgtttcaggccgtgcagaagcagctgggccacacagtgtcagtgtaaccagtgcaagagagccaagtaggagtagcaagcaaggtgacgaagtctgaaccttcattgctgaaacctgaatgtttctttcacttgggttttgcaagacagtgtggcataggaactgtatatttataagtgtgcagccggcctgtcagagttgctatgtactccctccatccctaaatgtttgacgccgttgactttcatatttcaccgttcgtcttattcaaaaaatttaagtaattattaattctttttctatcatttgattcattgttaaatatatttttatgtatacatatagttttacatattttacaaaagtttttgaatggttaaatatatttaaaaaagtcaacagcatcaaacatttagggaatgagggagtatgttcgtgtgtggagacaagtaggtcgagccatcggccggctacaaggagtattatttccgggcttcattatcatgaggtgcattatgtagtaatacgtatttatctctcgaaacaaagaaaaatctgtatctttcagcggctttgaaggtaccggtattttacagtattaccaattcagagaaggtgagcatatgaattgaagaacaaaagtatatgctttagttctcaatcagatcctagaatgcaaagaaacctgacgaatgaaaaacgtgtttgtttctttttcaataatggaattcattccgacttttgtttcacataagttttagctaattattatagagattacaaactgaacgattacgggttataaaattacagtttaattaattgaaaaaagaaactacttgtaataaggatagagaaactgcttcgattaaaaacgattttgttgcatcattttgtgggctgagctgtatatgcctccccctttgggcctatgtttgccggctgctgcatcttggacaggcgtgcttgcaactgtccaattttttctcttcatcgtcgtcgcttcctcatgtacattttttcaccctcttacgttgtcattgtttgattgtttgatgtatgactaataagccgtgaaaatataaagaaaaaaaaactaatttataaaaaaaacttgtatatatgtgtgttcttattagcgattttaaaagcgaatgttagaaaataaattaagattaaaaacctcaaaattaactgaaattaagtttcagaacctaaattttggttgtggtcaataagccaaaagcctttgaggataattgtcccaatgagccgagttattaccctgtctgataggcttagtagttaaggatgatgagaaaaaaaaatgtagtgtccatcgttaaattatgggtggttgggaagtggaaggatgatagggagtaagtttgggtaaaatttactttgggatactttagatttgcgacatttggggtagaacaatttagttctagagtgattttatattccttgagaagatatcaggagttaacacattttttaatgtaaaatttaataccttcttggtactaggtagtatgaaaaattgcacaaaaatttttactcaaggataagttctaaattttaaaacaacttttgatttcggtaattaaggataagttctaaatattgcaaaatatgttcaaattcagccaatatttattcaaaattaaatcttgcacaattgctcaagggtaaatatgtctttttgaatgttttatcctatattagaaaagaaaaataatgattcgggtatctttaggcaagtgatcacaaaactaatctagagtgttgttgacgaccaaaattggtaagttgtgaactaggttcggcatagggatcgaggcagattcaacaaggagatggattcgaagaacagagtatgcatcggctacgaaggcatcggctgaagtatgcatcggctgagatggatcggacagaggacagccaatacagccgatagaggtgatgcagccgattccgatgacaatggtttcagagatgcttctagaatcagttggtgtgcttcatgaggattgccataatggagataaagctctcggataggcaattgtatctattaattagaatattttgtataatttccttatatatatgtttggcaaaagtctgccgcaaagatttatgatatcttagagtttgttagagataagtgtcgtgtccggcaagggcatatcttgtatctcgggtataaatagagcccgaacccatgtaatcaattaacacagttcaatacatctcggcgcatcgccaccctttttactttcgttttatttcgacgagttcttactttcgggttgaactgcatcgattcgatcttcaaccagaggtaaactgttatggcggcttgcgttctcggggtta

SEQ ID NO: 20624 - DNA, 18992 bp, Oryza sativa
tgaactaaacacagccttaataaattttgatataagagcctctcatttccagcagtttttttaatgtatcatcatacggattcgttgtttttctttccattcttattctgctcttattctacaagtattttttaatgtatcatcttacccccatcttaataaattatgcatctgttctttttttttctggtttagctcgagcttgcaaacaagcataaccgagtcggccttttagcttgttaaaataacgcacgagccagctcgatatccacctccgtgtgtaaagccttttctcatatgatgtcatgtatggtgagcgcgtggccggatatattactccttcttatggaagaatatcatgccttgtttaatttccattcggtaaaatttagtgagaacagactaatgatgagaaacgtgtgcatagatagctcaggttgtatggcatgtggtgctgtttcatgaaaacttgcgaggctaccgttgcttaatactccctccagtttatattatataagtcatttgacttttttcttagttaaacttctttaaatttgatcaagtttgtagaaaaatatagtagtattttcaacataaaacaaatacattattaaaatacattcaatgttaattaaatttaatgaaactaattcgatattttagatgttgctaaatttttctataaatttagttaaatataacagagtttgactagaaaaaagtcaaacgacttataatataagacggatggagtatttaagatagatactgaaaactagcaaatccaatacaacaaatacacaatcattaaggtccaaatgagttttttccttgaaaaattccagcactcgtttctttttgttggggtctctaaacttatgatttttagtattgattcaagaatatattgttgtttaagtaaaaaattaagatttgttatttttgtctctatcacaatgaaatatatttcttcccatgaacggtcatccgcagggggagaagactttaatttggaaaatcaaacacacacacacgagaaaatggagagcgtggtgcaactctggagtgactgggaaatccagttgctaatgctccttagcttcacactgcagatgctgctattcttcagcggaggcttgcggcggtgtagcaccaaggcactagttaggttttgcctgtggatagcatacttgggggcagatatggtagcactttatgcccttggttatctctcacgacaccaagatgtcatcattggagggagcacattgagggaggttcacccactgtctttcctttgggcaccattccttctcatgcatcttggtgggcaggatactatcactgcatttgccattgaggataacaacatgtggctgagacatttgttaaatctgggagtccaagttgctttgaccctatatgtcttttggaagtcagtggatcgccataatgtacatatcctaattcctggcatctttttatttgttgctggcatcatcaagtatggagagagaacattggcactcatgcagtgaagacaaggcaagttttccaaaagtagatggagacgaggttgactattttggccttgtttcttttgtcttgcactcagtgccaggcattcgagagctctttgcaggacataccttgcaccagatggaacaagatcatcgggaagtattgacatcaaaaattaatgaagtgcatttgcccaagttattggagatagagttgtgtctgatgtatgatgatctgtatactaaggctttggtgcttaggacaaggaggggcataattctccggtgtgtatcccaggtatctctagtagttgctttcattatctttcaagtaataagcaacacaaagagatatagtggagcagatgttacagtgacttatgtgttatttgctggaagctttcttctggaagtttgtggagtatttacctttattatgtcaccatggacctgggcatggtccaaggctaagaaatgcaatggagttaatcacatttctgaatttcttttctccagcaatagtggatggccgaaggaaaggccgttgtggtctaattccatggggcagtacaattttctgagctacttgggttgtgacgagtcaaggctgtccaagctagtgaaaaaagtaataaggaagatggggagcctagttggcgctggagaggaagcaggaacgtccttgtggatgagcaagctgttagacaccaagtatgttacggtggataaggagatcatgcaatgtgtcatacacttgatctataattatagtccatttggacctgcaagcacggatgatcaacgctggccaaatcttggtccgctgaaaaagttactactggactcatatgaattttggctatgctattgtgtactttcatatatttacagaggtgcacctatcgaactattatcttcatgaggtattggccagtgtgtgccggaaactatccaactacatgctctaccttttggtgagacaccctgaaatgttgccggtcagtggcactgctgaacctaccttgaaattctttcttggcagcattacttacagaaatgaccactacaagaatagaaccctaaaaagggcgagagatcggctgcaaattcaagaacctgcagatatgggcataaagacattagaggagatcagagacatgtgggcgatgcttctcatctactctgcaggcaagtccaaggcaaacatgcacgcagcgcagctgagcaaaggcggggagctccttacctttgcttggttgcttatggcccatctacagcttggagacgttggcgagcaatttgaattcctttttggcagcgtccctggtccggagagcaaagaggacaacagagacttgcagtggcggagccaggatctcacgacgcctagggctcaaattgaaggaactatccatgataattcatacgctgaagtacaaagtacagataaaaaaaactgcaagactgaaataacagagcaaaatcaagcctaattcaattaagagataacccattggaaaaacttgtgactatcactttttaccatctttacaacaaggttaccaaggtaagagcagcttgagaaatccaaatcaaatctcatgtcacaaataaatgtgtcaagttggtctctaaggactgtacaaacaaataatcccttctacctaatgtttacatccaattgttcaattggtgtgagcagcccggtcaacaacaatcacatttggagcaagcacaacattattttgcccattgttactatcctcagttccggctgtttctagtgttgtgatgtactcaatcagtttctgttgtttctggggttgggtggacagaaatgatattaatgtttagcacctcttcatccaggaaatcaaaccaatttctaattgactaattactatcaaatgcaaaataagaatgcagatccaagattagagaggagactcaattggattttgggaaccaagattttctggctgctgtcgtcggccgctggctcgccgtgggcccgtggctgaggaagccaggaaggtgaagtgccgccggctgttggctgctgtcgtcgggccatcgccggctcaccgcctatgtgcgcccgctgtcgcggccgatgcgcgcggacgccgctgcggagacgcaccgccgtcgctggctcgtcgccgatgcgcgccggggacgcccccttccgccgatgtgcatcggcgccgctgctgttatctggtgaggagagaggagaggagaggacgagcggcgtgatgcaacgctcctctgtgatgcgtgtgaatcgtgatgggtggcaggggaagaggagaggatgcgggagggtagggttggctttttttgggctgtgacctgtgatgggctgcctaatgggctggccaccaggggctgtgaaagtctatgtgtggggctgggccagacgagtagggctgggccatgggatttcggaaaatctggaaaatatatgggtactagtccactaaaaatttttgcacgagtaggacttgggcccaagctgccctaggcccagttccgcccctgtcagatagcatggtaaaaaaggaaacttcgtctcgtttaaggtaaactctaccgctcacccgcttgcccctcctaatgaaggtttagacgattttgattggaaatcggatgactagagttccggttgggcatagtggattctaatccctcgaggggatatcccctctgtacctttttcttctaaattcgatgcaaatagttgtgaaaaattctaaaaaaattgacaatgtagagtataatgatacctactagtccaccaaaattcatgatcaaattcgatctacacatcgagaaacaaaaaagacaaatttagatataaacagtacactactattcatacgctgaatttgtcttttttatatctcgacgtgtgagttgagtttggacttaagattttgtgaagttgtatatatgttttgtatgaatgttgtcaaatttttccagaatttttcataaccgtttagatggtttttgagcaaacgagagaacatcccctcgacagattagaatagtttccccatatctatctcctagaagtattcctacctttgatgggtttatgcaggggcggagtcaggattccaatgttcttatcatatatttttacagaagaaggacaagagacataggagtatttcttaatgctaatttaactctagatttgttttcaatatgagtaaaaaaatgatgcccgataatgctaacattatttggccattcaaagttatcaacttttaacttttaacttttatgatttagcgctaagcaaatagaatgtaccttatataatgtatggagttgactgcatatatagtccatagcctatctatgagaagggatgcaggtgtacagtcctattacccatataaaaacttgcttgctagttcattaatttctcatatagtaacacaaaatttagagaaaaattgaattagaagtgggataagcgggcgagaaaaactcgcttgccgccacttgcatccctatctgtgagcataggttctaaaatcgcatagttatttgttatatagtacaacgcaaatgtgcatatatatggttgagaattggttgtatttaaaaaattcattttcttttctacttaggcacattaatcaaacatgatgtgggtcgatccatgtatatagtagttcttttttcgttgaaagatatttgtttatttgtaatgctaattagattaggataagagagatttttgtttcctcatgcaaagatcagtactagtagttgcttatttgtactgctaatggattttattatgcttggtaggccgcacgttatacaccattagcccataattaacacatcaacaaccaagcgaacagttttactgctctagcacctgctctttggctgacgtaccttatattgcacttgtggtaaaatattgagcattagcttatattggctgggtgtcatcggggtcagatgacaacagtatatgtactgtgatccgcccctacggtttatgtaacatactgttaacgaccaaatttagtaaatcatgagccaggttcggctttagaatcgaagtggatttggcgaagagttagattcgaagaacagagtatgcatcggttgcgacgacatcggctggagtctgcatcggctgagatggatcgaacaggggacagccgatatagctgatacaaccgatacagccgattctgatgaagatggttctgagattgcttctagaatcgatctacgtacttcaaaaagattgccacgatagagataaactcttagaaaggcagttgtatctattaattaggatatgttgtgtaattttcttagagatatgtttgggcaaaaatctgccgcaaagacttatggtatcttagagtttgttagagataagagtcgtgtccggcaaggacatattttatatctcgggtataaatacgacccaaacctgtgtaatcaaacaacaatagttcaacaacactttcggcgcatcgccaccctgtcggagctcaaaactaattacttggatccaactctaattaatgtatcaatccctggatcagtagatattgatatatacaatataaccagttcttcattgcatacgttaaagtttacaacgctaggggttttacaagggtaggtacttacctaattagacataagtactaatattacacagcggaagttttagtacattctgactaggaaggtataacctttaggggttttctaaattatcgaggtcatcgtagtaatagtcataggggtcctcttgacccaaatctgaaaaaagggttatgagagcaagaatgagtattcgcaatactcagcaagttatcatgaaaatatgttatgcattggcatatagtggggttctttgcaaaaagcagtaataaacaatctggaagaattacagcaggaatttataaacatatagactttagatttctaaccagggtaccatatgagtcccggtactcaactccatgagtacggctattcgaatagtttcaaagatattctactgcagcagatgtatgctttacccgcagtccacgacttgctgataatcatcggctttagtcatggcccagtattaagtcattaacaattgtggcacctgttccatgaacttatatcctcatatgctctgaacgtattgttaacagcagcaagaagagttctggcgttcccgaggtatttaaggggaactgatcgtatgacaccacatcatctcgatcagggtttagaaatataccatatagtttatactcgagtatcacaaaccatttacctgtacatggtaatggttaaagttgcccttcgcagcaatagttgcctcctgcgcgaggacttaaataagaaccactatacagaggtgccatattgctaattaacataataactaggcctgtccccattttagaaactgcggtcgtacccgttcgttcgacataagtacctagtaaaacttatatcgatcgagacagtagtagccacccgaaaatcaaccaaatcttacgtactgtcccaatctaagtataaggtattttaaccagattgtaagcaaaataagcgatactaaattatctgggtttctatggttgaattatgcatataaaatagaatattgaatagaaggctataaataaataatttgtaaaatataggattaaatgatcaaaaggtatatggtaacttgccttgctcgatgtcctgagattgattgatattatctattgagtcagaagaatcctcaagacctagggttagacatataaaattcaaatccaaaaggaattcaaattaaatccaaaaaataagaaaaatagagaaaataaaataaaatgcaaaaatagcaaaaaggggcttaaaagatagagaatgattttagaagaatattggtccaagtttcactggaattggatctatattttaaaagatatgggcttctaaagtttgaaaatcaaataaaagtgaaatggcactgtgtgcgggtcccacttgtcagtctctctctctctctctctctcttctcttcttctacctccggccgttccccaaaagcggccagcggcgctagggttggcgattgcggcagcgatggagggaaaaaggggttgcggccaaggaggggagggagctagggttctccggcgacagcgagcggcggcggaggggttaatttgatatgtggacggcctagcggctagggcggcggtgacatagttaagccatgaaggcgattgggatggtgtgagttagacatggctcggagagggattctagagaatctacggagtgcctagatggattccgacagcttgccgacctttggcaaggcgcggagaatacttgccgacgagcacctcccttggcggcggccgtgctcacgtcggcagcccaaagggtgtcatggtagtgcaaagggattgctaaaatggaatctagggagtacgtagatggttgaaacggaagaactcaccgagatatgccgagatgaaggattgcggccggaaaaacttctcggcggcgaagaacagagcaacgcgggggcggcggtgctcagcttggtgcggcgaggtaaaactcgatgcaggacttcggttagggtctaatatactagaacatagttgatataaggtgttctaaggggtatttagggtggaggatggatggaggggtgtggagtcgatcgcgcacaaggtgttcgaccgacgggtgatggtggttgatgagatggattggtgaagcagagctttggggttgtggggctattggtgttgatgatcgatgatggacaaggaagggattggggtcctatttatagggctaggaggagcggatgagctcggacaccgtcatcgccatggatgagctcgatctttggatatggctggggcagcagaggctgtgagagggcggccaagatgaatttgagtggcgggaggccacgtttgaatacttactagcgaaggattggcttgaccgtgtgtgaattcggctggcgacgtagttgaattttttttattttaagtcatttttttgtcccaaaatgtaattttaaaattaaaatttcaaaatctataaacatgcaccaatattttgggaccctaaacagttttaattcaaaaacttttcatctacaaagttttaggtcgcgtcgagagctacaattttaatataaagtttgtcttcattaaagttcacatgaaaaaagttttgaattatttttaaatataaagtctttagaccgtcctatttgacccagatgatattcaaatccaagtttagggaccgggatgacacaactgaacaagttggaggatctaaatgagtgttctgcaagtttagggaccgggatgacacagtcgaacaagtttgaggacctgaacagtcgatttgcgagtttagggaccgggatgacacagcggtacaagtttagggaccggtgatggactttactcttttattattttacgcttgtatagttgagtttatgtatgaatttactctatccgttctgtttcatactttcatactccctccatctcataatataatatgcgcacgtattttaagattaaacctttaaaatatttaaccaattcttagtatgatatgtaatgaattttatttgttaaatattatatcattagattgagatttaaatttactttcttatggttataattttgttgctacaaaccatatagtatacgagaaattataagctaaatattagttttcgagaccgtaccaactttgaccacgctttatattataagataaaggaagtattataagttgtttgacttttttagttaatttttttaagtttaatcaaatttatgaagaaaaatatagtagtattttcaacacaaaacaaacatattatcaaaatatatattgttagaattaatggaactaatttgatattttagatattttagatgttgctaaatgtttttataaacttaacaaattttgactaaaaaatatcaaatgatttataatatgaaacgaatgaagtatttaattacggtcacgcaagctcatccacctataagttcatatctactcgagctatcgagaggtagacgaagacgaagacgccatgagcatgataacggtgaaggtgaagacgctgacggggaaggaggtggaggtgagcatcgaggcgacggagacggtggcgaggatcaaggagcaggtggaggcggcggaggggatcccgccgccgcagcagacgctgatctacggcggcaggcagctcgccgacgacatgaccgccgagatgtgcgacctcaggcatggctccgagctgcacctcgttcttgctctcaggggtggactactttgatcgatcagatcgtttgctcctgatcagctgctaatactctgtttctattgataaacttcattaattacggtcgatgttagtttgtgtgtgcgttgcaataaagtgcagctgattaatcgtcttgtagtatgcgataattttctgtgcttaatttgcattcctcttctcttttttttataaaaaaaattttggcagagctttgcttttcattcaatcagggaaatctgaaaattacagaggaaaaacgaatcggcagacctgaaaattaaaaaaaaaactgaatttgactatattgcatttgcatctaggctcaagcaagcacgaaccaccatttgactttgataatttcgaaggaaaatatccacatatttcttttcttatatatatttcagtggtccaccatttaccgttataaaggttatatagtaatagcttgtttgaaacttttgtggttgtattgataaacagcaactgtgtgctagatcagaacatggatcagcctttgtttcggtgaatttggtcaaagacgttgggctagttcttattttaccctactactttccttatcttgaattgtcacttagatttttataaacactgattccgctggttcttgaatcaactttaatattttttattgaataatttcaagtatattcccttcgtttcaatttactgggtcaaagacacatttcagttttatcctaacccaaacaattataacaacatgttactatatatgaatatattataaaagcatttctcattgtgatttaaaaacacaaaccttcctcgctgaagaaaaaaaaagaatgaaaagaatatggagcatggtagccacctggctggcttaccagcagctcgaccctgggcattgggggatgacccaaactgtcaaagattggtgggagactctagctaacacggcatgggttcgtaggagaggtttgcgcacccttatcctattcatagtttgagagatatggaagtaaaggaaccaacgaatcttgcagcacaaggaggccacgtcatctttgctcttcgtcaagataaaggaagaggcgcggacttggacgatggcaggagtaaagcatctgcgggaccttctgctcctccatgtacaatatttaaagtgtataaagtttttcacttttcttgtccctagggattgtttttccttccgctatattcaatgaaaaggcacaatctagtgttgttttccccttaaaaaaaagcatgaaccttatgacaataatctatagaaattttcaaaaactgatagtcaaagttagtaatataatacttgatttgaggcaaagctaaaatgataagtgatttacaactaagggaatttaacatttagatgtggtgtaatataagagcttcaaaattttattattataggtataattttcattgagagtgccagacatggatttttctcattttcagcatcatggtgttacttttaaaacccaaaaataaattatgacatattaagtgcacaaatattggcagaaatcagctgctactctgtttcagttgataaactataattagttactgtcgatgttaattcagtttgtttgcaataaagtgcagctgattaatcgtcttgtacgataattctgtgactccatagtcctatagatacttctctcttttaccttcaaaaaatttttgttttttctctttctctttttttttttggaaaattggtaggagctttgcttttcattgaagcagggcgaatgaaagtaaaagagagaataaaaaacaaaagctccaacttatttttgagggtgagatacaatagaataagtaattgtgtgcttatactgaattgcgatcgtgtcctggtaggagtagatcagaacaggtatccgtgtttcagtgaatttggtaaaaggcatcggaccactgcttattttaccgaatttatcctgtcgcataacttcaatttgaaattactctaataaaaatccaactctttcccgcaaataaaaaataaaaaataaaaatccaactcttcttctgtttcataaatcaacttgaactcttatcctgtttcccgcggtttttcatccggatatatatctgaccgattttaacttgctcgtcgcggcgatttccaccgatcgatcgatcgatcggtaacctgaccaagacgaagagacaatggagtccgcatggacgaatctccccggcgagatcatggagctcatcgccgacaaggccggcgacgcgctcaccggccgcgccctgtcccgctcggtctgccggtcatggcgcgccgccgtaccggagacgccgcggctcctgctccccgccgcggccgctcgcggcgccggcgacgagtacgcgctcgtgttcccgctgtcgcgcgggtggtcggtcgtcgtcgacgtccgcgacacgtcgtgccgcctctcccacctcgccaccggcgcgacggcgccgctgccgaggctcaacgccgtccgcgccaccgccgggtcccgcgtcgtgcacctcgggtacgagcactccgccgcgcccgcgcccgcgcccgctcccgctcccgctccggccaagacgacggcgaggcgccaccggaaaaacttccgggtaaagcgcaggttccacctggcgcgcggcgacgactggcaccggccgatgcggcggcgctgggaggttcggatgaacccggcgtggaagcggagcttccggctgccagacacggagcacgccggcaccggagacgaacagttctggatcaagatcaagtttctctggtattccatgttcctcgaatccgacctccaattctcacacttgctccgcttcgccgtccatgtcccggcggcggcgagcacggacggcatgctgatcatgatgtaccacccggttctggggacacgggcatggtcttctgccggcccggcgacgccgcctggacgaagctggacaaccccatcgacgacgacaagcatgtctacaacttggtcgagttcgcctacctggacgggaaggtgttcgccatggacaggggcggcaccacggcggtgatcgacgccgccacgctcgaggtgctcgacctcgtcgacgcgccgccggggacgcgcaacgtctcgaacaagctgctcggcaccgccaatggcgacgacaccgtcatgtcgctcgactacctccaccttgtcgcgctgccgagcaagctgctcgtcgtcagggtgcgcgtcaacaagtcgtcgtcggagccggagggcttcgacgtgttcgagctgggacgacaggatcatcgcgacggcgagggcaagctcgcctggcgcgaggtggccggcgacgacgtcggtggcaactacgacctgttcctcgacgaccaccacgccacctttggcggcggcggcggcggcgccggcggcgattccggtagccggatttactacgtgcacgacgggaaggaggcgtactgctacagcaagcggcatggcgagctggaatgcgtgtactcggcgccggagggtagcgaggaacagtgttccaccatgcctagctggtttgttccatagatccatagattaaagttagatgatagagatttactccagcctaacaaaaattatctcgagatatcggtacctcatggtactgtgaggtaccggtacctaaggtactttttgttgggccaaatcaaatctataaatgatataaccccgcacgttgttgtgtgtctgctatgttagaaagtctaacattatgacgatgtcaaattgatcaatactctataagatacttgtcaagattacggataaggtataccctctatccatggatatacgttgtatactgatatggtatacccgcgcgcacacgaatgttttctgtacacgttaaggcaatctatcacgtaatagaaacggagtccaccgatggaaggagtcctactcggacagaactgggtcgttaccatatcgtgtggggtctgatatctccaagttctactgggagatcgactgacccgcggtataaaagggacccccgagcaggacctaaggcatcgaatatcaccgccaacacatccaccacatcctatgaagccggaggctacaggagccaagtcaccgggtgatctagtcgaaccaactcgattacggtctcgtcggtatcatcgagttccatcattccctttgtaatctgtgatttccatcatataatcccataccaactggattagggctattacctatcaaggggtttgaaccagtataatccctgtcttttgttttgctaccccaataccctttatatccggtctacggatatccaccgtcgataatactgtatttaaacaaaatcttctttatatttatggatataaacccttaagcaaaatatcaaagaaaatattttgtatgacagggagcgagatattaaagaaaatattgaatgatgtcttgtattagaaaacaacgttgcttgattcctccaaattgtctttgcccggttatcttttgccataattactttttgtaaaaccaactagatacattgttttgtatggcaacttcaactttcataaaattaaattctcttgtagattcttacattaaaatccaaattcgcattatatataaattttcgcccaaaattacttttttactaaataaagtagtcattttcatttgacgggttatattagctggtcggtaaactgacaaggttttggtgcttatattgaactgcggattgtgtacaagatcagatttcagaacatggattgacgtgtatttcggtgaatttgatcaagcacgtcgggctagagctaattttggccaagtatctttattttgttacaaaagttcatcttgaattacttctgataaaaattctaactcttctcctgtttcctaaatcaaattgaattacttgaacctttactgtttcaaccacgacgagcttaataaattgcgcaaaatttattcacgtagattaagagtccatcacgatcagaagttgcaccgaattgtccgggtacgccacaatttcgcgaagataaataccgacggaaatgagagcaagtttaatagtatagccaactagctccaattcgattatagccaatccaatagctcattcatataataggtatatactacactattaatatctagtcccacttatcatacacacactgtgtcttagagtccgtgctacagctggctacaaatctatagtccgctgctcctctctctctctctccttatttatcagtatgtttacagatgcatgctctgagtaggccacgtaccagaacattcgggcattgccaggtccacggtacgcgtgtcacctcacatgactccgggacgtgtgccgccgcttaagcccgctctttatacgtgccctgcaacggcaatactctaccactgtacagggtagtagatctttcgtacgttggagccggccggatcgacgaccatggggtgcgacgacaagtgcgggtgcgccgtcccgtgccccggcggcacgggctgcaggtacggcgatctggtcgcccttggcatcttggcgaccgtgaaaccaactgaacaattcaagtgtatgtccacgcgtgtgggtgcaggtgcgcgtcttcggcgaggagcggcggcggcgaccacacgacgtgctcgtgcggcgaccactgcgggtgcaacccgtgcaggtgcggccgcgagtcgcagccgacggggagggagaaccggagggccggctgctcctgcggcgactcctgcacctgcgcctcctgcggctccaccaccaccaccgctcccgcggccaccacctgatccatccatccatgcgcccaaaaatgcccaacgagacgtgtttatacgtgtggttaagcgtgtgtacgtgcgccatgcttagtactcatagctgcttagctaaacagcacagctgataaataaaaagggcttgctgcttgagtcgagtcgtatcccgttgtctagttctggctagactcgcgcatcacgcatgcaacggacatggtgatacgcgagggatggagagttcggagttgggagacactgtgtactgcagtaccaggttgataagtgtgtctgtacttgtgtaaatatgttttacatgaataaaaaggttggtaactttgtcatgtttatcaatgcgaggggcaatgcttttcttcttcgggaaacaaaaatgcgaaactcagtatggaaacatacagcacagctgacattgttacctggacaaacatctctttagatgaaatgaactgaactgcaattctgcaaatatcatacacaaacgttcagagtaattcatgaacatttccacgtcaaatctgactgctccattatcgagcacagcctctgaactttaaccagaaaagaaaaaaaatggtgcagtaacctatcatgtatttgccaatagaatcccgagagcagtgcaaatgtcaaatggatagagcaaccaacagagaagacacagcactagcatggcagctgccttgtctagaacaaggccagctaccttaattaccttatgcctagaagaacaaggctgcgttatgatttatgaagataccccaaaacacaagaaggcatcaacatacatcttgaggattgggagccgacaattgcaaaggtagacccatattctatgcggtaagatccgataatttcatatgtatgtacatcaacccaaatagtcaaatacaacacggtaaaaacaaaggcatgacgaccatgtatggaaaagttaatggtgggggtgggatttctttgttttattttctcctgagactgtagacagacgctgcgtttgaacttggaggggctaaaaaacctcttgcaaaagagcggagttggtgacgttatgggcagcgtctggtacgctttagctactggccaagattgccaagaagacgctccaccgcagcattcacattcccagcagttgcgactagcgcctggatgttctctgcagtgtcgatgaaacccatctctcggagctgagtgagctgtgttgcatacagttcttccggtggaactgaatcacaagtgtaaaaccataattagtgatgatacaaaaacatggaagatgataagagttactatacaaaccattggatgtattgggtacacctatgccacctccagcaccaagcccactaagcatgcccatcaaggtgtcgaggctaacatttccccgcatgcctgcattttatttcattggcatttgccacattacttaacaaaaaggtgaaaaaaaatgcatttgtaagaatttaattatcaaatgctcagtactcgaattaccactacacatctaacattgctccacaatttagaaggcagtacagttgactacacaaacaactcgtataatctcttccataccaatatagcacagtcaagcagctaaagagctcagacacgttcaacacataacagattacttaaatggaactatggttgtgactaaaggtgtagggagctctcatccattctccaataatcaaatccacaagcagcattcagtcataggcaacccatttccatttctaagtaaggaaaaaaaatcatacatgtgtcacgcatcaccccaaagaccttgttttgcgatccccaaaacgaggcctggtcgcacggtcgcaccatatcgatcattgatatttctttttttccaatatttcaaggaaactcaaatttagaaattccaatgttatgcaccacaataaggtagtgtcaagaatcaaccactagtaataatcatcataatgtgtttatataatgtaatggccttatggaagaacggaaatcttgaagaactaatacaggtcaaccaagcagtgaaagaaaggcaactattggtgctagaacgaaccaccactaaaagataactcagtacgcactaaaacttatgtaaaacctgacatactaatccatcttaaaacaagaaaagatattagatggtgcatattaaaaaaacaatcaagagaaaatacctgtcgcattgcctccttggctaccatccctgaatcaagaaaatcaaaagataattaacaaacacataatgaaagaaatacagtataaatgagctagatgcaattcaggtactgttgaacaagagttactcactgcctaggttgattttgaccaagctgtgataataatgtctgctggaacgagagtaattgctgccaaaaaagggaaagttaatctagatagagatggagctagccacatacataaaacgtaacatatgttacctgcatagtttctggggatgtaagctggcgaataaattctggattttggaacatttccctcaactgagtgtttgattccatgaggttgcgtgtatttgggttgaagttaagcaactgtggacattttaaattacagaatgatctgaagttatgactctaacatcatcaaagttatataacaaaataagttaagaaataccgtacctggttcatggactgtggatcagacatgatattctgcatcatctgcatcataacagggttttgcaaaatctggctcaaggaagaagaatcaggagaaccaccaagcaaacttcccaaatctgctgaacccaaccctcctagaccaccagtagcaccagttcctgtattaccggcaagaccaccaaataaactgctcagatcagctgaccccaaccctccaaggcccccagtggcaccggttcttgcattgccagtagaacctgcccgtgttgctccttgcgcacctccagctgtcaatttaagtgtgaaaaaacaatagatatatagattatcaaaaacagaataaacaagaggattgagaacataccattggagctccaaggatttggaagtggattagtgtttggagcaggggttcctgttgtagactctgagccagtatttggagcatttgtagcaggatcccttggttggttagaaccctgatttccaagaagagctgagaatgggtttggagctgtgttgccttctccacccattgttgtcgcatttaggaaaggctcctggacagtttcatacatgcgtcggagcatattaaacccttcaggagaagact

SEQ ID NO: 20625 - DNA, 11436 bp, Oryza sativa
ggtttctggctgcttcaagggtctggcggagaacacttggatcattgagaacatgagcaagatctggattccggtcgatgatatcacgcatttgaggattgttcatgatcatgttacgaattaaatcagggttattcatgagattctgcatcattggcatattcattatttccctcattaagttggggttttggcttaactgctgctgcatttgatccaattctggaaatccagacccaaaaagaccagatggcctggtaccagcagttcctgtaccaccaaggccaggaaacaaacttccaagaccatctgttgggccgctgctaggagcagctgaagcttgggggctggctgcagcaggtgcagctgatccggctgggggaccagcgccacgcaccatatgaatggtatgatctgtttcaacacctacaaaatataaggagtgtgagaagcaagaaaagaattatgcttgataagtcagaaatttgaacagcgggccagcatatctacataaacaaagaatattccaatatctgatgtaatcatatacaagagaattacaaatgaaaacttctaaagaattcacatgtgagagactaaagaagatagtgcatcggatgactatgccataaatcctcatttatggcatgttaacatacttagcgtgcccaatatttcgtattacatgagaattacttggtactctctcataaaaggtaacaattttcccagaagatgtttttcttttttgttaaggcatcattgattcaacgcatttatttagcagcattccaccatgtaaggatgttcagaacatgtcttttgaaagttgttcccttcttttcctcaaatacacatgcacgattggccaattaactaactaacgttttcctcatatggaagtttttgcatagcaagaagctacaatcataatcaatgtaataattagttagcatcattacccgctgaaaataaatatgaaaccatgagctgacataaatacgagttccaaacatatatacacttcctgcgaatcagcaaacgtactaatttattgtaacagtagcactagagaaacagattcacgttttccttttttttcaaaagacagcccactgcttagttccattaaacagaacaattgtttggtttactgttctcggtcactactttgtaatcaacggaaagaaaaggatgattttacatttggtgaacccatttccatagcagggttgtgcacttaaccaaatagtgtttaagaaaaattgttcagttgcattgcaaacaacaaattgaagtatttacttgtatttgcacttcataaactacattcaataataaagtgcactctacccaaagttcacagataaaaataaagcccatatgatgcttcatgagaaaataaattaactttcactacaactccaagaagattctaagatgtcacacattgcgacataataacaacgtatgcgtaactaatacgagcagtagcttacatggccccataagtccataacatttggaactatattcgagtcgcgacaagatgagctgccttcagcttcttcatcatcttatacgctacgtaagagtaaccgttccgttcgcagtatacattatcattaatacactacacactctatactcgcatcacccaatcaccaataactgtgtagagaagcaaagcatatcgacgaatctgtttcgctagcatgcatagggcaccgaagcggattgctgcaccttgtcccccatgaacaggagccccaggtataaacaggcattgcatcgacaaagctaaatcgcggcttcttacaactacacgactgaaatcgagcacgtagcatgtcaattccaacccatcggaccaaaaatcctgacgatttgatgggttttttttctcctcctctacctaacagtcctagacactcaccatagctttctagggtttgctcgtccttgaggatccggcccttgtagatcaggcgctgctgcgccgccggcacgtcgcagctccccgccaccacctccttgaacgcccccaccgtggcgtcgaggtcggcccgcacggtgaacttggacccgttcgcgcaccggatgtgcagcgccgcggcccccgccaccgccgccgccgcagccgcagcaggagaggactcccctccgtcgccgcccccggcctcgcctcctccgccgcccatgccgtcgacctcggcccgatccgctcggagtcggcggcctcgcctccgattcggggtcgcgtcgcgtcgcgtgcgtgtgcgcgtgagctcgagttttttttttctttttcttttcttttttccttttttttctttcttcgggagaggggaagaagaggaggaaggagaaggaaggaatcggctgcgaggcggagactttttaacggcggggagcgacgcggggtggatgcgatggacggcggagatgcgttgcgtgcgggtgtgggtggagtgtgtcactgagcggtggggccacgcgtggaccgacgcggccagtgagtccaggtcggtgtgggggcggggcgcggggagaaggttctaggcgtgcgctacagggaagcttcctcctacgctttcctttttgagtaaacatgtcttcgggattttgaggggtcagaatttgtgttttatatatatatatatatatatatatatatatatatatatatgcgaatatataccagtggaatatgcactgtggctcttgagtcttgatctggatcgtccgatcgagacactgatcaaacaactctttttaacggttatgctgttgagtctacttctaatatagcttgagcaagtgttcaagtgggtggtttgttgtggttgtcatccctgtcgagagaaaccgttttgtcaaacatgatacggacaaaattgttgtactaaatatatttctttcataaaatttagtacatgtgatgtgatatttttctatctatataaaattatccgcgttgcgaaagatgctactctttttttttataacaatagtgtgtgacgatgctagtgaggctattttcatagtttactggagtgcgactttttttttatgtagctgaaatatttttcatcggtgacagggtaaagaattgtagtttgtgaacaatgttgtcccgagggaatgccccaaggcacgttggaaacgcatgacgcatgtgtaggatgggagttggtagttgcattttattaaatgccatatgtctcagcaaaactgaatatcggtgcggaatcaaaacttgcatgagaaacaacaaaacaaagtggaaatcaggcataaaacatggatcaaaacgttaaatgaactcactttatggcccaattacagatagaattgtccaagtccattgggccaaaaaattccaataacagcccaataccaaagtccccgcttgtttatgggccagcaagacctcctggactggactatagtaggccttatcctttagacttgccaatttacatgccttcggcgcttggcccagtgcctgatgtttgcgcaccagaaaaaaaaaagagtttttgtacctctctctaaaaaagttcagtttacgtttaacagaagaaaaacagagttcagtttagtttgtcaaccggaagaacacataagcaacacagagcttagcagtgttagccttagcttacattatgcagcggttcggatttttaattgttaaatatgatcggaatttagacctacaatatatttttattagttttctaataggacttcacatctttttctatcacgtgtctttccttttatctgctacacatacatactcttataagcaatatggaaaaggatgacatccctattattatttttttttgactgaaaaaggtagagagactctaccttataaccattatattaatggtagtcaaggtgttacataaagagatacaaaagaaccggataaagagggaggaagaagagaaaataaggagaaaagaagaagaagaagaagagaaaataagaaggagaaagaagaagaagaagaagaagaaatacaaaaaacaggagaaagcacggaagaactagaaaagctagctacgctagtaagtctatccatctgcatattggaggtcgacattgcggcttgatgtgatttccctataattgtagacattctctgatttgatgtgtcacatttgccgtggtaagatctcgctgctggaatgttctatggttgcgtgctttccataagttgtgtgcgcaggcgccaaagcatattggccatccaggtttgagatgtgagggcgtaactgtcaggacttgctcaacaaagtggagaatgtctgtgctttgagttgccagttcatagatgttgagtttcttccaaacctcagaagccacgtccctattattattttcctacatttgtgttcatttctttatagtgattgttgtcaaagaaaaagccttagcttacactacatgtctacattgctctgcatcttgccgtctctgtccatgccccccaactgcagagatacgtgcgacatggcgcgcgcgtccacgaagccagcgcttgacacgctgtggcgcatgcggttcgccaccgcgcccagagaaaaacgctcgcggaaaccacacgcgcgccgcggcagccgctcacgggcgggtgggagactgggagcggagctgaggcgcccggtgcggtgcggtgggcgcggtgtgaccaagttaagccaaaccaacagctccaagccaaaaaaggatcaacgatcattcaacttcaaggatgggtgtgcgccccatctgctacctaccagtaccaatacctatactatggcatgtcctccgttgattgtgtccgattcaaatgctagccaaggcaaaggatggttcgttgtttggcgtcaacgagattgtttttttgaaggctgagaagattggttgccccaagtcaaagaacaactgcagatcgtcaataacgggaaaaatgagaaatatcgttacgacgcagtggttgacggtcactcatgtatgactccattaatcgttctcattactagcacttaggccataaaaaagtcagaactgggcctggtttagttctaactttttcttcaaacttctaacttttccatcacatcaaaactttcatacaaacataaactttcaacttttccgccatatcgttttaatttcaagagtaaatttcacaaaactacagatactatgaccaaattatcacaaaactacagatttaactcggtgtatcacaaaactacacatttaagatgaagtgtcacaaaactacatatttagtaactaaattactacaaaactacaagtttagaatcaatttaatcacaaagtaattatgtttatagctccaccataacaatggtgctagggatttaaactccaaaagttgtagttttatgataagttcaatattaaatatgcatttttatgatacttaatctaaaatctatagttttgtgataaatttggtgctaaatatgtagttttgtgagacaactccttaaatatgtagttttgtgataattttggtcaaaatacctgtagttttgtgaaatttactctaatttcaattaaacttctaattttgacgtgaactaagcacacccttagagagccaaagtttagcacatggcggtgtttagttccacgccaaaattgaaagtttaaagaaattagaacgatgtgacggaaaagttgaaagtttgtgtgtgtagtaaattttgatgtgacagaaaagttaaaagtttaaaaaaaatttagaatctaaacagggtcacagtaaaattccgaaattggcttagcacatagtacactctactgacgaatgaatatgtccatgtgttctgccctggattctgaacttccttttttcccaaaacaacagcagaggacggctgccatcagagtatacaattccagtgaaaacacttttcgggccgggacagaaacacaaaccactcatttttttaattaatttttgaaaatcaaactacatattaatttttcgacaaaatttattatgattccgcgaaatctgatgattcgatatcgagattgtgaaccctaccttccattcaattgagaatgagactccaatctaacttgattataataattctattttcctccctataattaatgatgattctgatttaaattatacaaggatttcaggttggggtgctagtagtatgcccctgttaggtctggtcattttcgcattaagatacacaagtggcctacagttatgatgggcttttagcatgattgttgattgggaaccatttcaatacgtcattgtcatccataagcacaagccttgggcatcaggtgaacatgaagcaacggcctaacttgttctttaatcagctggatgccaaataaagagctataagagggggaaaatgatctgtacatacaatatttgactatccggttccttattagctcttacactgacacaaaatggaataaacagatactcctatatattctgaatcgagaagaaaacgacggaaatgcggatatcttttggaccgagcttaatcttaagccgctccaagtttggtaagcacacgcctttcacaaccatggcctactcaaactattttggtttgaatcgatgaacacatcgatctgtccattcaaagagcgagtcgtagttatccaaaccgaaacggctatcctggatggaccagaacagtgacgtgtctggatcaagaccgatgtaaacgtaatcaatacacagagatttttgtcccggcggtggcgcagcgcggcgagcccgcgactgacgccgccgccggcacggcgtggacggtggacgtgacatgactggaatgggctcgatccgcgtcatgcaaaagctaagctggtcttatcccctcaaatgatcaaatccaaatcacccaatcccatgtcacacctgcctttctttcccctcaaatccagcgccttttgaaggcataagccttccagggccaaaaagaaaaaaaaatccactaacgatgactcacccagattaattaccctgttaaaacaaatactaataatcaagatgactcagcaggattatcaaatggataaaaccacaattacgcaattaacgaacaaagctctactagtaactgccacgtggggcgagctgtctccccctgcgtcgcacgcgtgtccaggcagtcggtggcgagtcctccagcctctatatccggcacaggtcggcggccgccgtcttcctcccgagcgcgtcgcgtgtccaaaacattctgcatttctttccgcctctctctctcgacccgcggcagcacagcaccaagtattttgtgggggatacgagcggcaaaacaggtgaaagtaactgcaggccttgccgcgtggtggtgtagccgcgtaggggtggtataaagccaaagccgttgtgcgtaagcatcccctcgacttgttctcccaagtaaaccacttcagtttcagagttttcgagcgagcacgttttcgtagcttccgtcgatcgaattcatggccgttcggtgttgctcttccatggcgagcgccagcgttgtcctcttcttcgtcgtcgtcggcatgtcggcgtcgatggtctccggctgcgacaggtgcgtgcgccggtccaaggccggattccgcgactcgtcgatcgcgctgaacggtacgtacggcgagagagagggggggacagagacatccactcgcgtgcgcgctttgtgtgtttttgcttggttgattactgcaagattgtttggttgattttggttgttggattgtgcgtgcgtgcagccggttcttgcgggtacggctccctcgccgcgtccttcaacggcggccacctcgccgccgcgagcccggcgctgttcaggggcggtgtcggctgcggcgcctgcttccaggtattaacagagccacgaacaaactctccaatgcagtgatcgcgtgctgttctgcaatctaattgaggcgaatttgggttcgattaaccgggggaagtggcattattactactgcaggtgcggtgcaaggacggcaagctgtgcagcacggcgggcgccaaggtggtcgtgacggacgaggcgcggtcgacgaaccgcaccgacctcgtgctgagcgccgccgcgtacgccgccatggcccgccccggcatggccgcgcagctcagaacacgccgcgccgttgacgtcgagtacaagaggtaaaaaaaaaaaatcctcttttggtgtcggtggtgtaatcaactcaggtagtgatgatggatggaagctagtagctcatcatccgtagtatagagtaataattggagcacagcgattagccacagttagctgtagtagtacaggtcgcaacgcatttttcggctggatttatgaccgaattttgtacgatattatcgagcagggtaccgtgcgagtacgcagctggtcgcaacctgtcgatacgcgtggaggagaagagccgtccgccgcgcgagctgtccatcaggttcctctaccagggtggccaaaccgacatcgtcgccgtcgacgtcgccacggtaatcaaataaaaccaaaaccaaatcgatcgttctcactcgaattcgaggcaatttttgaaaacgagttcgaacatttttttgtgcaggtcgggtcgtcgaactggaagttcatgacgcgggactacgggccggcgtggagcacggcgcaggcgccggcggggccgctgcagttcagggtggtggtcaccggcgggtacgacgggaagtgggtgtgggccgacggcgaggtcctgccgcggcggtggacggccggacgggtgtacgacgccggcgtgcagatcgccgacgtcgcgcaggaagggtgctacccgtgcgacacgcaggagtggaagtgacacacaccgcattaacatgtacagtttttttgctttcctttcttttttctctcccctttttgggacgcattgagcagctagccatccatcgaattaagagccacagcccacaagaacaacttgccttccgttgcatttgcgttgcattgcccagtggggcttgttttgtctcgtgttgtttactcgactcggggtgcggaggtgcgcacgcggtggccggtgccggacacgatctcactgtgcgcgcatgatggggggttgggttgggttgggtttgggtttggtcgtcgacggcgagtggatttccgctttcgtgcccacgattccgagtgcgcgcatatgccgcggtcgcgaaaacgtaagtgttggcagattcggtggacgcgctttaacgcttctgtagtacggatccaccggtgtaagggccaatatagctggccaattggatgatggatgggctgcaatcttgtaatttccggggcttttcattggaccgtgggctcccaaatagggtgggacaaaattggaatgacaaaattatctgtccttatactgtgtgcagcatggccgaaatggtaaacgtcaagaagtccgacataacaacgattgttttgctgggcctgtacaagtaccattcaccgtgcagcaatagagaaaaagtctaatttggaatccctctcaccattaaaccaagcaaaacgactcatcgtgccgccttggagctccacatcctccaggctccgccctggatgtgagccgttgatgccaccatcgtggattgcggtgagagcaagattggggatcggggaggaagagatggatgggtggggggagagagagagagagagagagagagggggggggggaagaaaggggtgtaatgccacgtcagatgatgaaaactaagtcaatttaacatgtaaataaatacacgtcaacgaaaatcacctccaataccatcggagaagttattttgtacctattttaaaaattgaatgctcaagatatttgcaatagaccacaaagttaaattaaactgaaccacaaagttgacttatttgcaatagagtaggacacaacccgcagttgctacttttggaggccgattcccaatttctgtacctggccgtgtcaggcagccatttgcagttgataaggtagaaatatgtactcccaaacgcaattacgccttaccacttgctggaacgctggccacccaccagaacgtgatcgatcgactgattggcttcgaattggagccggtgcgttgacaccaatctcgcattaatggcgctgacctctctcccccggtctcggacagccactcgcgcagtcagacagtggacttttgctttcttagctacactgcagaagagatgcagcttgttcccgtgaagcggacatagactcggctcttttttaaaaaaaaaaaactcaagtttatttatagattaaagaagggagtttactggagaaaattccccaatgcatcaccgtaattgatacaacgtgcagagcgaaaccatctttttggaaggtaaagccaattaaactaatggaacaaacttcccaaataaaccgaacaacagtaatagatgtgatcgacaagagactatgatattgctctaggattgtatccacaagactctactaataacgtgcattccgcttgacagatcgatgaccctttcgactgcctctacgggaacaacacgattcgggattgatatgtgagtcgtagattttgcttcagcttcaccgaactcaacatcgattgctaaggagttcttcgttaaatatgaggagcgctaattgaaaacctgtcgataagaatcgtacaggaggttttgcactcaacctggacgaagcacttagcattggctacagttgtagattaaaattaggagaaacccctaaagcccaactagccttaatcatgagtcaattaggacagtggcgatagaactattaccttgctacaacccagcagaacctagcgaaggagatgacatgtgaccggggcatgggaggacaacccggtgcacccacaccagtcgattttgagcaccatctagtggattcgatttagagttgctgaggcactaggacatcgccaccatccaatacttgtcgcctgcgtctcagccactagccaccatggggcagcttggactccaaaagaatagagaaaacgggatataacccgagcaacaggaggacctgactacggagtaactctaacctaaacctatactatacttaaaagggaaggaggcccgacccctcctccggccacctctgccataatttttggggaaagggggggggggtaggggaggaaggatttactctgccatcatcatctttcatctatactactttaaatgatgttagtggtggtgtccgagtctgtctccacaccacaagctaatgtatatggccgtgaagtctccacatgtgaataactctagaattgttatctgatttttgcaacacatgtctttagctagtgatagagagtattacggtagtcattag

SEQ ID NO: 20626 - DNA, 761 bp, Oryza sativa
ttaaaaccactcttttaaacatcgaaatatgcaaaaccaccgtctaaaatcacctcatgtgtaatataaattagttcggcaaagtttagggggtttggtctctggttttaaagtttaaagtggtagatggtttttttttctctatataatttagtactaggcgtgttattttgttgtgctagtgtgttatctgaatgaagatatcagaaaagaacgaaagcaaagtagcagcaccgacaccatctctgcaaattccaaccgttatttttgcaagtagcactaatacatcaatcatgctgattcatcagattgacgatttttattgagaaacatgcatgtatgatgtatccttgatggctagaatggcttggatgggaggttctgattggccaggaagtacttgaacagctcaagcgcttgctctggcatgatggatggcaccatgtggccggctcctctcaccgtgacaaatgtcagtccgtcgaacaccacactccacccaccaacctgcaaacggcacacgacaatcaaaatcagccagaccaattggtctaagggtgtgtttacttcacgctaaaattggaagtttggttgaaattggaataatgtgatggaaaagttgaaagtttgtgtgtgtaggaaagttttgatgtgatggaaaagttggaagtttgaagaaaaattttgcaactaaacacgggctaagcaggcaaatattagtatatatttaggagtaatgtgcagcattggagtaatgttgt

SEQ ID NO: 20627 - DNA, 20295 bp, Oryza sativa
aaaatttggttatacccttatttaaaacgactaatattatcagtccggagggagtaactacggtgaagaaggtacaggcaacagataggattgttggaccatgaagaaaaagatgtaagagctaaagtaaacttgcgaccaggtcgaaattggtttacttttgtggctcctactccagtacttttcaagatgatatctttcttttttatgttttggatatgacatagttgtttaatttacttctctctattgaagcagtgggaaaaaatatttctgcagttaattatagttaccctgtcaattgaattgggccacgtccatagtagggtggagaagtcgccttgtttatctcctctttgaagcagtaaccccactggaactggtcagaactacccctcgttccacctgaattaatttaccacggttaatactcagatcaagatggtaaaaaaatggcggtaagattaatctgcacactgtaactaataatgtaccggtggtctcgtgggaggtctggccgaagaaggcggcgagctcccgccggatgagctcggcgctgccgccggaggtgccgaacgccgggaaggagttggcggcggcgatgaaggcgtcgtacgtgtagaagcccctcgccgggcactgcgagttgtcgcggttgggcagcatgctgttgaacaccgcctgcgtgatgaccgacccgacgccctgcgccgccgcgccactcgccgccacggcgagcagcgacgccgccgcgcacgcggcaagctgaacaaacctcgtcgtcgtcgtcgtcatgtcgccgcttcacttgcagttgcttagctaagctagcgagcattgcagcggtatatatagctaatagcttctccagtgagctatgcatgtggtcaaactacgcatacatttcgactcgtcatttggcgcgtgaaccgcgcggcgatggatcaaccgcaggattagtaagtactttagtagataaaatcggcataaaacatctctcacaaagtcatcgagtcaaagaaaaaggacgatggatcactgtcagatgagttgtcgtgcacacaagttcattgacaggagaggaaattgttgatttgtttccgtggcgttttggcgtttgcacatgagttttcaaaatttccatcgtttctgtggatggtagtaagcgaggcatggaatttccaggaaggcagaggaatgcgccgctccagccaagcaggggagatggcattggcagccggttgtggtaaattgggtcagatttgcacagcgacggtgagacccgttcgttcagacacaaccacattgaaaaccagcattagatcaaacccaattggcattatttaattgggcctccagcctactaagtactatggtcttcggccttttaattcttagtagacagagacctggtccattgcagccatttgatttcaggttttagaagatactacttcatccgtttcatatgtaaatctttctaacattgtccacgttcatatagatgttaaatgaatctaaatatatatgtgtctagatccattaacatctatatgaatatgagcaatgctagaaagttttacattataaaacgttatgaaaaacgttatgaaacggagggagtactatcatacgcacaactgcttatagtaactgtatgacttcttgtcatgcacaactctctgccgcagcttcaaatgtcattgaacaccattttcatgcatgatacagatgttaggaatataatcatctttgaaaaaactaaataaccatgtacaaacaagcaaaattttagaaaaagaacatatacaaacaagcccttacggcgtgtcgaagaacggcactgcgatgcacacaaatatgtatttatatgggattggtgtacttccaaacaaatatttctgtacataggacatgttttattaactttacctacaaggacccttgtgaacaaccagcaacactctttagccaccacaaatgaactcccatgctctaactattcaacagatgttatatacatgggtccaaaaaaatgcatctcctatcgtaggaagccaaaccaaatgggttttcctttttaatcatacgacacgccggtaaacatcttctccaaataggtcttctaactcctaaccccgcaatatactacagataagtgccagcttctggaacgccgcttctctgagcctaaacaagttcttcatggaccttttatgctcttttgcctcttctcttctagctgtgatgcctcgttcaacatgtccaaagagtcactctgcatgttcagctttgagagcgccactgcctgcatgtagaaagctgtgggccaatcgggatacacacactgtgcttgcattgcgtccctgagtgcagcatcaggttggtcacacataaggtggcacaagctccgtctggcatatacagttggcgacaccattgtccccacatcaacaaactgtgaaacaataaccatgcagatgtttcaagaaggaaaatgataacgagcagaggatgaatgaactacatgaaaagtggtaattttagaacattgaaggtctcatgataaagaagaaataatacagcctcctacctgagtgtaacaatctatggcttgcttgaaatttttgtctcgaaatgcaaaatcaccacgtttcctagcatccaacatatctctcatctgttgagtccattcttggaaagatagctgcagagaggagaacaatttagacacgtccccataggaagaaaacagtcgagagggaccagtatcccaaccagctagaaaagagtggagccacagtgctctatattgtctttacctcattagtcccttcatcatctctgtaatgtgttgaaactaggatctgatggatggcagtaaggtccatcctggaacaggcctctcccatgggagaaagtgggtgctgtggggcgggaggcgcctttggtacttcttcaggctttggaactccaagcatcacataagaaggtacctgttttgtattttacattgtaaacaaggttaaccatcaaggatatatatgtatttgaaaactactttgttgctaagaacagcattaataaattataacatttttttaaaaaataacctacatatttttgcatacataagaatactgaacacaacttgatcaataaaatcagcttgtgtagcaacgcaagaaaagcatgaactgcagagatgatggtattgtttgttctgtaaatctgtagagttttgggatttgttcaaattggctaataactggattgctaaaatgttattaattgcatactactctgtgtgctattttatttgacatcatgcactagaaaaaggtgcacaactatcatttcataaaatatggcaccataatacatgattgcccagtcttaataatgtattccagacaaatatatcatagactcatattgcaatttgcaaaatctacttatatccatatctccacgacaaacaaaaaatgagcaaaagaagtgttaatacctctgattttgtttgcaaaggctgaagaatggaaaccaactttttaatatcaggcctatctcttggttcatactgtaagcattttgaagcaagatccaccagagtagtagcctcctctatagagtactttccctctaaatttgtctccattattgcttggatgcttctgcttcttatcatgtcaagtgcctgcacatgataaatgcgtaaatttatcagactatcactgcttgtacggtttaataaatggttaattgctagctctatatttgacacataaaagaattgtactcatcgcacaaggaattccaacaattctcgacttgtatgagctaaatgcgagatccatcttaggaaatgttttcattcattgaaatagaaaaaatggatgtcggatatttgtgctaaaaagacaaggaagataattgtatagaagatttcaaacaactttgtcagtgtgaccctgcaattgatgaaagtggcctgatacacaatggaaattgaactctagaaacatacttacaagggtaggaggaatgcgctttccactgagaagatcgatgagtattgtgccaaaactgaatacaacactttctagtgtgaccctgcctggaagaacagacaagcatctcataaattctgtggttcctcctgttttattctagtcagtccttgctactttgaaaatgcaaaattttcactgaacatagtttccatcgcattcacaaaagtgccaataagttggcttgaagagcactaatttaggaatccataagctgaataactgatctactggcccttctacaagaaaatccagtttgacaacatatttattgacttccactttaaggagtttagttattgttttaacagcaataaacaaaactttgtacagcaaggagattttaaaaaatggttcccccagataagtgaagagaactgccgaaaagagaatactggataatttgttttcaagactggtaagcaagaatgtgaaaaatcaagtaccatttctcagatattctggaggtgtatatgccaggtttgtactataacttttcccatccctgctgtttttcatcaaaccaaagcatgatagacgaggatcaccattctgcgataagaaagttaattagaaacttttcttacaacatgatggcatgctgaattgttgaatgcaatcaactatgatcttacaaagcctacttgactcaatacaagtttgtctacgtgatttgccgtgctcctatagtaggaactaaatttgccgtcggttttcccaatccttccagcacttggaggtgggaaaaatcaaaataggtgacaaacttaaacacccagaccctttaatcttgttggttttcttgaatgataagacacaaaatcaaggctagctgccatagtaaatatcacttttgagacgtcaactagatatggctgctctcctgcctccttcaaaatgaaattgtaagttttctgtgaaattcatgcgtaccaaatggggcctaaggtattgctacagacactgaacaccagccataaagaaaggcacttacgtcaacaaaatggcagttggcaagagacaataatcacttgcctgatgtacaatttcaggtgctacatattgaaacgtacttgacaggttgatcgcttacctcatcaaagagtactctgtatgcatttaggtcgtgatataaaggcctttcctcattgctacaatattccaatgcttcagcaatgttgtatgcaactctgaggcgcatagcccattcaatagccttgttttcccctgcacaagtgcaaaagcacggttaagatcaaaattaacttgttttccaatgctttgcttgtttatacgcgttaaccactaacaataaatgcaatccttacttgatagtactaaggccattcccaacccaaaacactagacatgattttcataaactccacatcatcaagaaactagtactagacaccactcttccaatgcaaacactattattccatacttaaattcaatgctccttatctcacatgatgtcttggatgttgtgtagaaaccatgtctcatgcaagacatggtttccttctctttcctcatttattcacttgccacatcatttttcattctaggtggcaccttatttaatgctatggacaccatcctaatcattgggttgggaatggcctaatactcccaaagattagacgaaaaggtaaattaaatgcagactgaaccgacaaaactaatcgaaaaaactgtgtagcctgataggagctgggcacctaggtggttccatttgtcaagtattatcaacttcaataacataagctcggcacaagcttggatcagatcacacgaagcatagcaacatccattatgaccagaagggtcgaatagttggcaggatcatcaaatgggaggggaatataaagacccggagttaaattgcaggggagtggagggagggaggaaactcacagtggaagaggtgcttggcgagggtgtcgttgggcatgaactcggcgacgaggagccgctcgtcgccgtcgcagcagtagccgatgaggttggccatcctccggtgccgcagcttccccacccctctcgcctcctcctgcaaaccaaaaacccacaaaaccaaactcagtttccaaatccacgcctaaccaacccgaaccccccaatcccgcggcaacccaaaatccacgcgcaagcggctggttcgttggttggttgtttggttggatggatgcatcccccctccccgcttaccgcgaactgcttggggtcgggccatgccagcttgccgaacttcttcacggcgatggcgcggccgccgcctcccgccccctgcagccgccccctgtagacgaggttgggcgccttctcgccgctctccgacacgatgttcgccgccgcgaacccgcccgtcgcctcccggagctccgccagcgagaactccgcgaacgccggggcgggagcggcggaggcggcggaggaggaggcggccgcctggtgcgcgttgagggtgaaggacgggcggcgcgggtggtgtggctgcggcggcggcggcggggggcgggcgcggcggggcggcttctccggcgcgtgggaccccacccgcagcgaggagccgcagcaacccatacagtgtgaggagaggagtttggaaaagtattcgcttcggccgcgtcgcgtgcgggggtggtggtgggtgggctgcgtctgcgcgctcgtgcgggtcggggaggagagagaggaggaggaggcgggttttgtaacttgctctttctctctcgctctccctcctccgggttctacgggtttggtttttgtttagtttttgcgcatggggctttcaaactttttggcgaaattcaactgtgagtcatgtgaccgtgtttgtactttgtaacccctggctggctgactggactgactctatagctgtgttcttacctcttggtcccaacctcacctctctcgtcatacacacacggtgtgttcctaaactgttaaatgatgcgggttttttttcaaaaaaatttatatacaaagttatggtaaaaaaatcatattaatttattttttaatggtttaagctaatacttaattaatcatatattaatccatcaatttattttacatgcgaaagagaggggttcccaacccatccaaaatactcaacctatgtatggccacactcttctctggcacaggctagaatgtgataaaggagtagtattgtttttcgatggtttagaggagagattgacgatggtggttggcgagggcgatcaatagtcacaagttgagggttcgtcaccgagtacgagaaaaaggcatgatacaaagaatgtgcaaagatttggttagactgtgctagagttgtggcaggaggggtaggataacaaatgaagtacttctattatggttagatacgatagatgccaccgatgtcgtgaaaaggatgggttgcctaatagggtggtgttgagggggaaatatagggagagaataataggggttagtgaagaggggatgcaaggtgaagtatgtcttatccaatatggctaatgccgtctcaaaactaagtgttgtacattacattaaatttgatgattagaacccccacacatatctaatggcttttcatcccgacacatacctaatattttaaatttatcaataaatgcacttaatgcattttgtcttaccatcttaggttgctaattgtgtggctatcactttcataccatgtcaatctagctaatagctacctataatgctagataattccatttttacacaagtcatattgggtgataataattggtgttccatatatgtctttttagatactagtatgttcttatcgatgtcttgtctgtacgttggatctgaatcatgtgtttagtaagacattataagcgataatataaggtagttatataattgctcagtatagaatactcaactagggtgtgtttagtttacatcaaaattagaagtttggttgaaattggaacgatgtgacagaaaagttggaagtttgtgtatataggaaagttttgatgtgatggaaaagttgaaagtttgaagaaatattttggaactaaacacggcgtaaagcattggctacacggctatacctacatctgaattgatccattcttgtgctttattttagtactacttgactcatctgttgctttgaatgtgaagaatgaagagtgacccttgacacgttcaagtcaacaagggctagaaattgaacggatgaaccgtctgccacgcaaaagcatttcactcaactaatatgcgcgtagctctagattatgtgctgcacgcggatgtgtactttgccttgtaattatgggtgttgcatggctatgttgcaaaaaccagcaggtatcaaattaaatacaatttacacatggcagaggtagtatgcagaaatttgtagaagtcggagcaagttttgtaaaggggtagtttccacatccaattttatatccatgtaagataagatgtgatatatgcaatatatgcaatataagatgtgatatatgcaatatatcacatctacattatctttagcatactatccccaataattttattttatttgtttgtccaatctcctctttcttttatcttcttttttgaaatttgtgtgaaggttgtctcttacatgaggtagtggcggagccagaatatgcttagagtaggactaaattagtattatctacataaatttgtgtcagggttacggataaggtatatcctctacccttggatatacgtcgtatactgatatgatatgcctgcgtgtatacggatattttctgtatacgttaaggaaattcatcacgattccacagatggaaggagtcctactcagatagaactgggtcgttactgtatcatgtagggtccgatgtcttcgagttctacttggagaccaactgacctgcggtataaaagggaccccccgggaggacctaaggcatcgaatctcaccgccaacacaaccaccatagcctacgaagtcggagccttcaggagtcaaagtcgccgaggtgatcgggtcgaatcaactcgactacggtttcgtcggtatcatcgagttctgctattccctttgtaatctgtggttttcactatataatctcatatcaactggattatgggtattacctatcaaggggtctaaaccagtataatccttgttttctgtttacttgatgtcgtactacgtagatcctcataccagcgtaccccaatatcctctatatccggtctacgggtatcccccgtcgacaatttgtctcttgtctttaatttttcaaatttatagtataatttcaatttatatttgggcataggagtaggattctagccctagctgtcctactcctatatccgccccttagcatgaggggtgtcttcccttctctttcttcacttattttctccatctcataatctaatcgtatgtaatatatttagaaacaatacatccaacattattatagtacttgctctcattggttgtcgttttggatacatctctccttaattacgtcgtacgtactactaagtccattgatcgaaacaaacaaacgagcacgttgcataagcatcacctaaggtaaaaagagaacgttgtacggagcaccatcatcaagtactgtaccttccaatataaacaaggcaaacatcgttggcgacacggagcacgtcggcgacgatggtgacgacggcgaagacgacacaccgacgtgcacgcgtacaacaaatttccactgttctcatggtaaagaaattgtactaccaccaccctacctgttatgccctgaaataaattcatttgttaattgttatctaccctactcataccactaaaacctactttatcaaactcaaatataattatttattttttatctgcttttaatatattattcttttacttttataaactctgatatcgtgattggtaaaaaaaacttattttaagataaataaaggagacaaaaataatagtattgttttaagatatataaatactccgtaatagtctaatacttactccctcaatctcaatttaaatgcaatcatatttttccgtgtctaattttgattatccgtcttcactgctgccacgttgaagtcctggatgtcactactcttggttaacttcttaaaaattggttaactgctgccacgttggacctgccgccactgcgtgtggtcccgggcacaggctcgcacgcacgatgacacggcaactgcacgctcgtgcgcgcgcttcgtgtgacgcaacgtacgtacggtgcaggcgctgggacactgcacgtgggtcccacgtactgctggccccacgtgccagtgtgacagagcagacggcaatgattgactgatggacagattactgacagatttcacagtccgtgtgcacggcgtgcgacggtgaaatgacccatcgtaccgtacgtgcgcgaccctgcacatggggcccacatctcagccggatcgatctaatttacgacctgtttagatcacatgtagttttcccacatgtcagatccaacacatgcataaagtattaaatatagaaaaaattgtaattataagttgtgagatgaatcttttaagcctaattacttcatgattcgataaggtggtactacaataaacatttgcttatgacggattaattaggcttaataaattcgtctcatagtttacatgtggaatctacaatttgttttgttattagtctacgtttaatattttaaatgtgtgtctgaatatctggtgtgacacgataaaaattttcaccgctggatctaaacagtaaacacaaccttaatttagatcttagccctgtatagttcacaccaaacttcctccaaactcctaactttccatcacatcacatcacatccaaaactttcctactcatataaactcccaactttttttccaaactacttcctccgtttcacaatataaatcattctagcattttccgcattcatattgatgttaatgaatctagatagatatatatgtctagatttattaatatcaatatgaatataggaaatgatagaatgacttacattgtgaaacggagaaagtaccaacttttcccaaacttctcctcaatttcaggaactaaacatagcccttatgtggggagcgtatgatgtggacgtgccctttccagaattccaagtttggtacagtatactatggccttgtttagattcaaacttttttattcgaacttccaacttttccgacacatcgaactttcctaaacacacaaaaactttcaacttttccgtcacatcgttccaatttcttcaaacttccaattttgacgtggaactaaacaaagcctagatacaactagagtaacaaaactagagtaacaagtactccgtcccaaaaaaaaactcaatccaggtttaaacccagaattaggcttttctaaagatggagggagtatgttcacatttatagtatataagttatattttttattagatttattttttatgagacttagtgagtatataacacataagattgtttttttacttctattacatggcatacgtatatgcgcacgcgcgtataaactactacacacgtgcttcctagtacatgaagatttgacccttggtgggtcctccttggtgtcttaatggaacaaatcacatattaggtagcaatattttaggatagatgatgtatctatacaatacaagaagtcaaagaatgctaggttcttttatccaaccgcaaacatagctcaagtccttttaaatcacttgtaaataattacttgtagtattctaaccaccgggagaaaaaaaaagcaccatcctattagctagatagatcatctcttttggtggaaaagcaagataattgctgggcaccgcagatcccagatggataatggagcacgagcccaccggaacacacttgtatttaaaaaccgtccttttcttggtggttgattggtgatttggtgccaatggttggcacctgctggtagctgtggatgaactcgccgtggcggcgccacctgctgcaagattttcttaaaaaaatatttattgttttcgagttttacagatctgtaccccctaatgtcacctgccagttagagtgggtcgacgaccgtttgccaggttattgaaaaaaaaagaagataatccattatatgccactgattttgtcacacgtctataatttactattgattttgtcgtgttctataatataccatcgacttttacttaacttctacgatttaccattgccatccggttagtctccgttagtactgtacaattttgtcgaaatgatctaaatacctttgggacaaaaactttcaaaatttggataaaaattctgaaataccagattttaagtttttgaccaaattctggatgtttacaatcttatatttataatataatattttgataattttatccaaattttggatgtttttgtccaagggtattttggtcatttgcataaaattgtacagtgctaacggaggctaaccggacggtgatggtaaatcatagaagttaagcaaaagtcgatggcatattgtaacatggcaaagtcagtggcaaatcgtaggcgtgtgacaaagtcaatggcatataatgaattctctaaaaaaaaaaaaagcccctacaataccaaatatcattaggggtatagaattatagatacgcaagacaaaaaaaacattataaatattaaaaataaataaataaataaaatactctgctacaactgcagcgagcactaagcacccggcccaaatagcaggattgggctttcacaatatagcccggctcaccacactttgggcctgcttggaatggttggttggtcgggaatgagaatcttttgagatggggttgcttgggagctgggacgcgtgaaccccacaacgcgtgtgccgttgcatccaatctcccgtatatgccgttcacaagttcgagctggttgccctaataagttaaagttaaaatcgaaatttaaattttcgatgttgattttaagatattttcaatgtgtttttaaatattagcttttatgtcgctaaaaatacacatataaattaatttttatttttaaataaattgtcttgatttattagagaatatggtaactgatgaggccttgacgaggaaggcagcggcagcatcacgagatcagctcgtgtccaaccgaccgcgatgcgtctcccgcgtgtacgcatattgcggcgtcgttgatcacgtgccaatttgcccaaacgcgcgcatctaaggtgggctcaaacaccaaaaaggctagcgacatgcattatctgggcccatccatccaatctccttcatctcctgggcccaaattgccacaaagcgatcgatcatgaattattccagtggttctccctttcgcatcttttcctccccttttctatcgtccttttttttttctcctagtagcaagagattggataacaaaaaaaaagctttattaacaaaacaaaagttgcctaaaaaacacttgataattccaaggttgcaaagacgaaaaagaaatcgtccgtgatgtgcatgcgagcgatcgacgagagattctccttttggtagctactcccatcgtgctcgcgcgcgtcttaaacaaaagaagcttttccactactcacaaatatactaaatccgcacgagctgtcacacgcaagtggtctcatcacatcagtctcgtctccgattaaaatgatttgaattctgtcctaacaaatctaagactaatatcatcctcgtcgtgatctcctaagttgaaatactattaagcacgcggtgtttggatcccatccccatgtgcaaaccgcaagatccaggccaaaatcatagagcaagcaaaaggaggtgccctacccaaccaacccaattatgcatgtgccattagattagattcagtattttcagtatactctggatttcagagactttcagatggtaccagaattccagaagattggggggtccttctcttttgcattatggattgcatccgtccaaagctgacttggattgcaacattctagctagccagccagccagcaaggctgtgtttagttcacacaaaaattggaagtttggttgaaattggaacgataagacggaaaagttggaagtttatgtgtgcaggaaagttttgatgtgatggaaaagtttgaagtttgaagaattattttggaactaaacatggtgcaagtgatggatccatatgattgaatctgcatatcatctctctctctctctctctctctctccattatttgagtgaggctacattgatctcctcttcatgtgatctggtggcaatgaaatccgggccaatcacaccggcgatcgatgtgttgcagcagagactactgtaccggagttgttcaggctcaggacggccatggctgcactgaccctactctacttgtgaaaaaagtgatgtgccacttttcttgttaagtttggtgttcaaaacgagactgttgctatgttgctttcgccttttcaattagtacggtaatctctgtggcaaaaaaacggcttaattattcagttgatctgatgcatggccagatggcccggatgactgtcagttgagttgtctgaattcagaaaccaatgtgcagatgttttgtttatactaataatgtaggagtatgtgtgaatgttacagttggatgcatggtcagtgtggatgaggatttgccataggttcagaaaccggtgtcagttcacgatcagaggatcatcttgacttgagaaccaagctggcaacttggcaatgttgggcaatggaatgtgaggttaggctgaaatggctggccggataaacgtcaacttcagtacagggagaagttggcgatggcaccactggaaaagggtttggtcactgatcactccagcgtggcacattaactgcacagatacaactccatgtggtgccaaaccgaccctagccctagattgatgcccaatctactcattaaacatctccctttgcaatgaatgcgtcttgaattgttgattcagccctgtgaccttttttaattttctgaaaaggaaaaattgttgatacaacactgttcccatgcatgcaaatgagaaagagatagctgaatgcctgaattgaaatagtaacattgttcacttctcaatctagcagagtagaattaatacaatgttcacctgttcaaatagaaaaaaaaataagaggaaagaaaaaaaaaagcaagcccattgagcaatcttgcagaggcaaataggcaatgcagagagaagggatgaaagatgcgaaatttgacatgtttttgaacctaagtgggggatcatcttctttacatcacaaaagtatttacatcatgtacacacgccaaacgaaacaaaatgaaatcttttggcaactaatctcacagcctttgctcaaaaaatcagttgatctctctgaagaagatgaacacaggggatcgaatcgaagagaaatgtgtggggattgtggagtcaaaatgtgggcgtgagcaggttgagcagcgacaccctggcattgacgagcgcgcggtacacctcctcgcagccgctctcggcggcggcgacgcactcctcgaggccacgcaccctcgccatggccgccttcctctcctcctcctcctcgttgcagtagtcctcgaaggagacggtccgccgccgccggaggaggtcggtcaccagccacatggggctggccggcgtgcgggcgggggagtagggcgtcggtgtccgtggcgacggcgcggcgctcgccgcggactcggcggaggcggacgacacgccggcgaagacggcggcggccgcggccgccacggaggaggcggcggccgcgaaggcgtcggcgagggtggcctcgtcggcgtcgtctcccggggcggcacggtgggagaggtcgcgcgcggaggaggcgagccgggagacctcccgcgccgagcgccgctgcgcgcgcagcgccgcggcgaggcgcgacccgtcgcggcgccggagcgcggcgtgggtctcggcgaggagctgcctgagcgcgacgagcgactccctgaagcagccgtggaggtcggtgaggaggaggaggtcgtcgagcagctgctccgtccacggccgccgcagcgcgtcctgcgcctgcgggtggtggagcaggtcggcgagcccggcgagcaccttccccgccctgtccgccccgtccgccacccaggccggccccgtctgcgccggtgcgtccgcccacttgagcagcgccctcgccgcgtcgtgcaggccggcgacgagcgggtggaggcggacgggcaggctcgtcgacctgacgcgcgcgtaggacagcttcttgggccgcgcgcagtcgagcaggaacgacggcgccaccgccttgtgcgacgtgagcgtcgacagcgtccgccggaatcccaccgccatcgatcgagaagcttctctcttcttgtgtgttcggtgatgatgctgcggtggtggtgaggtgactggatgcggtggcgggaggtggagttttataaaggggcgggaggcggagcccgcacgggtgggtgcgtgagctgagctcgtgcagtggaacacgtttgactcttgcactgcagtggcttgctgctgcagctgagctctactagtataaaattactagtactactcccttgtattttaagtacatttatacatttaactatttatcttatttaaaaaattcagacacgcataaagtattatttgtgttttattatctaataataataataaatattaattataaaataattttaaataagacgaacggtgaaacgttggacactaaaactcacgattataagatagagggactatttctttttcttttttctatgggagagtatgcgaacgagccgctggggtttgttggcttgaggcggaagaaagatgcttgcaagaggagacagcttgttggagaagctagattcttctggggctagccggaaagggattggaggaggaaaataaaccgagcaatgtgaagttgctggctgttcatgttgagggtaggggttgtttccagcaagagagaatgttttgtgcagttcgacaacttggaaagaatacgaatacgatgatgtacatatgaatctagctcatatactgccaaaaattggtataaatgattaaatgaatagtagtagtcatcagtgaggaaatcaataaacacttatagatgccgatttgttagaaaaaaatataaaaaaattagaggattttaattatataggaaaaaaatcctaggaggctaagcaagcatccattgggagttatgatcgcagggatgcacgccattagggcatccacaatgtagtgtaaaagtagtccataagcaatagaatattccattcagccacctattaccattgtgcaactagtgcatatatagaaaatagtaaaagatatccacatgcatatggactacctatatggaataaattatactcccccgtttcgaaatatgttgacaccattgactttttagcacatgtttgaccgttcgtcttattcaaaaaatttaagcaattattaattcttttcctatcatttgattcgttgttaaatatatttttatgtaggcatataattttacatatttcacaaaatttttgaataagacgaatggtcaaacatgtgctaaaaagtcaacagtgtcaaacatttcgaaacggagggagtattatctatctctactcctctctcttgtcctaatgataccttgtatccatgtacattgtggagattgctataggaaaaaactatttatgtgggtcctatctatatagatcactttacccatatatattgatgatgcccttagtatttagtaggctagtagcacttcccattcttcctcagttgaagctcaaccgaaatttgatcttttttaaaaaaaaaatgaaaaccaaccgaaagtttggtgactcacgcataggagtacagtccccatatgaacgaacataccatcatcaagacatcaatccatccaatcatatatcgatcaatcaatcacagagcacgagccaacgcaaaaacggcaatcgatccaatgcaaagatccgatcgctccaccatcctggcactgcaccgcgagtaatgtcgcgcgcgcccatggtccatggacaacggccccctcctccctccgagcctgacgcgtggtgctctctctctgctcccacccgcccggtacgcgcgtgtaggggacaccgcgccgcgcgcccgcgcgccccaccgtccccgcctccgcccgccggcaacgcgccgcgcgcccgctcccaccaccgcgcgtacaccgatcgatcaccgatggcgatatgcatgggacgcgcgtgcatgcattgcaccgcgcggcggcagatcgagttttcaatgcgtcgcgcgtccgcgtgactgcgcccgcccgggccgctgcttcatctgttgtactagtacactgtgtgggcgcgcggttgtgatcgacttgtgagcgcgtgccggtgcgctagctgccgtacggcgatggatccatccatccatcgatccgcacccgcccgcgcgcggctcgccgatttctccacgtgtagtatgcacgtagtacgggtacatgcatgaaccggcggagtttgggcaggggcctggttgcgttcatgtgacgaacagacatgcattccgaaggatggatggatcatggattggggcggggcgggcaggtttcttcaatgcgtgcaataactgatcggtgagttatatggtcctctaggaggaatttggattgatcggtcctctgggtttgacaaggagtcaaacagctactagcagcctgctcttataatttcccttctagaagctctattggctttcatcgaggagtacggagacggtgagactgggcctgttggaagataagcccaggactaattttgagagctaagagcatctctaacagtctcttcaaatcccactctccaaatgtctatttagccaactctccatttaatttggcaagtcaaattcgtttttactccaacagcctctccattcatcatctctattctgagtgtatgatagcgggacccatatgtcagtctctatactttttttttctaattatcctgtcccggccgcgcgcgggcaggcggccggcggcggccacggctgcgcgcgggcaggcggcggccgggcgccggctcggttttttttatatataatttgtgtttcactggatgtataattttttagattttgtgattcattgcatcgcatggatctaagatgtataatttgtataatctgtgatgtatttaatttgtgtgtagtttttaggatttgtgatgttgttgatctgtgtgtaggatttgtgatgtatttgacttgtgtgtataagtaacttaatatttgggatgttgatttgggatgtgcatctcattcgattcgggagaaaatacatatattaacactagccattagcaaatcaacaacaaaataataataaaaaaaagatctcgatgaactgtcgcttcccctcaaccgggactaaagatcgatctttagtcccagttattataaccgggactaaagatagcgatctttagtcccagattcgtagtctcggttggaaaaccgggactacaaagagttctaaaccgggagtaaagagcatttctccaccagtgcggggaccgccgccgcgacgacggggtggcggcggtcgggcgcgacgacgacggggcggcggtggtcgggcacggtgacgacggggtggcggttggccgggcagcggccttcgtgcgcggcgacggcgaggcggcggcggccgcgcgcggcgatgacggggcggcggcggtcaggcgcgacgacaacgggcggtggtggttgggtgcgacgacgacggagctggagggagaagagtagcacgggtagaggagggctggagatgggatagccagcctaggaggctggccaatattggccagtgggtgggcttggatggagatgcagttagcttggagagttgaatagagagtctgttggaggagtgtttttggttcatttgccaaatttttagcttggagagctgagtagagaagctgttggagatgctctaatgtttagtcttgaattggtaggataaacactagtctagggtgacatgttcagatctatgg

SEQ ID NO: 20628 - DNA, 6919 bp, Oryza sativa
ccagccgtgcacagctgcggcagatgggatcacacgaacctgcacgaccaactcctcctccacagcctctctctctctctcatcaaatccacgagctttctctctctctctctctctctctctctctctcctcctcctcctctccttctccttcccatcgccaccagcttctccggccgtccgccatcgctgctgaccgcagcatccgcagccacagcttctccgacgccggcgacggccgtttcccccccggaggtgagcgctagctgcttcccgttgttcatccggcctctctgatctgattctgatcttgcgttctttgggttggattcctgattgctgtttgggggaaaaataaataaataaataaggggatcttttctggtttcgtagtgggggcattcttggctttgtattcgaacgcgggagctgcgaaatggcgtggttcttggtgatttggaaacggatttcatttcatttcttttcttttctttcctgttattgatgcgattgatgtttctatttctcgctcgatttcgtctcggtacggctcgaatgatgaccaatcgaaaaagtactgtttctgtgttcccaaaaaaaaagaaattataacgatttttttgctgatcgttcttctgtttacagggccaatgaaaaagctgcatcttctttttctttttttctcctctttaaaatggtttcgtttccgagcagaatacgaatacggaagagtgtgaatcatgagcggaggcgtcgagccggagaccccgccgggtagcagcagcggcggaagcacgccggtgggcggcaagccgccgcgccaccacctcacgtccatccgccactgcgccagcagcgctcgcatcgccgccgcaaccgcagaattcgtaatcatcctcgctacctacctatcgccctgtccagagaatttggctcccaatattgtgtttctgacattttctttcgttgctttgtttgcaggacctgggtgcggggacgctgagcttgatctcgcccacggacattcgccctggcttcctgccggtgttccgttccgggagctgcgccgatatcggtaccaaatcgtacatggaggacgagcatgtgtgcgtcgataacctcatcgagcacctgggagtgcgtacacctgtgatccctgcaccgggtgccttctacggggtgagttggtttgcatttgcatcaaagttttggaggcttgctgttcagtattcagcaatatatgtgctcattatggaccaatgatttattccgttgccagtggtaatattgttgccatgatagtttcttggtgtgctcatttggtcgtacacatcatggtgcaaataattgcatattagtgtggttgatgatgatgtactcgtggtgggaatgattgcatcaggcgaatcagctcattatgagcatttataattcctcttaaattttcttattaggttgtgcaaatgtgcaatagcctttgtgacccccaaaaatgttaactaatcagcatataatttcttttcatggaacactaaaatattatcggtaaacggtagactgtcaagcatagtagagtgggcaagatgttgaattttaatatgctaaactatgcattgtatataaaaggagcatgcatgttgttatttgagattttcagttaactatttttcattctgtacgggagttttcacagcagatgtttaataggttcaactttttgggggtaatttacaggtgtttgatggtcatggtggtacggacgctgcttgttttgttcggaagaacttactgaggttcataattgaggatggtcacttccccagcagcatagagaaggcaatcaggagtgcatttgtgagggctgatcatgcaattgcggattcccattctcttgaccgcaattctgggactacagcattgacagcacttatttttggcaggtaaattctaacgccagtatctcaaatgtttattccagtggtacaatgcactattgagtcattaatcgatgctactttaatgcgaaaagtttctcaagtctgtactgaaattttccattcatgacatcatattgtaatccagtagcctctgctagttagtatccaaaccactagtggcagagaaatgagtattagcatttaaagtcaagctgactcaattatgaggtgtttctgcaacttcaattagttattagatactattttagctgatttgtgaatggaaataattttttatccatcggctatttcacatttttttagagaacaaatcatatattaacccggctttgcaataaagcccaacataacaaggttcgacaattttagctgatttgtgaatggaaataactcctttctcatttttcatccatcggctagttcacttttttttagagaacagatcatatattgacccagctttgcaagaaagctaacataacaaacagaccatatattgacctggctttgcaagaaagccaacataacaaggtttaaaaaaaagcgatatcgcccaccgtggggcttgaacccacaaccacaaggttaagagccttgcgctctaccgactgagctagacgggcttttggctgttacattttctttacagaacataccatatattgacccgactgaactagacgggcttttggttatttcatattttctttagagaacataccatatattgacctgactttgcaagaaagctcaacataacaaggtttaacaaaaaagcaatatcgcccaccgtggggctcgaacccacgaccacaaggttaagagccttgcgctctaccgactgagctagacgggcttttggctgtttcacatttattgcttcattgtccaatatcacaacaaagcgcaaagttctttcctgctccttaataagttggttgtgttgccttagttgcttgacaatctttagatcaattatatcattttgcatattatggtgaatatacctcatttgaatggcaggacattgctcgttgcaaatgcaggagactgtcgagcggtattagggaagagaggccgagctgttgagttgtcaagagaccataaacccagctgcagaagcgaaaagatcagaatcgagaaccttggtggtactgtctttgatggctatctcaatggtcagctgtctgtagcaagggcgattggtgattggcacgtgaaaggttccaaagggtccataagccctctcactgcagagccagagtttcaggaggttagactcaccgaagaagatgagttcttaataatcggctgtgacgggctttgggatgtgatgaccagccagtgcgctgtcacaatggtaaggaaagagctgatgacacacaacgatccggaaagatgctcgcaagagctagttcaagaggctctgcgacggaactcatgcgacaacctaactgtagtggttgtgtgcttctcatcagacccaccacctcagatcgaggtcccaagatttcgagtacgaagaagcatttcgatggaaggattgcatatgttaaagggagctcttgacagtaatgcctgagttctcaaaaccagctttttgtggtaactatggttgaatgatcttgttgttctgttgggtccttgaaagttatgctctgttcttcagctataggttcgcaataagtggtgtataatgagtgcaatattgttgaggtgtaggctaatcattttgtgaggcgatgatttatctgtaccggcgccagcatttggttgttcacaatgtaattgaccaataccagcattcatattctggtacaagtgccagttataatagttgatcagttttgttctacttcagacttcagagttttcactttgtcttgtaaaatctacttcctgctatgcttcctcttgagataccaaagcaaagaaaaaccaccttctatgttcagaaacaacttatctatgggaacatatgcataacagaagatattctgaactttttcatctattagtttcggtttagagaaactcgaatactacagcatttgaaaggctttggttgctgcacttccacttatcattgcattcttctttcaattaaatcctagaggcaatcatgtatgtttttccttgtttgctagcatatataataatacagttcagtaacctgagtacattaacttgcctgaatatttgaccaattgcaatggatttgccttgccaaattattggtgtcaattaactcaatcagcagcttcaagacagaagattctgaaaaaaaaaacaagcgattcctcagaagttgttgggacctgacctgatctgaggaagcttgtgcccggtttcctcgcatcctgccgccattgttggtggagcacatggccatgtgagccttcaaggagcaaccaaaggggtcgccgccccaaccccccgcagacgccggcgaccgcggcggcggagcctgaggtgtgggaggatctctccggcatgccgctcggagccgacctgatctccggccgccggagaggatctgatggggacggaggggagggaggcaaagcggcaaaagaaaaaggactactttgtaaatctcaccataactaacaagggtatttctataaatttatggatcgctatcattcctggcttttttgttgttgtaaaattaatcacagaaaatctacgactagcgactcaaaccagcgaattcctcgcaaattttgaattttccttaccgatcaggctgagttgtaaagagtagttggagaggctattctgtcctttttcatcatgggcatggtttctaaactattaattgatgtatttttatattaaaaaaacatttcatatgcaagtttttctaaaaattaaataaattcattttctaggtttacactggctaatatttaatcaatcatgcgctaatgactctttatacttttcgggtcagaaaaagatctcattccaagcctttctttcaaaagcagcctaaatacactgctgaatcatccctcccctcatccgagaaccgtagttaggttataggtgctgatgctaagatacaggtgctcctgatgctagtttgtattctctgtgtaggttcgtattattaggatgtgtctcatctgatcaaaattgtgttagatttaattgggtaattgatccatttaaatcaattaaatcaaataaattccaaggctcattatgctaggaattcatgtgaattcattcttttataggatatcaatgggatgaagagttttgagaattaatctatttgattagggaattggtaatttatatcaattagtcctaattgatggatggttgatggttgtatagtggaggatggttcatggctagttgatgacaattagttgctctattcctcttcctattccattggtgatggttgtgtagtggaggatggttgatggctaattgatgagaattagttattctattcctcttcctattccatgactcttactctttatcttccattcctcttataaaatgagaatggatttgatctcccgcgaaagaggaagacacactttcatccattttccaatgctgttgctgctacggtaatcccatcccgacgagtgtgtgcacatgcgttgggagagtgggcctccgaaaccacgcgttgctgcgacgtttgcacagacgggcgggcgatcaggtttttgggagcgcaaggcgcgactactcactgttcgtcaacatcaacttcaccttcaccaacatgtcaaacactagagacaaggagaaggagactcccgtcaacaccaacggaggcaatactgcctcaaactccagcagaggaccattgttggggtataaccttattacattatttcaattagaagttttactgttaatgttcatcgcaatgtcaacattgtgttattatgtgattattgatgcttattcaacgttaagcatgctcatgttgattacattcaccactatcactggatcaaatcccattgtaaatatcatgtttattatcttgttattttggattaaaatatgccgaattatgaccaaatttccaacaaattgtttatattttagaatatatgaagtaatcctatatacctataaagttgatccccactaactgcaattactactatttttctgttttgtggtgcatccacgttaccaaaattgtttaccaccgttagattttatttccaaggctgtgattagtctagatatagcttcagtctgcagaccacaatctatcaagtgagtctagcccagcgaggaggcaggccccaaaccaattaactcccatgataattgtgttgtatgcatcgcttaattttctatgttaattactaccaccaataaactaaacagttacatgcatatattcatcaattgcatttcttgactcgacctttcctttcatctaccctttcacctcactatttatatgcctgatctccacaatggcatgtcttagccatcgtataggatcaaaacatattctttgtgataccagtggatgcaatggctgtgatctcttcaaattactgatggttttcttgatgtattatgctgtcaatgccatgctacagtcatttcttcatggtaatttggtttgtggtgtgttcctttcctcggcctacaatttaaattattttttttattttactcataaatattcacgttgctattttctttctttctcatgtgttctttgttgattggtttttgctcaccgtgatctgaagttcttcagtttttctactgcttatatggatattgatcctgttgatattgcttcatggcaatgagcaactaagctccctatacgaccactattttttctatgatattcattcatacagcaatgattctttaagtttattatcgggtattaattaaagtttactgcaattttatagcaggcctatatctttgttagcatcggaatg

SEQ ID NO: 20629 - DNA, 1297 bp, Oryza sativa
acacaccgctgcaagaattcaaagattctactcgtagtagctgatatttggttaattacattctggggtacactgagtaatttgcaattttgccgtgggtgcaggcaaactcggcacaatggcaggacatgaagcacatctggggggccacctggagcctcaccccgggcccactggtggggcccttctcggtgaggctgacaaccctgaccaccaggcagaccctctcggcccaggatgtcatccccaagaactggacccccaaggccacctacacctctcgcctcaacttcgcctagaggaggcccctccggcccatgtttgatgtttcgttggctgggctccccaaggaggcccatacggcgtgtttactttcggatgaattgtgtcgttcttgcgttgcagattggagtaacttgttttgtgtagctatagctattgatgatacctgcctaatagtgcgtgggactggcatgtgggcccaggtagccctctccgaagcggagagagagcgtgatttggttggtgttttgcttgccttcctgggaggtttgggatcccatgtggttagaggccccggtgaaaacatcctcagggtctatatagttaagtgcatatatacttgtatgtgtgtcaagtagatgaactgtattatgttccctagctacttccctgtgcgccctgaagtttgatctttgtgtttgattatttttctcgttaccaactaatgtattaatgttggtcttaaactgatgtttgcagttatttgttctgaaactacgcatacaatcaataattggtttgccttcactttttttttttgcattatcaatcatccataacctggctctcgtgctgattttgttaagttgtgttggttgttgctatgctggtaatcttttcgcttatgcttatgcttatcagccaaaatttaaatttccaaccttaaatttagagctgattttgagattttttcatcgaagtttatttttcagcctttacttttagatcgctaagaacacgtatataaaagttttattcacaaattactttttatttgcaaatataccgtttcgcttatcgcgcgaaaaaagcgaaaggatggctccgtccaattgagtccgaggctccgagccaaggcggatgttggagcaagatagattagggaaaacttttgaatatgttctaaagatactcttaacacaaattgtaagatggtttgaacttaaactaagatatataacttttcttcaaaaattttgccagacccgcaactagcacaaaactcacattatgt

SEQ ID NO: 20630 - DNA, 1967 bp, Oryza sativa
ctgtggagagaacagagaattcaagcagcagtagtacttactgtgagcgggcgaccgtgatctgcgcctcgagcgtcatcaacttcccaatctgctctgctaatcaatacggagtactacactacaccgtcacacaaaagtgcacatgcaaatgcaattcgatttcactgcgcccccggttcttcaatcgtaagctgtccccggctctgccagtcctaggcaattaaggggaagaactgtggcagtactcctccactgggacactactagagctagtgtggcctactcaacctaactagaaaggttatatttttaggttattttttttacggagtgagtgtctttatttaggccatgtttaaatctcatcctaaaatttttcacctcgtcacattgaacatttgaacatatgtatgaagtattaaagataagcttaaaaattaattaattacacatattgcgactagtttgcgagacgaatttgtttttttagataatggaataaatattccggcctttactcattagagctacagccagttattacaaggaatcatacaaacaacgaatgaagttcaaataaaattaaacacacccaacaataaaaaaaccaaactaagaaaatgagcacacatttattcaagtctatttgtgaatctccatccatggttcgcaaatatttgcataaccgtcgtctccagtttacggcatgcaacattcgtaaactctccatcatcttcacgcttttgcagctttacctaaaatcggagccaatatgttgccttcaatattacctgcatatatgagatagatggtgatttgtcaaaaactatatcatttctactcatgctccaacaagtatgagtttactcattttcttgtcaaccccaaaaaccaaccatcaaacatatcttagatatggtaatagggaggtttaaaccaaaagaaaactgtactattctccaaacaaattttgcataatgacagtcaagaaaaagatgttgaatggtctcattttttatacagaaacaacatcttaaactgccattccagttccgtcttgccaaattgtccttagttagcaccacccctttaagtaagtaccacataaagatcttaatcttaagtagcgagatgaatctgttaagcctaattgctccatgatttgacaatgtggtgctacagtaaacatttactaataacgggttaattaggcttgataaattcgtctcatggtttactaacgtattttataattattttatttattagtgcttaaacaccctatacgacaccctatataatatctgatataacacactaaaatcttacaccattcgatctaaacaccagtacaacttctatggcaggaatgcaggatgccactattgctgaggacgacgtaaaaatagcccaggaatccaagccgcagctctctctcggctcgggagcccaagaaattctcgccaatccacacccgccactacaccgtcgcagcgcacccacgtgacacgcagccacagtccatcccccgttgtcccgaatccaacgcccggtcccgctgcatgttcctgcgctcagtccagctacaaccgcagctgaagcagcctacactcgccaacaaaagtactaccacctcacgagatcgatgtttgttctcggactctagtagtcgtaggcgtactccactgacgtgaggagtagtacacggagtgctcattctgtcttaaaataaaatcaatttttaaagtttgatttttgtcttaatttgtatcggaattttgactctgaacgatcacaccctagtttagtttgttcagtgtactgtattatcccaggggagtaggagtagattttagaacattcctgtttcttttagtcgcacagtgcaacgccagctcgcactagggcagcgaagttcagcgcttagtacgactgtactactacgagactactactacgacgac

SEQ ID NO: 20631 - DNA, 3380 bp, Oryza sativa
ttgctcagacgcactgctatttatttctggatccgccactggtcctagaggtcgacctcggcggtgagcagtcgtacgttgggtaggtctggcttattcggcttcagctcctccgtgccacgcgatcggcatgcactcgtcggctgccacagctcgtgcccgcggcgagggttgatcgacgacatgagacaggctagggagggagacaaacatgaggcctacgattgcaagtgcaaaggaggcaattcaaacacacgctacccctccctctcccctatagatggctatatggcctgagtcccgatgacccggcccaaggcacggcaatttggcccgccccaatcacggtcgtgccttaggctactccctcggcacggtgagcctgcacaaccaaagaaaaaaaagttgagggatccatcaaagacttgattcggccatttgaggtacaacccaaagactggaggtatacaaaatagacttattccagtcatataagacacatcccaaagatagagggaataaaaatagacttatttaatagagaagcacaatgggctatcgtgccttcgtgcaggcccggcacaacccgagtcttgttgggccgtgtctgggctgggggcacagcctagcccggcgtgttggtcgggccgtgttagtctgactagcttcggcccacgcccgaacatgccaggccgggcggtccatttggccatctatactcccccccaccccccggcctgcacacacccgcatgcgcgactggacacgtggcatgcgtggaaaggggggctggacggtgcacttttcccttatttctttttttctttccccgtttcttttcgggtttttttctttcccatttattttgtggttttttaatacgtatgaataactttgtatagtaagtttatattcttgatcccgttctctctccttcacataatttaatttatagttagcttatactttatggattagccaactataaattcacgtgaaaagtgccaaatctttttcaaagtgtaacaacaataaccataaagttagctagtctgatgtgaaaagattgcattagtgacgatccaaatgaacaaacggctggtttgagaaggccttaggcccaacagctcgagcaagatatcataagctggatttatttaccttttggtcccttacaaaacttattttataaaataaactcctagaaaaaacttatttagaaatgaatctttttatgacgtcaatgtcatcgatgccgtggtccagcataatggtgtcattccctacccgcggaagccaagtaactaatatgaaggaatatatttatatttttttgaaaaatgacatatttgtaataaaaatatttataggcaggtacttagggtgtgtttggttgagctgtggcttttgaaaaagtagctgttggctgtagctttttgaaaagtagttatggaatatggactgtggcttttgaaaaagctagtttgctttaacacctgtggcttttaaaataactagtcccgctgacaagtgggccccgcatgtcatacatagaaaataaggggatggagatggcaacggcggcgtcgtcggcctcggcggcggcagcggctcggtgaggaggagcggcggcggtttggcgaggaggagcggcgacaacggcggttcggcgaggaggaggacacgcggcggtgacgccgccgctgtcaaccacctcaccaccttcgtctcccgcctccacggccggcgaacgaaggggtggcggcgggcggtgtctggcggcgccggtcggggatgggcaagagcggcgccgttgggttgggtggcggagtcggcctcgagcggcggcggggagcggcagtgcgcgcagcggcggaggagtcctcggcggcagcggctgcggttcggcgaggaggaggacgcgcggcggtgacgccgccgccgtcggccacctcaccaccttcgtctcccacctccacggccggcgaacgaaggggcggcaacaggcagcgtctggcggcgctggctcaggttgggcagcggagtcggcctcggcagcggtggattcggcctcgagcggcggcgaggagcggtagtgaggaaaccaactcaacttactgaatgaatatgtcttaaaatgatagtgagacttgactatagaatctaatggtgcatagcactccccttcttgaatattgtcatcgatcttcaaaacaaggttaggtaaatttatcccaatagcatcaacgttgtacgatccatttggttctcatatttttccatatttaaaggaggattcatatctaaacatatataaacacgatgcaccatataacatcctctattattatatttaccaatgacatgataattgttccaagaataacatggaaaatcataaattttcttctctaaggcatttagatcacaaagaacatcaaattcgatataacccaaagtacataaagaagacaataatttcagctcttcttggtcatcagcaataacaaagacacgtttattttgagtggtaaccaaatattcaaaaatataagtaacgtgttttttcactagttgtggcatgtgtataagtgaagcagtgcgcaactcttcttcattacaagcattatcaatatcaacacaatctgaatttttagcttgtgataaaagcaaattagaaatctgttccactagaggttgctctaatatagcataattagtggacaattgtagcatagcacaatctttcttaccttggtccagttgaccatcacttaaattacctgaaacgctctcttgacataatttaggtgcttcattgttcttctcttcaaaattgtttttaccttcctgcatgatattagataaaatagaaggagcaagaaaattctcatgtatcataggcatttttgtttctttctcaatctgactttcaatatcgcaagcatgcaaaagtaattgaaaaagatggctatgtgttttattctcaagcctatgctgaatttttaaattaagcccatgtaaaaatcttttaattgtatctcctctagactactctataacaccgtacaacatacaaattttaaactcccggtggtactctctcacggttctattcccttgtttcaaattttgcattttcttttgtaaatcacgaatataataatcaagtacaaatctagctctcatcattgtttttaagtcattccaagaataaggtttattaccgacaagacaaatatcactccaccaaagagatgcaaaagaagtaaaagaacttattgctgccttaactttttgttcctcagacaattcataatattcaagttcatcttccacttctaactcccaatcaatatagtccctaggattaaacttac

SEQ ID NO: 20632 - DNA, 2142 bp, Oryza sativa
gcgagagagccggcgagacgaccatcacgcctgggctaccgacggtgtccgccgccgcagcgtcgtgggtgtggccgtcaccgacgaagcccgggcagagcatctccagctcttccaagcacaccggccgcgacagcagcttcaccacctgccgcatcgtcggccggctgcacggcttcgcctgcgtgcaggccagcgccaccttgatgaacttgagcgcctcctcctccgggtaacctcccttcatgctcggatccaccatgtccagcaggctgccctgttcgtgcagcatccacgcctgcaacaacaaaacatgatcgatgctgttcttcatcagcagcgtagacatggtggcagaaattatcagggttcaggacctgacctgccgcacgagaaacatgcctgatcgaatggtctgcgacatcctccttccactgatgatctcaagaatgagcactccgaagctgtagacatctgccttcttcgtcagctgtccgtgcacgacgtattcaggtgccatgtagccactgcatgcagagaataaggtttatttcgattatgttgcatgcagctcgatcattgctgaagcctgaaagaacagcttacgttgtcccaatcacacgtgtgctaacatgactaacattgtccgggaacagcttggcaattccaaagtctccgatttttgggatgtagtttctgtcaaggagaacgttgctagccttgatgtctctgtgcacaatgcttggctcgtgctcttcgtgaagatagctcagtcccttggccactcccatacagatgtccgatcttgtgctccagctgaggtcagttactccagcagctgaacctaaatgttgcaggagatttgtaagtacgtcgttgctctagatagagcataattgtggaaatttaatggagatctcttaccctgcaatgcattgtcaaggctgttgttctcgacgtactcgtaaatcaggatcctgttttgcctctgaacacagcagcccagcaacctgacaaggtttgcgtgcttagcttcagtaatgctctcgatttcggtcaggaattcgttgatcccttgttcagattcagcagacagaacctttgcagcaaatgcagtaccatcttcaaaagttccctgtgtcatgggacagagattagtttctgtttccatcctggcttttcggctgctgatttactccatttcttcctactcttcgtgcagcagttcagatttttcagttaaaacgaacaaaatatcaagtgtaaaatacgtagtagtatcttggctaccttgtacacagttccaaatccacctcggcctatcttgttgccatcgtcgaagttgtttgttgctgctctgatctctctataggagaatagctggacatttttcaagttcagaagctctgttcagaaaacaatacaaagaaacaacgtcaccatttggagttttggacaaaccgcatgagttcaaacaagctctccagaactcatgcatcacgaaaacgtccgcaaacaattagataatcatctaaaaatcgccagcgatgcatgactagaaaagaatttatactacaaactcccaagtcctaactgctaggaacttgacatggctagcatgaaagaaacaaattgtcaaattgttactacctttgatatcttcttgggatccacagaagcatctcttcatcagagccatctttcaagctggagctgtgacctggattcctggagcaatcctctctttctcagccaaacgggagctccaaaagaaaggccaagaatttgttgaagtgagaggaacagggtttccaagcgagcattaaatcttcagaggtgttggcccaagaagagagctctattacagcaagcaacaaggtgaagcaatgaagcagggaggtgcttggaaagtgccaaacaaactcttcactaaggtttaattagggttcattgatggtgtactgtacaaaaatacagttcatcagtccatgcgtcccgatggatctttgacccctccctgtcaacgagccacaacggccacttgttttagcttaaggggtcaggtcaaattccaagctgttgcctctagatgacgtgacagtaacactcctaaaaggcctaaagataacgttaccaatctat

SEQ ID NO: 20633 - DNA, 4310 bp, Oryza sativa
tgtcaaccttaatttctgctaaaactctagtatttccttcatcctgtagtaagtttattttttctatttgttccaaaataaatttatactttaaaacaatcattgcattagagtttgtgagagtagagaatatttgtgattttgataaagtagggatattatagtgtttttattttgtattggtatgtatgagatgtgtgagtaataaatttttttggacaaaggtagtagtgttcatatttatgaattgatggctcttggtgctatcctaaatccattgagtttgaacgcactctactaaaaaatcaacccaaaatccttaggcacatcataaaaatttgtcaaatagttcgtcggtactaagtcgtaggtaaagttagttgcgcttaatttccaacatgttctaatttttttctttaaccccattcctttggtgaacgctctcctttttttctttctttctttctacctcagcctcttgcacaatcactgtctccatcgttgatgcagatggtccaataattcgaagtcaaccttagcaagcacttctatctaggaattatattccatcacacaaccgacattattccacattttatttgagagatgaggataacctcaccaacgcacaaccccactcaaaacaacatcgaaacatggtagtcgtcatcaatttttctcataattcggcatgatccttctccttggctgatgatgtatcataggaccacgacttagggaaagcagccaagggatagtgataggtgtaccatgctaagatttgatcttaaaaaggctatgtgagtcaagtaacataagtatacaaataaatttggattgtaagttggaagtcccattccaagtcgaaagtctattgaaaatagcttggccaacgatatgtgtacattaactttagatggacacattgaacgttgcaatccaaaatatgcgcacacaaaaaataacttccatccggtgaaattcaatagcttcggccactgttacattgtaccagcagatgccttaaatttcaagtccctccagcccgtttccacgtaaggtttgacagcgcaaacgcacaattccatccctgctgcgacagtgtgcaaccgttttccgtccccacaaaacgggagcagaaatgacgccgccgcgcggaggttggagggagcaaatcatctcgtctcgtcaccaaaaatccgaaacgccacagcagcaccggccccgatcgaaacgctaggccggccggccgccctccgaaacggcgcgagatacgttaactcccctgtcgcggggaatgaaaattaccgccatgtggacaccccactgacagccgggccccacagcgccagcttacatccatcgggtcaaggaggcccaggacgtttccacgcatggcctttgcctccggcttcgccagtttaccgggcagcgagcagtaaccggcggtaacagcaccggccgccaccacaccattggcacggacaagcgacaattaccgcgataataacaacgacggcggtggcggcggcggcagcagcagcagcagccgcaccaaccacccttaagtaagacgagcggaggcgggccgcgggcgagggaaaggaggaagccacgggtcgctcgctcgtggtagtggtggtggatctgacacccacttcgctacgacttcccccatcccttcctccctccctccctccagtcctcttctcttctcccctcctcccacacctctcccctacctcgtctcatcgtgctcttcgcacccgcgcgattccgccccacgagcgccggcctccgcttcgatctccgcgacgggggccaatgccggcggcgcgatgagcgtggaggaggaggtggtgggggaggaggaggaggaggagctgttctacgagtcgctcgatcgcatcctctcgtcgtcgggctcctccacctcggcctcggacgacgatggggaccacccgcgccgccgccgcgggtacgacgcgggggcggcggccgcggccgcggcgctcgacctgtggacctccgagccggcgcccatccaggagcgacggcggcggctgctccagctgatgggcctctccggtgacccgtcgctcgcgcgattcgagaggggccgatcggctccatgcgacgccgtgggcccgctgccgtcctcgccggttgcgcggtccagatcgagcggcgccacgccggcatccgccgcgaaacccccgctcggaggaggccgcttgcgcggagcctcgtccgatgtgtcagatgccacgttggaggctgttgaggaggacccaaggtgcttgatcagaaacctcgacgacggcagcgagttcctggtgagagaggagttcggtctccgtgaggtcggtacggggcggcagctcaccatggaggagttcgagttgttcatcggccgctcacccatcgtccaagagctcatgcgccgccagagcgtggtcaattccaactcaaactccaattcccaaagtggcgcttccactcccattgagaggtccagctccggctccagcaatggtggggcgcgctacaagcggcgcaacagctggctccgcagcctccgcagtgcagctggctccatggttacatacactcgtgaccgccgcagcagcgacgagaaggatacatcctcagataagggtgggcatcgctccagctcggctacggatgacagccaagatggtgttgcaaaccatggcccggaccgtgttaaggttcggcagtatggtaaatcctataaggagctcagtggcttgttcatgaaccaggatataaaggcgcacagtgggtccatttggagcatcaagtttagtcctgatgggcactttctcgcaagtgctggtgaggattgtgtcatccatgtctgggaggtgttggagtggaagatgatagaggagaaggggttggaagaaaatggggtctttgatccagagtcgatgttggtatccacggcttcagagggaagccatcgggagaagaagctgcgggcaaaggcagtacacaatcagagatcagtaagctcagaccggttgatggtgccagaacatgtgtttgcactatcagagaaacccgtgataacctttgcagggcattctgaggatgtgcttgaccttagctggtccaaatctcaggtaacactcaaaatgctgctatatgcttgtcaattcgaatatgcaaatatttgttttttttggtatactcctgtgatacatactctgctggattgtagtatgtgtgccatcagacatcaggataatagtcacaataattaggtcttaactctttaaagttaaaaacttatgaagctattgccaaattagcagtaccaatgtctcatctaaccttgagaagtcatctagatctctggtatactgcaatgctactgaaaagggaaaaaaaggatgttggagatttgaacaaattggaattacacaaattgattgctcgcaatgttctgttattcgcaaataattctgttagatggttgtttataatacatcagtgcaattgtaccctttccaacctctaagtcatgttttataaagcatgcaacttttttgctgcttcatggtgacttaagtttttcatgttgagaacatctagaaaatccagcacctgttggtcaaaggataaaacattttgaatgtcagttcattcagttccatataactactaatctgttgatttaggtctctctttcactgcagtattaaaaacttttccattgataaatagattcaagttttttgatcatcaggtcaaaggagatattaagtttttcaatagattctgtagtctacagtgtactccaatcaacagaagatatttattccatcactaattagtatcacccagaagtgattgaatgtcatgagctaagtagctaactattttatgtgttgacatgacatgaggtcagtctttattgttcaaaggtgtgatttaatattcattatgtttttagtggagtttcaaaaggtgaaaaaaatagtgcacaagaatatttatgcacggttctttgaaaagaaatatgtccagcccccaaatgctagatgcatgattacagtgtataacttcagcaaattttgttaagcaacataaagagttaattgaagtttgtcgcctgccagattattgatgccaatctaccaagctagaagtcaatttcaatgtgttgttttaccttttgcattagacaagtgggcgcatatagtattaacgcagtaacattccttcaagatattgtatgacgttcataaggcttctgtatgctgttttaagctaccagtaca

SEQ ID NO: 20634 - DNA, 1571 bp, Oryza sativa
tgcacaagaaatataaagtaggatagaagaggtctctcttggaaacagcattaaggtggatgtagctaattaagaattaaccatcttactgaaaaacttaaggccttaaactgttaaaaggtggacaatctacttatagtataaaacttgaactcagtccacatgcaaggccaatcaactctccaaggtttagaaatctaaacttatgttattgcttatcaggctccgtcactaaactttaggagtctctttggcagcaaaactccgtgctagtttggcagtctgttcaatttgtatttctgattatgtaggcctgtccaactatttattagtggaaataggttaaggagatgatttgtaccaaattttaacactagcatattccacctacaaatgttacgatggactcatttgtcttcaaagtgcagtttttcacaacccaaagctaaatttgtagctcagggacctcatcagacgttcatgaaagctttaagggtgtaggaatatattagcataattcattcattttattatgattttgttgtatttaacagttaccccagcaccccttatctccacttttcaatttctgtgcagtacttgctttcatcttcaatggataaaactgtacggttgtggcacgtgtcaagcacttactgtttgaaaaccttctcccacagtgactatggtaagagcatcgctttcaatagatcaatatctcttcctcaccccatgtattgtccttctctcatatcaatttcttgattcagtgacttgcatccagttcaatcctgttaatgataaatacttcattagtggttccctggataaaaaggttcgaatttggagtatacaagaacgcaaaattgttgactggattgatctgcatgaaatgatcacagctgcctgttatacccctgatggacaggtttaacttgcttcttgttctacaatttttcagcaggggtttgcttgctttttttcatgttcattcaaacaccttgttttttactctttgtgaagggtgcactcgttggctcccacaagggcaagtgccatgtctacgatatttctggtaaccctctctctcattacttaattgctgcacatgtaatctcccacatctttaacttatttattccaagacctggtactgatagttggtactccctcctttccaaaaatataaacacatctagcatttgaaattcgtaccaatatttaagcatttctagcactttttagtattacttgtcccattaatcaccttcaattcaattttttcccatcttatttcttaccccccaagcatccctcatttactgggaggcataaagtctcttgtccttaaccttattatgtactaaacaacctagaaatgcttatattttggaaacggagggagtatatgctatgttaagcttccatctactgccattgtcatattatataaattgcctcctataccttgcaaacttattttatttttgtcttttgcctagataatatgcttaagcacaagaaacagattgatctacatattaagaaaaggaaatctagccagaagaaaa

SEQ ID NO: 20635 - DNA, 817 bp, Oryza sativa
accatggaccatggtcctctctgtacttcagatctgacagtgtcttcctcctcattaatttatgcctcgacatttttaaccttcgtgcctactctaattaattaagcatgctgtacaattgccgggcagggaaaaaatacagcggtagtaccagctgcagcctgcaggatacgtactttttggcagagttccaactggctttcttttcagttccaagtggctgcgttctctcagtaaacgtcaggcatgccaacaacaacatacggaccaccacgacgtacgccgtgcacgatctgcctctgccccccaggctatgcaatactgtagtataataagctgagtaaatgtactgttaggtgctcacctgcggtacaccaccgagatctcgcctcggttctgcagctggccgccgtggccggcgacggcgagcctggcgaaggcggcgccgctgaggtcgaagtgcgtgcggccgaaggcgcagacgccgccggggcactcgtcggtgacgatgaccgtgacggcgcggcgcgagcagatgctggcgtcgaggcaacgcaccttgtagcaggcgcagcacccctcgccgcccttgaacagcacggggctcaccgcgcccacccgcgtcttcatcggcaccacgtccaccagcgtcccgtatccacacgcgccgcctgcaaaaaaaaaaaacgtacatacatacagccaaacaggttacaactctgaaattagaaatgctcacgtgataacccgtcatctaaaaatgagattcgtaatttaaaattggtctaatctaagttactacatttttggacgatgg

SEQ ID NO: 20636 - DNA, 1149 bp, Oryza sativa
agaagatagatcttggcctatacatggaacatcaatacaaaattgcagtcattacaaactaattttacagcaagataaatagcatgaataattcttgagataggtacacaaagttagacagcatcaaaacttccaaggtggaaacatagaatgatgtgataatctgatttgctgatgaaaacttcacgactgagataaagcgaaaaaattgtagagatacgataacacttagttgtccaaccctgtcactgaggcatgtgaatcacacatcgcaaacacttgttttctagcatcagttcaagtgccttgttgatgtaatcgaatgacaaatcatgtgtaacaaggtcatcgacttggatttcctgagaagaagtaacatgatatcagtcaacattctacccaaacaatatttgatatcagaaaaggtgaaagacctatatattggaaaaacaaacaaggtattttttgtatgtatcacattaactaaatatattgctatgtgatcattgaccaaacatcaaatatgacatcttgtacataaatgctattatgttcgattgtgataaccacttcgcaccacagtaaaggataatccattcacacaattacatatgatgaagttcagcttcttaatttaatatttttaactgaaaatagaattcagttttattaggatgtttgcttctacaacacattgtctccgtaccttgtttgcatacttgtccactaacaaaggtagatcagatttaggtctccatcctccaaacaaagaccccttcaatgttcttccagacagaagtagtgcataatgagcagaaacctctggctttgcttttggcacaccaagagttacagtcagcccccaaccctaagaagaccaaaacatgagaagataatatatctgggcagaataggtggaattgtagtgcaatggaaaggaataaaaattacatcagaacatgattgcagtgcagtcgacactactcctgtatcacccacgcactcaaaagagtaatctgcacctccattggtcagccgcttcaccacctgaaagtatgaaaacaatgtctttatgctgtgtatatcagggatatgatcaagattttagaaactaccaattggacaccagtgcaacaggagctgttgact

SEQ ID NO: 20637 - DNA, 736 bp, Oryza sativa
tcctgcagccctgcttttcaggattagtatcaacaccgataattatagaagccccgcgcagcttagcaccttgagcacctaagtcaggaagatatgagtataaatattacatttcctaatatgctttcattaactaatagcatagcctctgtagaaacttacagaaagccctacagttccaaggccaaatataaccacactcgaccccttcgagatatcagcaaccttccaggctgcaccaagccctagtgaaatacagaaatgaacgaagacatgaatgatcagagacacggttaaaatgcgcagaagtgcagaacaacatagcacacctaattcttagcatcagtaaaccaagtataagctacagaaaggcgtggaagataaagtaaaaacactgatgccatctgagcccttaaaattcacctgcagatacaccacagctcagcaggcatatcctgtccatcggcacggttgggccgaccttcaccgcgcaaccggagtgcacaaccgtgtactcgctgaagcttgacactgcacagtaatggtacacaggtttccccctgagcgagaagcgggtcttctgatcgctgtgcatgacacccctcctctccaggccgagcttctggcacatgttgctcttccctgaaacgcagtgcttgcagctcatgcactctccgatgaagacggtgagcacatggtctcccacttcgaactcggtcacaccttcaccaacact

SEQ ID NO: 20638 - DNA, 3024 bp, Oryza sativa
tttaataaaactaatttggtaatgtaagagtaaaatccatcaccggtccctaaacttgtaccgttatgtcatcccggtccctaaactcgcaaatcgactgttcagtcctcaaacttgttcgaccgtgtcatcctggtccctaaacttgcagatcactcgtttagttcctccaacttattcagttaagtcgctctggtctctaaacttggatttgaatattatctgggtcaaataggacggtctaaagactttatattcaaaaataattcataactttttcatgtgaactctaatgaagacaaactttatatcaaacttatagccctcgatgcgatttacaactttgtagttgaattgtttttattctaagtcatttttttgtcccaaaatgtaatttaaaattaaaatttcaaaatctataaacatgcaacaatattttaggaccctaaacagttttaattcgaaaactttacaactataaagttgtaggtcgtgtcgagggctacaattttgatgtaaagagtgccttcattagagttcacatgaaaaagttatgaattattttttgatataaagtctttagaccgtcctgtttagggaccggggtgacgcaactgaacaagttggaggacctaaacgagtgatctgcaagtttagggatcgggatgacacaatcaaataagtttgaggacctgaatggtcgatttgcgagtttagggaccgggatgacacaacggtacaagtttagagaccggttatggattttactcgtaatgtaaatattattatattttttataaatttagttaaatttaaagcaatttgactttgatcaatgtcaaaacatcttgtagcctaaaacgagggagtactagtttacctcaaacaagagcagagagagtatgtacacaataagctttttttcccccattttctgcatctgctgcagcagagttctttaaccggcgtctcaaccatatgaagacaatccttttgtattcgcggtgtggttgggaaagaaaaccactgcgtgtgaattttatgattatatttttcggcttcaaaaaaatgttgcaaatggagatttcgcgaacgagcctgcaacggcaaaaggttgcacgattcgtcgggaagcttggttctgtcctcgagtatatggctgcatgcacatggctgttactatctcataatactgattattcggaaactgccaaatgggaaggttctgctcatcgtacgttgcttatgtaactcaacagttatgagtgatttatcgagcactcattgttgtcagtttgatgggtaggaaagaaaaatcagtgcattatgcattcagaataaaatgataactgaataaaataagagggatataccatgccgagcagcacacttgagatcatgacaaaaatagggaaaatagggtttaattgattgcttgagggtacgaaacaaacataaggcctgatccagcaggggaaagaaaaggcagaagcacttcagaactggatgactatataatactcctccattggtaagattgatatgcttccggtacagatagagatcaccattcacccataaacatgtcactaaaagaaatggtcagcgcaatagttttatatgcttactccgtacgagttgttgcattgattgttccggcaggaatgcgcgccgtgacctcatctcttgctaatccttcatggtgcacggagaagagggaatttttttatttgccaaactaaacaatatttgtgcagatcatagttatccttgatgcattgtgttaatctactagcttctgtggctactattgttatcagcaaaagaccaaattatgtaatcagttctgtcttctgtggctagagctccatcttccactaaacaattaagacgataagctcagttaattagtttgttcaccccctttcggcatgcagctctttcacaaccctaatcatgcacactgtggccaataacacgttgatatgtgtttcgcaaagtaggagtatatgctcatcttgcttgcattggttgcacaaatcgtccaaaaccgtcaaattatttcgagttaagatcggatcgttggaagttgaaacgctcgctgatattgtctctttgctggagttagagaagaggagcaacgcgatttttttgaagcggagagaaacttgagactagaagaagaatactggattgcaaggaaagcaacagatggatcagtctaaggcttctttctcgatcagtaccgtccatgtctagccgtgacagcggccgaaagctacgtggtgcccccagcttacgcctcgagatccgtgcggcgccccatccgccgcggcacgaatcgtgacgtccgccgtgtcgcgaggcgagaggggcagacgggtcaatgcgcgtgggtcccgggcaccgaccacgatccgttcccgccacacaaacgacgcatgctttttttctcctcctcccctgtggaaccctccacgggatcgaaaaaaaaatcccacctcgcctttcgattgcgcgatcacccacctttataagcccgtttcgccccgaggcgctcgtccccgaatcagaaccacgcgccccattggctcggcgcctccaccgcgcacacgcgcacaccggtcgcccgcccaaagcctttcccgccccgccgtctcgctcgttttaccgcagcattttgttgttgctctagcgggcggccgggtttactgcactcggtggaatcgcgaccggtggtgtgtgaggaagagagcgcgcggcgttgttgggtgtgttcgtgaatcgggcgggatggacgcggtggacagaggcggaggcggaggcggtggaggagcgcgcgggcacgggcggagatggaaggggaagggagtgagcgcggcgatctcctcctccgcggccgagacgcagcagccggtgccagttttagaagacgcgccggcggccgcagcattgctccgtccccagaagaagatccgcagccccgatcgtcgcctccagcgctccatctcctcgctgtcgtcg

SEQ ID NO: 20639 - DNA, 3403 bp, Oryza sativa
gacgcaccagcgccagcgccgcggcctcctgctcctcctcctcctcttcggctccgcctacaccggacgagagccacacgcagcaagctcagccgcagccgcagcagcctacagaagagtcatccaacactgaaccgaagcctctgctcttcgtagcagagcaggacggcattccagaacccgagctgaatcctcagctccagacagctgaacaacatggcagcgacggcaacacggccatgttccagccgtcggtgacgtccggcggcatttggggtccggccgacgaggcgtggttcagcgcttgggggccaggaagctccgtctgggactacgacatggacagcgcccacggcctcctcctccagtctcgcttggccggtgagcagaccggcatggactacgcctacaccgcgccggaagtcctcgtggcaccggtgccggcggcagggacagccatggccactgccgcttcctcctctcttcctcctcgtcctccccctccttgccacagtccaaccttcgcatggaaggactaaacagcatcacacgccactcttacacgcaggaacacctaggttgtgagatgcacacaggttgcaaatttttgagacagcttgtggcatcgcacagtatgatcagcgatcacatcgcaggaatatctcaactcctcgagggcattcccattcccgaccttcctctctgaccaatctcctcctgaaaaccacaaggaaaaacccggctgcattttttaggctgggataaggatggccaaatattacaagcgtcatccttatcgatctttccatgatttttcaaagatggattcttttagacatttgactagctagtgatcgtatcagtgtctgtcacctgcaggatttgtagttgaatgtagcatgtaagggtttaaggattcctgaaagaggcttggaaagaggagacgggttttatgctctcctctgttcttacttgatgcttgtgttttcttcatttcttgcacgtactatcatgtatttattcatgtgtgtcttcttgatttggaagagatgtgccatcggcaaggtacttatttgtactgtagtctctatggtcaataataatgaattgatagttgcatgtcttcctaaagtcttgtttttcgtcttcaagtcatcgttatgagttcatgaccacaaatatggacagacatgttaacattaatggcgcgagtgtctgatcggtggaattattatgtggattcgaaatttcgaactgtttgagaagaaattgggccagaaactcgtaatagcccaatggcccagatgggccgatctactaatagctgggccaggaaagcatttacaattgcagtagcaacctttgcaggcatccccttcgccttcgccggtcgccgccgtcaaagccaagaggcgtgcaatgtcgcggccgccgtcgccgatgctctccgtcccggagaagaagacggccgccaccgagctcttccgggaccgccacttcttcaactcggccttcttcaccgacctccgggaggcacgcgcttccctctccgctccgagctcccaggcgacgacccaggacgccgcctcccgccgcgcgctcctactccggtaccaccgcctcctcgcctccgcgcgcgacgacccctgcgacttcgacgacgacctcgccttcacctggcacgacgccttcaggccccacctcaggcgcaccgcggcgtccctccgcttcgagaaggccgccgtcgtgttcaacgtcggcgccgcctcgtcgaggatcgcggcggccgtcgaccgggcggcggtgggcggggtcaaggctgcgtgcggggagttccagcgcgccgcgggggcgttcagagcggcgggggagatgatggagggggaggaggaggacacggaggacacggtggatatgggccccgaggcctccgcgatgctggagcggctcatgctcgcgcaggcgcaggagtgctgcttcgagcgcgctctcgccgcggggacgtcgtcagcggcttgctccaaggtcgccaagcaggtgagattggatttgctcgctcatcttccctagtggcactgcattgatcagaaaaaaattcccctcccttgcctgttggctgttagggttctgactgggtgaagcaaattatgcaaagaaaatattgtaacaaaaaatccttttagatagacatactatgatctatgaggggtgctgtgaggatgcattttctagatttgctttttagaatacatccaaaccggatgtacgcagccaatttatatttgctatgtggcacgcaattgagactgtgagacattagctcataacctataaatttgtgccaactgccaattgcagtatcgaaaatagccccctttgcattccccttagaactatggcatgatttgcagttagttcgtgaaatattagctttagctataagtttataaagcctcctttgtgggaggctgggttggcgctatattagcttattgtaatactgtttgtgctgaattacagtgacagaaacttgcagtaaactatgcactatgtagcacccctaacttgcacaatgttcattttttactatcacatccattccaagaattctgttttgtgctaggaattcagtaaactgagctggctgagcattctttgtaatctaccttactgaatactgatacagtacaattctagctttagatcattatgtgaactatgagttaagtttgaagaacagatcagttaatgaatagacaacaggaggaaatatctgaagtaagttcacgagcagcttcccacaggcactagcatcaggacaactgttagtaacatgtcatcaccttgcatgtctcggtccatcatttgtcttaccatcctccatcatacatatgaaatctaataaattaactttttaactgggtcaaaagaactaattgaatcagaagatctaatactagctgcagattggtggatgtattcatttccttctatggaccatgaagtagtttctgaatgagaatgaagatcatgttagacttaagcctcaaacatcattctgtctgtgcttcccggttggcgtagataacctatgatgctcaaatcctgattgttaaaatacagatttacttccagaaccagtgaacacttgttgcaaggtggatgttttgttgtatattatgcctaaactgatatcacaccagcattttgtgaccaaaaaattactgtggcataattcttacactaagaaaataatgaattttgaactcgttccaactgctttaaaagtttgaccaatcatttcaaaaagaaatacaggacttaggctgcatttgtttggagaacatggggagattggttgtttcgttttccacgcgcacgcttcccaaactactaaacggtg

SEQ ID NO: 20640 - DNA, 4136 bp, Oryza sativa
tgcaccccctactaaacggtgcgttttttgcaaaaaatttctatatgaaagttgctttaaaaaatcatattaatacatttttgaagtttaaaatagttaatactcaattaatcatgcgctaatggctcacctcgttttacgtatcttcctaatcttctcaatcccctctccctcaaacacagccttaggaaagccaaagtttacagatgtgctatttactgtttccatcaggttattggagcagcgaagttagcaccctaacttgcgttatctatagactgcacagtattcattttttgtatgtttcatgtccaaaagcatctacatcagaaaatacctaacgttgtgcgtttttctctaagcaggctgccttgtattatgaagaagcttatgcttcactggttatccctccactacaaaaccactttgagagatcttgggtagcacacatcctgttaaaggctgctctattcaatgcagaagctagctatcactatgctattgaactgcatgagaaaacagaaatcggtgaagagatagctcgattacagtttggaattaatgcaattgtcgatgcaaagaaagctgtccgtggagccccaggatccctttatgatgctgcctccagactcgaacaagatatgaaccagaacttggagagagcactgaatgagaacaaccgcatctatcttctgcgagtcccagcagccaaactactagctcctctgccagcagcttcacttgtccggtctgcttccctgagtgagatcttagatgtgaagacagaaaccggtaatcaatcatcgtaaggaaacccttcacgttgcaaaaggaaggaatcacatgtgtcagtgccactgcatttgcatgttaaagatcgtctgctgcagtgaattgcagggtcgattacgatttgtttgtttacttgctgggggtgtaaatagccacaggaacctgcactggcgattacatgggttgttactatgatttaccataccatctttgtgggctcgttattgtagacaacatggatggttcatctacatgccacttaacattttgcaagaatattatgaggtagtgccttattttgttagccattttggcaactatgggtctccctcttcaagtgtttgtctgaagaaggcaatgtactgaacgatcgtgctggtgaatgcaccgacgccatctctacaactgtcaactgggatctgtgctaatactcgggcatatcggccgggaacagaaggctttcagaacgttctttatccacagaacgtaccggcttggcggctcctccacggcgggggaacgcaacgcaagcaagcgtcgtctccagcgacagtcgcaagcgcggcgactcgaaccgaggaaaccaacgagaagccgagctgtccggtccctctcgtgctcgctagtcgctactactcgctaggtgctccttttggtttggcacgggcgcacggccaaccacagccaagtgtgtgctcccggccttatccattaactcaggtgagcatttgcattattattgccaaattctgctacgttcgttccatctcacctcctgtcgtggcaatggaatctgtcttttcagcacaaagtttaaattttgattgaaattagagatgatgtgactgaaaagttatgtgtgtatgacaggttaatgtgatgaaaaataactgaaggttggatctaaactttggatctaaacacagccgaagcatcttcaaagtgcaccttggcgtatatgacatgacttggtcctataagactcgcattcttaaaaaaatcacaagaatttgggccatgtttagttttaaggtaaaaagttttaacgtgtcacatcggatatacggatatacatttaaagtattaagcatacactaataacaaaacaaattacagattccgcctataaactgcaatacgaatttatcaagcataattaatccgttattatcaaatgtttagtgtagcaccacattatcagatcatggagcaattagtcttaaaagattcgtctcgtaattttacacgtaatctgtgtaattagtttttttatatttaatactccatgcatgtattcaaatattcgatgtgacataatgaaaagtttttcatgggaacaaaacatggccttagtgataaaacgaggaaaccagagttgcaggaagatttctggagacaaggtgagagagacagggttcttggtcctcttggattttatccctgaaaatccttgaaattctcgacatttccagggcccaaaaccagcaaatccaaggcatcggagaattttttacgcaactcggagaatcgcacacctctcctgtccccccgcacctccacctttcgttccccacgcctatcctctttactcggttctcccgcgcccaccacctgttcgacaccgaactcaaccgtctctccacaccgcgcgcgcgccgcagcttagcctctcgcaatggcgacgaccaccgcagccttggcgccgccgtccacctcgacgtcctccgtcctcctcccctcagccgccgccgccgccgccgcccgatgcctcgggccgctgccccgccgcgcgcgcctccggaccgcgcgccacgtcgccctcaccccccgcgacttgtccgcggaggacgtggccgcggaggaggccgccgtcgcgcccaagatcgggaagcgcgtgcgagtcacggcgcccgtgcgcgtgtaccacgtcatgaaggcgcccgacctggacatcaagggaatggagggcgtcgtcaagcagtacgtggccgtctggaaggggaagcgcatcacggccaatttccccttcaaggtggagttccatctcagcgtggagggccaggacaagccggtcaggttcttcgtccacctccgcgaggacgagttcgagttcatcgacgaatgagatcgatcagtaaccgtgaccaagtaagcctagcgccttttgttatacaataatgaccgcagctgtggcatgtgtatattgtttcggttgtgtggtgagagagatgagagagactgaagagagtagggaacatggcaaggaagttgtttgcttactgtcatgctcttcctcctccagttcgacatctaatttttcagatgtgggaaatgtttggatgatgatgatgatcgatagctataaatagtgatcattctgttgtcttgctggctatgtttttttttcttttgctgattctcttatcattatagttctagtgcggcaactaggaaaatgcactattgtgctattgaatgcaagcaagagtgcaagactgatgtttgttgtgtgggaatcagctaggcaagtagagctatacattactagcaacatttgaatcatcatgcccaatccatgaaaccgtcaaattatctgatcacggagcatacatcctaacgaagtaagttctcttaaaacactccttataggcttacagaagaacaaactatgaagaaggtgtttggatgatgtggacaaggatttcaatccaaattcctcctatccaaagtggcattaagactgagaattcactatctatcttttgctttcaatgaaaagctgggtccggggacctttattctaaaaagaatcattctccaggttatcctgaagaaaatttgttaattttacaagatttgaaagataacctaaacatatgaacagaactagagattgcattaaatgttttagtttgtgacattctctatgtcctcagttgggtagtacgacatggtatcagatagcacaaagtggcataacatgcagctacatgtaaactagtccgagtactcttcagtatatagtgtgcaagatgtactattttgttttatgtagttgtttttctgatccagaatgcgatatatctgggacttcttggggccgttagttgcatacagatgtctcagaacaacctgcccgttagactctaatgcattgtattatgaaagtagaaacttccactttggtccaagcctttgcatattgtttccggagaattttaatccaaccatttggaaccatctatcacctacccacaaattataagccatcaaacagccaactgggtcaattcataaccgtaaaagagacatattctgaccaaatttagtcataaccataaatt

SEQ ID NO: 20641 - DNA, 6549 bp, Oryza sativa
  unsure (1)..(6549): unsure at all n locations
cctgcagccctgaccaaatttagtcataaccataaattcaatgctatgcatacttatgttaattgaaggttttgggaagatgtcagcttatctaaaacaaaaattcttttatttgcttaaccttttgggaactacccaaaatgtgatctttgaattagaagagaacactacttatgaaaatttcatgacgccatgtttgaaacttgctcatgggattttcatcgatttctaggaaatcaccaatgtgttcaaaagattgaatttatttggactgaatcaacaaggagaaaatgaatgcaaaatgaagttgatgcattggatacaaggtagcctaataaataaggaattaatcagaaaaatcttattctttttatgaatatataattctgtttcttatgcgattatgtttgaaggcataatgcagactgcaccaagtagcaactaaacatcaaataagacttacattaaggctttaaagaacgatgttgtaaggatcatattgcaatttgattgtgtgtgcgagtttctccagtaaatttgtttactgcagttaatttcaattttttgctcaatcttctgcaaaagtggaaatggcttcatgaaagtgcatctttgcatggcacaatgtcgagttgacaacttaaagtgatgcttctgccctatggctagatagactatagaaagggttcaaggattcaatgtggacggcatttccttttactctctgcagcattttgttgtaaaatttcttctgtttatgcatgatgactaatgctctgttcggttaaagctcaaattagacagaatcagcaagttgtgacttgtaagtttaacatctgcaagcattatactacacttcctttttagaaccctgaggtgccacactgtctcagttatgtgtttaacatctgaaaacattgtacttcacttttctcttttagagccctgaggtgtcacagtctcaattgtgaatttacatccgcaaacattgtttatagtagtagtgatcctgaggtgttattgtctggtgaactctgaggacttgtgtttgttgacgtactttagatgtttagcactgctattaccgaatgcaccgaaataaaatcaattggtattcgctattgatttgtgctgtgagtgatgcattttctgtattctacatttctggtatccatttcaggtttccttcagctataaatcaaagtctctgttttaccgtactccactatcgttcttgtgcctttcatgaggtttgctcccataatgcaagtggtatgcctgatgtaaatttggcatgaatttcgatgaaaccactcaaagctatggacagtgactccagtgagccatgattctgctttctttggtttgtctgatgagaaaagcacgcatccatttttctttttcgcattcatttacgtgttcccccttttactcctctttacatgttcagcctttgtggagctatacgtctgttcgctgacattctacctgccatttaaatgcgtccttcgattttgcatagtactccgtagcccggatcagaacggtcaacttggaagctccctgatgcctgagctagctttggattctcttactccatttgaatcccccaaaggcaccattggtcaatccatgtgtttcagtccatgtgagcgtggtccgagcgtacataaaaaacctatcctttcgtatgcgccggcagcgattcaagtcgtacgcatacgtgaaatcgtgaaccattgatgccacctggggtcatcaggccccagtaattgaatggctaaactgcaacagctgatgaaatccatcagccaatcaatttaccaatcaatggctgcgcctgatccgctttgctgcccactgctcctccattttcctctcacgccgtccacgtgaaaaaaaaagaaaaaaaccaatctggaaccttgtggtttggttcacttccctctctcggccgcgcgaatctggcggcgctgccgaagtgccgatccgatcaaaaaggaggggtttttgccacggatgccgcggtggcgttttttgggctttctggcgtggcgcaacggtcggcttctctccgggcgttcaaaagaagaggtattttaacgcaacggtcgaattctggtgcgacaggagggcaaagggaatcgcccgcgagcgtgcaaatcttgtgcgtctgcgtgtcgtaggcaggaagccgttgggtgaatctggatcgggctcgctcgcgtcggatgcccaacgcccatttgaatcgccgtgcagatacagtaagcctgtttgtgacaagtgacaacggggccccgcatggttgaaggcttgaagccgagcaaaaatgaacaacttttaccaccggacgcttcgaggctgcaagaaagggtgagaactgaatctcacagctcagcagcattttgcccacaaagaattactactagtacttcgtttcttttcttttccttaaaaaaaaacccgtccgcagctgatgtaccgggtgcacttattgatttatgcgtgcaatgcattagggcattcccaacccaataattaggatggtgtccatagcattaaataagctgccacatataataaaaaatgatgtgtcaagtaaataaatgaggaaagagaagaatagtagtggaatagtagtgagataagtagcattaaatttaaatatggaatagtagtgtttgtattggaagagtaatgtctagtactagtttcttgatgatgtggagtttatggaaactatgtctatgtctagtgtcttgggttgggaatgcccttactggtagtaagcaaatactgcgctgatctgctgtgctggcagccaggcagtactggtaaacgataatcaaagccagatactcctacattagtaccactatgccctatgccagttaaatcactgtccgttttgatgaattgagatggataatcagggccccagcctcagcttcctctccgtgagccgtggagccgttactcgtggaccatcactgccacggtctaaacacagcagatcagtcctcaaacgccaggtctacggtctcctcaacgttcgccccacccgtgcgcccgaatgcaatcagcgagagaagatttgaaatccccccctctcatcatctcatacatcagcagccatcagccacgcccatgcacgcagctcgcagccgctaacacaaaacacaacgcattccaacacataattaattccccctaatccgcttccccccaagcactgcataaataccacctcctcgcactccaactcaaccttcctcttcttcttcttcatcatcttcttccggtttcctctaccatgggtctctgctgcagcaagacgcagaaggagacgacgccaccgcacggtggtgcagaggccaccacctccccgcaggtgaagaggaagtccggcaagatcgccgcggacgacaagggcaagaagacgagggcgggcagggcggtggaggcggcgggagacaagaaggcggtgttcgtcgtgaagacgaagtccggggccgtgaatgtggaggagaggaggccggtggtggtggtgcccaccatgccggtgcggacgtcgagctgcaccaaggaggaggtggacgcgatcctcatccagtgcggccgcctcagccggagctcgtccgggagggcggcgtcgagcgagacgggggccggtcaccggaggtcgaagaggagctacgactttgatcaggagaggagacccgggtgtggtggtggtggggatgaggagcgcgattgggagaggcatggcggcgcggtgtccaggccgtcgcctcaccggggctcgccgcagcggaagcgctctggtagtcgggagaggagcagcggcggcggcagccgtagagcgagccgatcgcctgggcggcgtgccgaaggtgtgtcccctgcaccggctccggcaggttccggcggaggcggcggcggcggagagcgggtggtgagacagcagccggggaagatggtgtccgtcccggcgagggagaaggcgcgcgcgccgtcgcccgcggccgcgtccggcaagaggtgcgcgtctccgagatcaagctcgcctgcgaggatggtggctgcagggaatgagaatgctggaggcgggcagatgacggcggcgcagacgccttcgctgagccggagctcgtcgccgtacaggcgcagccccatggcggagatcgacgagaactccctccgcaacaacaatggtgccaatcaccacaaggtaaacaacctatacaaatttcgagttttttttatgccagctattgccgcaattccctcctcttatctcaaatccctcgcgtgaatccagaaaatttcggaaaacgcgctcgccatcgccgccgctccccagaaggccacggagcgttcaaaggagaagccgaaggtcgtggaggagacggtcctcgttgcggcggcgccgcccgcgtctaagacgacggcgacgcgcacggccagtgccacggccgagagcctcaacacgaaggcccggtctcgccgggcgtcgcgggacttcgaccagaacaccaactcgtacgccacccagctcctcgaggacatccagagctaccaccagcagcagaacaccacctccgtggccgccaccgccgcgacgctgcccagcttctcgctcccggcgtgcgtctccaaggcgtgctccatcctcgacgccgtggccgacctcaactcctcgtcgtcggacagccactcctgcgagcccgaccgctccgccaacgacaggggatcggtcaacgcgccgctcggcggcggcatggacgacctcgcggagccgggcgtgcacaagaggcacgccaccgccccacggggggacatccgcggcggcggcggcgagaccgagccgcaggagtccgccgggagcaacagcgtctccggcaacccgtggacgccgtcgtgggagcccaactcggtggagtccacggaccggacgtggagcgcgtcgcgctcgacgaacaacggcgacgaggtggtcgagcagggcagcagcagccacgccggcgcgcgcagcccgctgaaccgctcccggcagagcagcaagcagagggcggcgcagccggagcacagcgtccggtcgcgcgccggcagctctggtggtaacagcaacaacgtcgttcatcgtggacgcggtgctcatcgcagcggcggcggcggcggcggcagcgtggccagcggccggtcgggtgttcgggccgtctcggccatgtcatagaaggaaaaaattatccatgttactcatgtatgctgctgttaggttgtagaatttgtgatcactgctcagtgtcattcgtagtagattgggtttctagtggcaagatggattgctgcttcagtcacagatgtgtttgtggattgtggtccactgttttggtttagtgatacattgttcagatgtaggtcattgtgtgacattggcaatgtatactcttgtcgtcagtgtttaggctgcacacttgaatcttctggtgtattgatttcatattcatttccagtttatcggcaggttcttctgttctagctcagcatataatggattcattttccatttatgcaagattttatttttgttacaaagcacgttggtttataatctctatatactatcatttcaaaaacccaattccagattgatcattgtagtccgggttcagtaccacaattccagattactctctcaagtttctcctatcaaaactgcaattcttaggatcggagtaattttctcaatgaaatgaacatggaaacttagtacaagtcactgaacatatcatggttattcagtgttcatgaatttcttttggcagggaaaacaacataaaattgacgaaacactgaaaataacacaactagagctttcgtagctcagttggttacgnnnnnnnnnnnnnncacccgtttagtaagcgggaggtcctgagttcgactctcaacgaaagcattttgttttagtagtattgtttgaattcatttttttctcttcatcttccaaatgttctaattcaagggtttttgttcatatatactggtcagatgcgaggggaccttcatgtttcaaatgttctaattcaacctgttctcttcatttgggagacacttttgttgtgttggggcgacgctaatgggcgggtgatcgcggccagcgattacccccccatcccactatacgtcctctccccttcttctcttcctaatacaccataaattttaaaataataaaaaaacaaagttagaaaattttatgtataaaaatactatgtataaaaaatattcaaattcaaatttaaatttgaatcggatatataaactttttacttatgaactttgggtctataaactttatgtgtataaactttaggtgtatagaaatactatatataaaaaaattgaattcaaattcaaattcaaacttgaatcgggtatataaacttttgacttataaactttgggtctataaactttaggtgtataaactttagatgtatagaaataatatatataaaaaatatttgaattcaaatttaa

SEQ ID NO: 20642 - DNA, 827 bp, Oryza sativa
tctcgcgctcgtgccaccggacttgccgatggaagtcacatgccgcgccgctgtccgctcaggaggcgcccaaagggccaaagaggatgaccaagcaggagaggagggttaaaatagagaaatttgttgaggagtaggtggctttgtcctgttggcatttgtgaatcttgcgttgatttgagttaggagatttatggatggtttattggttttgcatttaaggctgtgtttagttcacgccaaaattggaagtttggttgaaattggaacgatgtgacggaaaagttagaagtttatgtgtgtagggaagttttgatgtgatggaaaagttggaagtttgaagaaatattttggaactaaacacggcgcaagtagtgtgctgtttagaccatctcactacttgaacttcaaacctagaaaccgatgttgtgaaatgtagcgcgactttatctattatgtgttgtgattgcacataactgatacggaataggtggctcaaatgcagcgacaacatgactaatagttcatgcttcttcgtggttttgcttagtgcaggtataaggcatcgaatgatggtaaattccccacgatgacgactgttcgtcaacatgttggagggggtcactacacggtgagggagatagttcaggaacttgagtacaaccagagaatgttacaactggaccagtctaaggcagctgagctgcccgaaacagctgaacattctgagcatttaaagcccaaggatgtccatggaaagctcaatttaattctgaaagcttcagtggaaaccaaaatacagatgaccttcacctctcccagaaggg

SEQ ID NO: 20643 - DNA, 3829 bp, Oryza sativa
tttcccgttttaatatgccatgaacagttgatggctgtactttcactactttcccgtttcaataagggcatgtacaaaggtagagtcaaatagaagctctatatcatgtagacactagtatcctacaatagttagagataatatggtctctaatcattaatgtatctaaatattttttcttactcttctttcctttctttcaccaccatgcaacaaaatttgttctaataaatgctaagagtcgactctgagctgttgtcatgcataacaaccatactcctttatctttcttttatatcatcaaatttacttatatggtaatagagagaccactaataaagattgttgtacctgtgctaaggcatgaatagtttgagcctgaattagggattgccgcgttccaacaggcagaaatcttcgtcaaacattgtgacccggatcacgtggatcacatcgctcgcccctgaaaaatactgttatcgtcatcgacgccctgcgtgcacggtgcacccgctctaatcgctaatcctcgcggtccatctgtactgtacgcttatcttgtcataacactgacatctctctcacgaatcgcctaaactaatgatcaatcagttatcacacaatgtcaccatgtgaatgtgcagtacaacacgtacgtccctcttcattccttgacttcttctcgtaagttaagatatgccgcttctttgcgttcacaaggacaaggtgactatgcttgcacgactttccatgccacggcaacaaggatcaaacagtagtcagcaaaaatacgggtctataaatacacgacgtctctccgctggcttacacacaacaacatatcgcaagatcgatggcgacgacgaattgcctcctcgcgctcgcaatcgcgggcctcgtgcttgtctccctcccaggactctcgcgcggcgacgtcgacgctcgccgcggccgcgagctggcgggcgggtgcaacccgagcggcacgctccgcccgagcaggagccactcgtgccaggactgctgcaaggccggccggtcctacccgacgtacgcttgctccccggcgaccaccgggagcaccaaggcggtgatgacgctgaacgacttcgaagccggcggcgacggcggcgacccgtcggagtgcgacggcaagttccacaagaacacggagcgcgtggtggcgctgtccacggggtggtacgccaacggcaggcgctgcaacaagaacatccggatcaacgccaacggcaggtccgtgctcgccaaggtcgtcgacgagtgcgactccctgcacggctgcgacaaggagcacgcctaccagccgccgtgccgccccaacgtcgtcgacgcgtcgcaggccgtgtgggacgcgctccgcatcaccggcgaagacgtcggcgagtacgatatcacttggtcggacgcatgagatcgaccggtccgtgatactgttccaaatccaaactttttcatcatatcatcgacgaagagatcgtgtagcgtactcgggtggattaaagtcttaataacgagtacggtcacatccgaaaggaataaatattacaacgtttaataaaggacatgggcattgctacaaaaagagccctaccatggacttccgagaagcaccaccgtgcactagggtgtccacacatttcagccttaagattactggattattttttttttacctttgaggtcttttttaaaaatttatttacaagcaaactcttgaaaaaacatattccatgaatgaaacattttcatgatgccagcgtcattggtgtcatagtccaacctaacagtgctaatgatgttggcgttatccccctcgcacccctgcagaccgcacaagaccagaagctaagtcactaacatgaaggaggtcggcaccaatgtcaatggcgctaagggcctatctgtaaaaaaaattacattggcggtaagaacctataagtaaaaaaattaaaaatgatctaattttaattaaaaatatctacaaatatatcctcaataccaatgacactaacactaagggtgtgtttggttgggcttttcaacaaacttttgcttttgcaaaagccaaaaatcaaccaaagggtccaaaagtcactgctgcttttacccaaagccagcttttggtgtagtacaaatcaaaagcagccctccccttgctttcagctgcttttgagagaaaaaattacccacctttgccattacacaaaaacgattcgcttgtttttttttctttctcccatcggcatagctcctcctcctcctcacttcgccgtcgccgtcactcctcctcgccctgccgccgccgctcctcctcgacgagacgtcgccgccgccgccgccgctactctcgtcctgcgctggcccagatccgccgacgaggaggtgtaggaggaggaggaagaggagtacgaaggggaggaggaaatgaaggacgaggtgccggtgtccccgccgccgcctgaggccgactacaccaccgcccgtgtcaacctcccctctgccgccgccgaggacttctccgccaccgctgatgtgaccatcaagcatatgcatgcatccaagcatgagaaatataaaacatgaccaaagaattcatcgagtgaatggaggatctacaagatatcaaaattcaatgagttttggaatccagttcggccttcggagacagcactgacttcaaacggacctagcgccttcatgccaactccgatttgggtgatcttagacttcgtggaaagcttatctcgttacctttcaaacgcatccggtctcatgtccaaattcatcttgagtcaacgggaatcgccaaaacaagacagtgttattaccgaaaccgaacttgggccttgggccttgtaatagactaggcccatctcggaagtgtctccctccacctccacgaattagcacttaaccctagctttattttcctctataaatagctttgtacatcctcaaaaacatttgggttttgtttagttgaattttaccaagtgccattcaccttgtctctagtcctcgttcgattagtcggcgactattgattcagagcccccaatagttggtgtgttgatttgccgggtcgattagatctaccacttcaatcgcaactatttctttgtgctaattacctattcgcaatatttagattgcatcttatcttgttcttgcaatgttctctcgtttgcattgcagggatcatcacccgcgcgtcatggttggtacgacatcgtttgtggtgtagcgattgcatggcgtcctggacttgttctggttggtagccacgtcgtaaacgtcgcactcaatcaaagcgagagttatcccctcaccagaagatcgggccacaagagagagcgtcatcagttggtatcagatggtatcagagtatcggttgcctggtgaggattttagttttatatatttattttccctacccattatctacaaattgccacaccactttttccttcaccaaacattagttttgagccttgcaattgttattcaattttgctttattgagttttggtccactgttgtgtcaagtgctggttttagttctagtttcgtcttggtttgagttttgcatcttggttgtgcattgcctgtgcgttcgagcagtggcggaaccaggatcttcggacgactagggcccaaattaaaggctaaaacttgccatgacaaatgtgcaacaaccacatttggttctagcacaatacgatcttgcttattgttactagccatggtttctgctgaattaggcattgggatggagtcattggtttcttccgtttcctgagttgccgga

SEQ ID NO: 20644 - DNA, 525 bp, Oryza sativa
ctgcagcccctcggcaggcggcggcggcccatcgtatcgggaaaccggagccccccagccagccaccaaatcgacaagactcgtagtcccccccctcgtgcgctccccgtcccggcattgccgccgctgtctccgaggagtggaggtagacgcgccgccgtttgtcgatcggatccttgcttttgcttgcggttgcgggcgggggtttggggtggcaatgggcgccgcggcgggggatggacgggaggaggaaggggtgatggcgacggacttcttctggtcgtacacggacgagccgcacgcgacgcggcgcagggagatcctggccaagcatccccagatcaaggagctcttcggcccggacccgctcgcctttctcaaggtggccgtaacgatctctcttctctcttgctaagtgtatctctctgtcactctctttttgtgatctgccttgttctaggtgaaattttgatgcaatgcgcgcgtcgtaaattgcttgcttgctcggacgacgtgctcctcgcg

SEQ ID NO: 20645 - DNA, 9502 bp, Oryza sativa
tgtgctttgcttgctctctgctacggctctactctactttctctctactgcaattgatgatctgttcattttactctcttgtttgttgggtgcggctgctgtgaatgcattggattggaggactgatgttgtttgatgtacgtggcttgtgattaatttctcttttctgaaatctacaaagttctcaactctccatgccgtcattgatgtgttcatatgatgttatattgtgtctacccttttgtgctatatgcaagtagttgctcagaaacccctgagcaagtcagccttaagcggcatctaggcgtcgaccatctagcgtttatcgccttcttgaacattgattttaccaaacatgtatttttatgttaataaaatttgctaaagaaagatatctacaacaatattaccagaagtgtgattcatctacaggagtgggttcatctttaaaactcctagtacttcagcataacagaaaagagttatgaagtttgctacaaatgctggcagcctcctgaagcaagtcctttagaatgtagcttcatcacaatgcagttttaaaaagagcataattgggtatatatacactaaaactttacacccactttttaactttttagtactaactatcaataatcacaaacaattttttaattatggcaagagtgctgcctaatgcattaaagtagaggaagaaaaggtatgtttacatgcctctcactttcagaagatgacatgtggcgagtactaaagaaagaaagattaactgagggcatggctatattatgtcatacaagaaataccgtttattgaatgaatgagccaaaaaaaataaaaaaacataaatcaaatgagttaatctcttcaagctagtagtacggaagaaccttattgttaatgagataagaaacctggaatggatcggtggaaaaactttgaaagatacttctatttctctccttccagctattccaccaaatatgaaagattagtctgccatagcttctgccattttttataaaaatctaaattgccattgccagccaccatttgtttgcattcatattatttttatgagcatatctgctcttataagacaaagaggatacggcacgtgggaatttattatttccttttgaatgattgcatctatgtgtaacctaaataaaatattataaccctaccaaaatttgatgtgcacttgaaacacatttcttggttatatttctatttcacccatcaaaattgcattctgaaactatttcagattagcacgttacgtgctcacgctaattactattagcaggccctattgatccacaaggaactgcgaatcacgaaacatccatccgtactcagaaagagaaacaaagggtgcaagtaaaaaataaaaactgcctccagtaaatacctattaaagagtcaaacaacacaaggaatgcgcaacattctagactccaatgggaaccttgaagatgtccagccacgcaacatcctaatatggggaatgtacctattggatataaaagaataaaagaacagatatactgtcaacaatcaatgtagtagcaatctggattattaatttgcagagatgactgcattaaaagatatctgcgaagaagatgaacactggtttcaaagtgctcaactctttcaatgcaatgaggaacttaatatcgatgccaaatcaacaaaatagatatgaaatgtgtagtataatacacttaatttctatcacatatataattcaaaaatatatgagatgtctagtaaagtacacttaatttctatcacatatattatatgcaatacaattcaacaatccgatgctcgttcagttacattttgttcagaccaagtatactgtataccactgaacaattcccagacactacagcaactccaacttttcaaaatagagaatcattgatggtggtttcaatttgccccggactccccttccaatctactgcaatcccttatcgaactaatcgaacagaattcagacaagtagtaggggaaccgatcgctcaccaagtatggctcggagtcggagcggctgctccacgcggcggtgcggcccccgtcagcgatcacgcctcgagtaaccctgcagcttcctctccccccaaccttcggttgcgggagcaatcgatcatcggaaactggaacgattgggacgtcgccaggtaggtcatgggtggagcggcgaattcgagatcgcggcgggtctcgtggacgcaagaggattctggaggaggggagcgagggggtccgtcagggcagaggcggaagcggaggcatggcctcccccgccgcgacgggcatcgccgccgtgagtgcgccggcagccggcggggacgcggggtctcgggaaagagaagggaaaccgatgggattgtgtgcgctcagcgaggccgcatgtctggcccaaaataaaaagcccaggaacgtgtgttcctcattcggcccggcccatttaatcccatctaaatgagcccatctaaccccatctgcgcgaaggagaacgaagcagaggccaaccggagagggcggagacgaatcgccggcccctcctctcgccggcgggcggccgccaggccgggaggtcggccggcgacgcgccacggcgaccaacctggtacgcacccccactgcgacgaacttctcactcttgatgcgaccgttgcaccgacgcctccccgcccacgtgcataggcttccaattaccccaagtcgcgatcggttcagaggcggcggtagaaacgctgtttccgccggcagcgagggaggggcggggcggggctctccccccggatgccgccgtgcggggaatgattccgtagggaaattaaaggggatcgtgttcctccatcccgccttgttccattgctcaagttgcgcgtcctgcctgcatacggggtgatcattatgcttgtggtcttgtgttggtgtgggggaagaggaggaggagggtagccccgcatccagagatagttcaaacaagcaatcaggtgttcttgtggtgttgccatcaatacagatttctctgtctacctgacctggtcccggccgtggcctgacatgtgctgaccttgcgcttggtcggtttgtgccaaattagtagaattgtagccacatggatgctttgcttgcggattgttgtacgaggggcttcttgttttctagtcattgagtccgacgaaattttcttcgtgctaagctattgttctgatagaacatttatgatttgatgcgttgtagtatagaacatttatgatttgatgcgttgtagttggtcagcgtgctaaggcaagttgacggaactggcgtgctaaggcaagttgacggaactgtaggatgaatgcaacttttttttttcgccggatcaatgtaactctttcttgccatgaaaggttgaaagtgggaaaaatgcaagtttcttaaaaaggaagaagaaaaggtgaagaaaacggcacaaagcttcctgcttagtttagcttgcgtataagcctggtagcctacttgatgtaaccaatttttttttagctaagataagatgcatctgttttgatcgatgattttatcgatgtagcttttgacacatatagttgtcgctgatcctgatttcgcacagcgttagtagtttttaataaaacggtttaggggtaccagagcatttccctagcatttcttgtgtataattgtttcagatttttcatctttccgttaaaaaaaatcatcttaaacaataaaaccaactgtttgaagccagggatgatagcttgatcttcaactagttgttctgtcaccccttccgtgaatctggtcggtcaggtgatactattgtatactgcactacacaagaattataacccactagtattgtatctttgtcatggataagacaagtctcaaaatgtatttcatctggttgccatacatctcagtgccatatattttacatgaatgacatatataaatgttaaatgctgctatgccccataatctcaatttggatataatcttccagaagaaatgggattgcggacatgttactgacagacaatgatctgttatgtactgggatgcatttgattgtaagggattcatgatacgtagctggcactgttttgcaatgatcttgtgcagctatactcatttctacttgtccttgttcatgatgtacatctgttgacatccaaaaccatcattttcgaagtgaagagcaagtattttttacagaattagcaggtgccaggttgcattcatgtttttgtttggcctcttgcataggctgcccggaccaaatggtcccgaaatgaactctttattatcctcatgtggtattttttggggaatgcaaggccaaaatcatggtccacggaagcaacatgtcctacatattacccttgcatgtcatcttttgtgaaagttaaaaatagtttcactccatttggataattggatattgatttagaattcctttcatgtcttctgaatcaaatggggagaaacgacaagtaggccgtgagactggtatgaacatccaacttatgtgaacttgattgtttatttctatactctggtttttgttgcttaatgaggttgtactagtatatagttcagagtatcataaaggcctcttgtaagcccagaatttttcctgtgctacaatcacaattcacaggtcacagcgcagaccaaaggtttgagtggagggctataccactatagtacttagttgtatgtttcgtggtgaaactgtagtagaagatagcagctgagcagaggatgatgtgttgatgtgatcgaggaatggtgataatgtatgttctgtcaatagctcctggattcttggatatgtgggacaaaagcaaagtcatgataagaaatgtacagtggttcttgtgcagctcaggaatgttgagctaatggattttatactatatgctatatatattaaatttgttctaatagaacttggtggcttgtgagcaactcacaaacacataatcaaactcaacaattataatgcagtgttatattctcttagagttaagctctgcactttgtactgacatttgcaaatgtagcattcatcgccaatatggagtaatgactatggtagtttactttaaagaacacaatatgtgttctctagtgtagccaaaaattttaacaattgatttcaggtgatcagcatattatagctgatagctagtgtgattaataaatactacctccatattttaatgtatgacgtcattgattttttatccaacgtttgaccattcgtcttattcaaaaaatttatataattatcatttattttattatgacttgattcatcatcaaatgttctttaagcatgacataaatattttcatatttgcataaaaattttgaataaaacgaatggttaaacgttgtttgaaaagtcaacggcgtatatggagggagtacttgacatcattgtgttccacatgctgagatgccttttttttctcattggcaggttactactggagattactacttcatatttgctcattggcatattattagtagatggggactgtttacttcacattgattttgcttgctccatacagaggcagagaatcattatggaggttagtgtattgatgttgtgtttttgtttttgtttttgttttttttttctgctgtgttacgctgaccttgaggtttctagtataggttttagatagtgactcttttatggtccttagaaagtatggagaggtatacatatatcttactgtttaactattttttaaagaagggcaaaagttatgtcatgtacatgtctagattcattaacatctatatgaatgtgggcaatcctaaaaaatctttgtgtttaatcattaagtatgataacaaatcaaagtattttgaagtatgaatctaattgtacaagttttatacactaaatgtacttttatgttaactaattattagtcaaaatctttcacatttgactttctgaaatcaaaatactacttataaaagcagggagtacgttttaaaggctgaggaaaaggcataagggcatcagccccagttccatttttattaaattaagccaacaattcttgtacagtttgagttcgatcagcaccatatctacatttcattaggccatcttaaatagagatcatgtgatctttgtttttttaatcctttggagtatatccctaataaagaacctccatacttagttttggtgcttgatttgaaactactaacgtgtttatgatactttaatttgcacaaaaaggtcttcaatatacggataggcagaatccaaagtactagcataatgcattaaattagaccggcacattatcatcaaacaagcagtaaatgacatttgccatattctggctcgagtggtgctcaagaaagccaggacaggaaagcaagagctgctgaaacatcactgccatgtagtaagcacacagcgacccaactatgtatatatactcctagttgatttagcttatatatatatccatccgtaaggaccctgctacaaaccactaggcgcgcatgcagctccatggctaaaaacactaagcaaacgttcctaacacccagagctaaaactcttgacggctacaaactacatagatcatgagttcatgacagccacgaagctgcattacttggcggccgtcttcttggacttgggcacggccttgtcatggccgtgcgccggcggagccgagttgaggtcggggagggacgcgcggccgccgccggcgggcatgttgccgttgccgttagccttggtcgcggccgccgccgccgccgccgccttcgtcttggcgagccgctgcttgagctcggtgagcaaggcctggttctcctggttcagcagcagcgccttcttgcgcagccgctcgttctccttcatgatgtagcagttctgcaggtacagcttcgcgttcagcctgtccatcttgtgccctgctaccaacaacaacaggataacgaagtttagcagccatgtggcgtcactgtgtggacccctgttttggacttatgttgcggtacgtttttttttaattgctttttcgcatgctcgagtctcatattatatgtactctgctatggctgcagagaggggggaagaaagacgacatcgaagctgaaacagtggactattgtgctcgagatccgataaatattatcctgcatactcagggtgtccctgctttggctacatcctcagaggtactgtaagaagctgctgctatattactttcttattattttcacattgtgaggccaaaacagaatagacactgaagcttctacgtaatcaagaaagtgaattagccaagtagggtcacacttaataatacatatttaacatgctcttccaactactaatggaaaaagaaaacagcttgaacaaaccaaaggtggtactccatattggaggaagcagattgcatgcaaagcagaaacaaacaaaaagcgtgccaagcgcaaaggcgttacgccgagagaaagtggaggagaaggccccattttgacacccccgcgcatgattgtgcatgcatgcaaacaagaagagcaaatcaccatgaaaggaagagagaaaagaaagaaagaaagaaaaaaagcaaaagtgacgggactaatagaacatcacctcctctctgcagggagctgagagctgtgatgaagatgctgctcgctgctggggagttggagacgagaggcgagagaggtcgagcggcgacaccagaggaggcagggtgggcagcgagtgtgaagtgatgcgagaggctgggctactactacctaagctacgagaccggtcgctgtggggcaaggcagcgagaggcaaaaggtgagtaaggaacaacgagaaggagcacgcagtcctgcacctcctgctggtatgtgcgtgcttctcctcctgccttcctgtgcgtgctgtgcttgctagctcgtttctgtggtggggcttatttataggcgcagaaaagcctcccttcccgtccgtccggctcgtcgccgttcgttggtggatacgaagctctttccccctcgctgacgcgcgggccacctaagaattgggcgttgcacgtacgagttagagcaagttcaatagtatagcccactactagctctaattcatctatagccaatttaatagccaattcatacaatagttgtttacaatattttaatatatgatctcacctgtcatatacacattgcctcttaaaatccgtgctgcagctggctacaaatctgtagcccgcagcccgctaaaaatatgtagcccgctgctcttctctcttatcgtttatcttattaaaatatgtttatagctggctaatagcctgctacctgctctcttatggggggattgtcccgtccgctctcatgatcgagcactttgaacgcgagggaacgaggggacggcgtaaatggtggctaatgatgaggttccgtgggggtccggccctcacgtgacggtggctgcgttattctcctcccctccgctgcacaccaccatgccggcaccgtcaccccgcccgctccattgcaccacggcacggctaatctcgccgtctcgtgccgatgtgaaaacatcgttaggccgccgcactcttttccccccttcaacaatccattcctatttattaaacacaaaaaatacgtacgttcttatcaatgcttaagatagttcttctgctccgatatacaaggaattttttttactatgcacctggacgatatttcaaaatataagcattttctatatatctggttagaggaattttacagtacttgaggtacctaaattaggtacataaattttatactaaaatttttagttaccttgagatacttcgtacttagtatctagagatactaaattttacactagaaagtatggtaactctagatactttctcaagaatagtaaaattacccatatgcttaaaaaaaagcttatatattggaacggttgcatagttgaagaatctctctaacagaagtggttatacggctctccatctcaaaaggggttttaatagactatccatatgtgttcccatcccatctaactaactaatccattgctccaaccacgtcttcctctcattcctttcccttcattggatttagacgaagagggtgagatttgcgtttctctctgctatgaatgaatttaattgaccattgaaggcaaaattggttatataacatcgaaagttcacgtttttggttttatagcaccgaaagttaccggttcactttaatagcatccaaagttcaccctgttcccatttttagcacttccgtcaatttttccgtccgtcttgatcgttattgatccagccacacacatgatatgacatttctacccctcattgacatgcattatacttgtacttgtgaggggtagaaacgtcatatcgtgtgtgtggctggatcaagacggacg

SEQ ID NO: 20646 - DNA, 28868 bp, Oryza sativa
gtacatgggcaggggggcagaaagttagatgtgcgtgggcataatgaatgggctttggcaaaaaggcagaacagggccggtcaatgtggcgcatcaattcgccccatggaaaacttttttctcccctcctcccggccaaccataccagctagcacaagaaatccagacacgttggccgtgtcagggggtggtgaaaaattatcatggagcttgcagactcttgagcacccataccccccataaccagcaaaattttcctgcatatacttgcatatgtagctggccaaattccatgctgtgccatgcttgctcacatggtgaaagtgaagagtaggtagcagctatgtagtactactgtgtacactcttgggttgtgttgtgtacgcacgcataatgtgcagtgtagtagcactgtggtaacatagatgggaggagtattttttgttcggtgtagtggcaatgggcatgatggctacactagcctagcaagcggcaagcactcgattaaggtgtggatctctgcgcggcgatacatgcatacacggcgtgcattgctaccttccaaaaactgctgcaaggaaccgaagaatgatgccgtgtttggacgcggaggtttttagacgaattccacgagaaacgacgcaggactacccacatgaacgatcaggaaaattacacgtgttttgatctggacccgctgttgcactcgcagcaaacctgtctggtcagcagatattagtaatccctccgtcccaaaataagtgcagttttacattattcacgttcaacgtttgaccgctcgttttatttgaaaattttttatgattagtatttttattgctattagatgataaaacattaatagtactttatgtgtgactaaatatttttaaattttttacaaattttttaaataagacaggcgatcaaacgttgggcacggatatctacggctgcacttattttgagacggagatagtaactgtgtctttttttattattatttcttgatagagagattaattacaccctccgtttctacaccaatgacggacccaaaaatcttttttgattgcaaatacaacaacaattataaacttcgttaatcactataaattcaagaccttacaatgagcccgaactctgggttgtcgggtcttggatccaccattgaacgaatagcttaattttagaacgaagataaaattatcttgttcttattagggttttacttatcatcgatgaataaccgataaaccttaggtgtgttcggaacatctatctatgataacagcgtaactactagactcaacaagcaaaaaattatactaatggcccctttaaatcgtagggttgaaaaaatagaggaatagaaaaaacataagattctaacaggaaatgaagtgtaaaccagataattgcaaaacacagaaaaaacacaagaatgaggtttgattagaccgcaggaaaaacacaggaatcggatgaaagagatagactcaaaagaaattttccaagagattgaacctcttgctaagtttcctctaaaatccacatgaaatgtgtcattccataggaatttcataggatttggaaagtttcagggccattttgaatcgcaatattgaaaaagtggaagaataggaaaaatacatgattctgatatgaatgcaagtgtaaaacagaggattacaaaacataggaaaaatataggaatcagatgagaaaaatagactcaacgaaaattttctaataggttaggccccctttgattcaaaggaaattcatatgaattttagaggattttatttcaaaggaatttcatagaaattttagaggattttattcctataggaatttttcctatatagccctttgaatcaaaggaatgaatcctatgaaattcctatggaatgtctcttcccatataggttttggaggaaatttaacatgaggtagaacctcatagaaagaatcctttgagggctcctttgaatcgcaggattgagaaaacgtaggaataggaaaaacgtagaattttgataggaatgtaagtgtaaaacagaggattgcaaaacgcaggaaaaacacaggaatgaacgtttgattgaaccgcaggaaaaacacaggaatgaacgtttgattgaaccgcaataaaaacgcaggaattagatgagagagatagactcaaaggaaagttaccaagaggttgaagctcttgctaaattttctccaaaatctctataggattgttcattccataggaatttcaaaggattggattggattcaatcctttgtttcaaagggtttcataggaaattttcttataggattgaaatcctccaaaattcctatgattttcctccaaatcaaaggggccctgagtctttatctctcctcaaattcctgtgttttttctatggctcaatcaaacggtcgttcttatgtttttcctatgttttgcaatcctctgttttagacttgtattcctatcagaatcctatatttttcttattccttcatttttttatttctatgatttaaagggcccgcctctttaaatcgcaggaatagaaaaaacacaggattctgataggaatgcagatgtaaaacagaggattggaaaatacaggaaaaacataagaatgactattcgattgaaccacaggaaaaacgcagaaatcggatgagagagatagactcaaaggaaattttccaagaggttggacctcttgctaactttcctccaaaatctctataggattatacattccataggaattttaaaggatagtatagaattcaatcctttgtttcaaaggctttcataggaattttttttcataggattgaaatcctttaaatttcctacatttttcctacaaatcaaaggggctcttagagtggatgttaaattttctacgtttttcctatagaatcgtaagaacatgaaagttacatatatttttccttttctcatttctacgaatcaaagtcatgaatagtgtaggatttcaattcctttatttttttctccatttttactctaattcaaaggggcctcaatcctttaaaacaaaaggccaaataagaaaatttcctacagaatttaaatcatataaaatttttacataaatcctttaattcaaaaagccctaaagtgctacatcgttgtggctgtgcaggaactgtccagctgaaccgaaccaccccttgtcacagttaggattcgacaaggaaaaccccggttctgacacagcaaattaatgggggtggcaacacaagacgggcacgagcataccctttcaaaaattttcacctgacacatcgaatattcggacacatgcatagagtattaaatatagaaaaaaaaactaattacacatattatgtgtaaattgcgagacgaatcttttaagcctaattgttttatgatctgataatgtagtgctacattaagcatttctaatgacgaattaattaggcttaataaattcgtcttgcaatttatagatggaatctacaatttattttattattagtatatatttaatattttaaatatgtatccgtacatccgatgtgacgtggcaaatctttttatccagacagccatagacggatgcagtccgatagcatcgcattgaagcgcatgcctccccactggttatttggagtcaaacaaagctagagatgctcctccggcccccatcatggcgtggggtggcacggcatgcagccggtcgacacgaagcgagggatcaatgggcatcttgccggcgcgcacgtacgctctcgctacgtgcaactcccgtcccggccatgccatcatcacgccgaatcgccggtcgacgcgcgccagccacgacgatcgacgacgtacgcatcgtgtaaagcgtatcacctcaccaccgtgtcaatgaaacatgtgcaaaccaggtcccactcgtcaaatctcttaaagaaaatgtgtgtacacttcccactactgtctggtagagcaaaaatgcacaatgtagtagtactattacggtcggaagtggattgtttattagtctatgatagattgatagaacagtactcacactcacgatgcacactgctaacgggaggccgacaactgggtcccagtacgaggtgccgcgacttaatattagtaaatgccgcatcactcttcaagtgccgtactggtttcatggtgtggtgcggcacagcacatcgatcgccatcgaccgctctcgcttgctgggctgccgtgcgtgcacgtgagaggtaggagtcacagcacaggacttagctgctgcctgctgcaccggtgcccctgcatccgctggtccgtctcggctaatttgcccgccgcgctacgccctcggccggtctgacacatccccggccgtgttggcgtcgcaacagtgtcgttcatatactactcctcactgcgcagctaaactctagcggtagcagcaaccagtgcgtaggcgtagctagctatagctactcgcgcgctgcgcgccgaatcttctttgagcacgcacggatgacgcatgttctctctgatgtagacgcccccgtgtcagggccgatcgatcgatggatcgtgtcggcaagacgccaaaaggacacgttcttttttttcaactttgctgtacatgcacggcgtagatatggctggagtctggagagcaacccggtcgtgtcaaagccgcactcgatcggcagagccaggagtcggatcgacccggccgcttgtgctcatgcctacccataggtgacatcgctgctactgtagtagtagcagtagcagcgcctaggtcgttcaattgttcaaagttgcacgagctgatcaggaagtatggtaggagtacgtacacagtgatcagtagtactccgtagtagcttagcctgctgcctgccatcgtgacatgatgcacctgagagaaaaaaaggggccaaaatgattggatacgcctttcgctttggtaggggagggaattaattgccggcgacacgtctggtgggtcgcgtcgctcgcacagccggaccgccgatgatggcgcggttgaatataccgctccccgctcgcgcgttgccgacgacgcgcaacgtgcgtgcaaggccggtgtgagacccgatcgcgaccgatctgccgccgctactgatgatgcccgctgctgctgccctgctgcctaattaacatatgcttctcctcccgcgatcgatcgatcgatcgacgccaggacggcgacgacgaaagctggggacaaaacggagcccgggggaaacatccgaacatggcagcacacgtgcatgggcagaggcgaagcgaacggtgcgccgcgcgatcgatcgccatcggacggcccggaccgtgtgcggggaaagtagaggaccgaggttagctggcgatcgagcggcgactgctacctgctccgtttgcagccggccgcagtgcaggacgacgcagcggcagccttcggtttcgcaggatgcatcgccaaagcggggagaaaaaaggcaaaggttttgcagctgcagatcgaacagatggaatgatgatggagagacgaccaaaaactcggaattaagatggccaggagaaaaaggcattgcgactcatgcatatgcatgttcactgtccaggcaggcaggtcaccaatctgatctgatctctgatccgagtccaacccgacaggaccgtggaaggtccgaacaggcgctcgtttggctgtccaggactgtagtagatgccaaggaaaacaagcttggaaaatatcataaacgtgttttgaaatcggttgctcactctgtttcaaaatataaatactttcaatatcaaaggctgttttaacgtaggatttgcgaaaaacaaaaaaaaaatcctaacaataaaacaagctaaaataaagaattacaaaacatataataaatgcataaataatcgtttgagtagaccgtagaaaacacacatagaaatcaaatgagagtgatagatacgaaacaaatttttcaaaagattggagctttactgacttttcttcaaaatctctataggactctctattccatagacattcaaaggaagaaatagtattcaatcttttgtttcaaatgccttcttaaaaatgaatttgctatactacttacgacataaaatttggtggaaaagcaaccaaaattttcaccatggcccgagattcatgcacgggttggagagaaaaaaatcaagggatctgggatttgaaagtgtgatgtgcaaaaccgtcgggcgtttcttcaccaccacacgacggggtcaattttatagttacattataacgggacctaatatatatagcagttatatagtggttacaatattattacagagccaagttacatttgaaatgattttactcaaaagcttgcgaaagcttttaagataagatagtccccttacaaatcctccaaaattttcatatatatactttcttaaaagatgctggtggtggtggcggttctgccactcccatctatctgacaagtgaaggccacaatctatcttgagctcatcattgttgaccaacactgtactagagtgtgaagttctatttgcttcatgtacagtgtacaacacattgtttatcctatcatcgttaatcagagcttgagagtgatgatttagttttaatcagatcatctaatataattagagcccgctacaacgcacggatatttctacaattcaaagggagcctaaaagtaggtttaaactaaaatataatcattgcttgtcatacaaatttgtgagggttacggataaggcataccctctattccaggagttgctagatatacaaatacgatatatcttatgatatacgtaaaggaatatgtaaagtaagaaaatcagtgaaatcgtatgagaaatattcttcacgagtagggccatatacatatcctactcggagaagggaaggactgtattgtatcgtgcggagtctgatatctccgagttctacttggaaaccaagatgaaccatggtataaatacacacccctgagggatacaaggcatcgaatccttagtgcaagacacccaccaccgcaaaagcaatccggagaacttttgaagcctattcgccgatagatcccgtcgagtccctctcgacaaggatctcgtcggtaatcttagagtctatttatcttcttttgtactctgttgttttctttataatcccatataaactgtattagggctattaccttacgagagacctgaactagtataatccttgttttctgtgtgtttgatgccgtatcgtgtagatcatcgtagcaacgtaccccaataccctcataatacggtctacgggcatcccccgtgaacacaattaccttttatttaattttcatctcaccttaccccaatcatccctggttcattaagaacattatactagttcttttctactcaatcttaatctttattaaaacctcaaaagtttttatattttcaaacagacagaatatcactcctctaaaatgaagagtaaaaaacactagaatccttaaaattgtaccgtagtgtcacaatcatcccggtctctaacttttgaaaatgtagatctacgcccctgaactatcaaacatttttcaaaagtgtcatatacctttcggttgttgacatggctggacatgtgatttgtcgccttgactgtctctatgttggagaccaagttacttcatatttatttatttgagtaaatatcagaaaactacaaatacttcaaattatcacaaaagtataactttaaggtgatgtatgacaaaactacagatttaacaataattttataacaaaactatagatttagtaacaaagttatcacaaaactacagattttggagtttaccttcgcactagtgttatatttgagttataaacatctaagttttgggattgaattgacactaaacctatagttttgtgataattttgttactaaatctgtaattttgcgatgctccaccttatatatgtagttctccgagaaatttaatgttaaatctgtagtttttcgatgcattaccttaaatatgtagttttatgataattttatgaaagttcctatagttttgtgaaatttactctatttatctttgaagactaagccaataagtcaagtacgtgttacgtagtcaaaatcgctctcaataatgttaatattgtcgaaaaacttgatttgctctggtgtagaaattggaagttgttctacttagtttgtggagtagttgagcgatataaatgaaactcggtctatagttgagctatataaactcgtcaagtggacttttttccataatttgatctggactctgtagaggatcaatacatcttccaacgaacaatgcaagaacgcgcatcttaaaaaaagaataagttcactttgactctctcaaatataggtccaatcttattcgtattccttaatcatgctggatattttgatccctaactattaaaactgatgtagtttaactacctcgatggttttgagagtgattttcgctgacatggctcgttgataggtataaccgactgagtcagcatatggggcctacatgtcagcgccacctctctctctctcttcttgtccgcaacgtaacgtatcctcgcttactccgctacgcgctttagcgagtccagctggggtagtcggtgacgtcactatcaacgtcttcaacgccgacgagcgtgggcatgggctcaagggcagccacggtgccatcgcccgtctggagcaggaagtagcagcggaggaggcgtcgacgctggggtcaccagaggcaaataggtgctggccttagagaaggtaatgatggcatcgaggagagtggtcgctgcagcaaatccagccgtgccgtcgctccgcctcaggtcaagttggtgcccagctcctagcccactgtgcttcctggtcacgctccccttccccatagcctctggtagaaccactgccacgactactttcccgcccggtgataggatggtacgagagaggggagagaaatcacatccgtcgcaacaagagatggaatgcatcttgcctccctgagcacaagctgcatgggagagggagcttgccggattagggatgagcgggtgagcttgacaggacacgttggtcgccaccgccattgtcttccttcccgcagacaagcgggtgagcttaagctacctcttcgccggagaaggtggccgccatcctgggaagcagctcaagctcgacggtgttgccccgggctggtgcaaagcttagagaggaggaaacactaatatgtgggccctagagaaaatcaccttcaaaacaatttagtgagtcaaattacaccggttttcatagttaaaggatcaaaatattcggatattgcagttgagagatacaaatcatattgaaactgcctatccattttgttaggtgatttctaacaaaaaaaaatcacccagattttttttacccttgcatcgaatggactataaaaaaaataacaaatacatatttacttacataatatttttatcaaaattacagtgcacttacatgtcatatcaactaaatttacaaatgtaattttggttatatatgactgtaattttatattttaaataaaataactaatacatatttacttacacaacatttttatcaaaattacagtgcacttacatgtcatatcaattgaatttacaaatataattttagttatataaggctttaattttatattttattttagttaaaaatgtcttaatttttcaacagttaaagaaatcaatttttatttggaaaagaaagggagagagagcgataaggaagcaggaaaagcaagagcaagaaaaaaaaaagcaagaaacgtcattcgcgctgattcctccactaatcttgacgcacgatcctaccgccaaaaaaaatcaaatatcagagaagaaatcactcgacagatgtttagcaaaatcgaatcatattagacatacataccaatatatgagggtgtcaaagtggactttttattcttaaaaaaacgactgacaggcctacagaggaaggcataatcaatgcggaagtgtttcgagtcatctcatcacatggtacgttgtgttattcggcctataagagcccatttatcccgaataggtccccagaggaaaaaaaagaaaaagtacaccgaaagtccctcaacttgtcatcaagttacaaacgtcccccaaccacaaaatcagatatccgacgtcccttaactaatcaaaaccggtcataatatatgtcctttgatggttttgaccccggttttatcctacgtagaggctgagtcagcatgagacccacgtgggccccacatgttaggccgagtcatcttgctcccccttttctcttcctcggttcatcctccgtgcacgcctcgtcggcgatgctggcatcgaacacctcgatcatccactcctcctgcaccacggtgcgcacccactgcggcatatcgacgtcgtcgatccttggcaccacgttcgtcggcggcttccccgtgagaatctatgacgagccggcgccaacgccatcgccgtagatgaatgccacaccgcgtggggccgccaacgcgatgtgcgcctgcgacgtgaagccgaggcgcacgcggcacacagcgctactgtcgccgtggaggaggaaggagaggactccagcgccgacgaagtacgagacaagaagcttctcgttccctcgcctcctccgccgccgacccggtctcccccatcgccctcgactcgctcccttccccttcacccgccgttcccatccccacccccgctgccgccgccacccacctcgccgtcgtggcctacctcgccgtttccgcgcctgacttcgacgtcgcggtggggccctcttcgcgcgccccagcagccgcgcgcgccgcgcgatcgaggagggtggggccgcctcactcgcctccgacgaggccgatgccgtggcggaccagctcgaagccgtagtggggaaatcattctcaccatcgtggggcgaccgggccgcgacggaggagcagtcctcccgtgtagcccacgacctccctcctctcccgcctcgccccggcggcatcctccccagccgccggccgacttgtccatgtggagaagagaagagtgagagagagagaggaggaagggagagagatgatgtggcaacctgacatgtgggacccacatgggtctcatgctggctcagccgctacgtaggataaaattggggtcaaaaccaccgaaggacttattgtaaccggttttaattagttaagagacgccggatatctaattttatggttgagggatgattttataacttgatgacaagttgagggaccttggtgtactttttccaataaaaaaacgcttgagttcttgttaagagaggaagagaaggagaaagtacatcaaaggtccctcatcttgtcatcgggttacaaaatcatcctccaaccacaaaaccagatcgtcatcctccatcttataaaaccgggtcactttgggtccttaggtggttttgattctggttttgtcccatgtggcagctgagtcaacctgagacccacgtggacccacgtgtcggggtgaccaggtcatcacccctctccctctctttcccttctctcgcttcatcctctctctctgtgttctcatctgggcaggcggcaggccggccgacgggtggggaggagggccggcggggcgaggcgggagaggaggaggtccggcggccggtgacgggcgacgcgccggcggcgacaatgcaggagcaggagggcatcggtggtgggagcacaaaggagcgcgaagggggagcatagggagggccggagccgggccgaagcatgggggtgggtgtggaggcggaggcggggcctgtctgagagcgactaagcttcggctcatcaggcaggaggcgacgggcagggatttgggggaggcgaggtggtggagcagcggcaacactcgcgcggggccaacttggcctactgcccctctactgcgtggcaggagtggagcggcagcggccggcgggagagggcagccgccatggctccttcaattaagcagcatcaaaccactgcccaatccccacttcaaaccatgtagtgctcgccgccgcctccctgcgcccggcccgtggtcgagagtgtcagtcccagccaggcggcgccatccctggggcattcggctcaggccccgccacggtcggtccctgcgcgaccaagcggctcgccacgaccgtccccggtggcgcccctactgcccccgctttgtcggtatccgtggcgacgagcgcgcccgtgctcgccacgacaggcgcctacccggcgataccagcaggatcacagggcacctcagcctgtgcacacgacgatccacccgtccgttgttgggtattttggtggaggagaataaatagagaaaaccgaaaagcagcagaagtttctctgcccaaaaatattcagagaagagtgctctttcttcagttttcacgtttcctgaaattcttcgactactgttgcggtcctgaaatattcagggaagagtgagcgtgggaaactgttttaaacactcgggtggacgttcacccgtttctcgggtggacgttcacccgtttcttgcatgtcatctaaatggttatgaaacattttcaaaaaaaatgacataatatgttaatatgcaatatatcacttcacaaacatacaagttcaaattcgacttctacaagttgtaaaaaaaataacaaatttaactgtgaatatgtgtatactagttagaatttgatttgttatttttgttataacttgtagaagtcgaatttgaacgtgcatgtttgtgaagtgatatattacatattaaactatcttgtgaattttttttggattttttcataatcatttaggtgccatgcaagaaacgggtggatgtccacccgagagattagaatccatcctcgagtgagcgtgagcgttttcagtttgatccttgtgttttgctgacatccgcggtcaccgccggcgtcgccggtcaatacatcatccacgcaattgttttgctcctctgtcctcttccaagaaaaccacgcaagggagctccgcggaaacgtcgccgccaccgatgagatgactacaagacatgacttctgctccatgttcttctttcgcagcagccgcgaccacgtcaatgtccccataagccaccatcctgccgctaacgccctcctgctcccgcgttgcggcagggcgaggcggcgtcggcgagcgagcgcagtgtcggcggcggctgcgacgtgaggcgacgctgcaacgccgggagcgttgtagtaggcgttgaggagcgccgccgtggcctcccgcagcagcgtccgatagatgtctcccctcccgtccagcgcctcccgcagcgtcatgtcggggccgtacctctgcgtggcgacggggccgaacaccatggccacaggcggcgagggtgagcggcgccagatgggcggtaggcggcgaggcctgcggcgccagagtggcgggaaaggggcagctggcgaggacatggggggcggcgcgaggcctctgcttcctgctcttcgcgacgtcgccgccaccgccgccgtactggagcagagctgaatcctcctcgtccttcttcttttgctccggcttctcaaacgtctccgccttgaccggtgagcgccacatgccggtgtcgcgtgagagcatcaggaggccgagcgcgacgtcctcctgctccttctcgaacccgcccagcactggccgcggtggcacgggcgccgacgccgcccatcgaccgccacctccgcctccgcgtgatcacagtcacgtggggaggaaaggagagtgagaggatgacgtgccatcctaacatgtgggcccacgtgggtcccacgctgactcagccgccatgtcagccaaaactggggtcaaaaccgctgagggacctagtttgcactggttttgtaagttgggggatgcgcggttttgcggttaggggactattttgtaactcgatggcaagttgagggaccttcggtatactttttccaggaagagaaaggtccggataatgtgcaaatggaatattgcatcggtatagaattgccttgccatggcccacaggcccagtaggcgatagtccaactagagcccaaaaaaccggagttcagaagttctcgcaaattccgaaggcttagcccaactcaacattttgctgtctcgcgtttccgcggcatatctccatcagctttcagctctctgaccagtgccgcccactacccagcaggcaaaatgcttgaagcgaagtatcaggtgtgtgtcagttgggtctcgtgcggtgaagtccccgctaagcaaaggccaaagggcgagaggatcccgtacgtggagtatgcgaacgccgcatcgctctgcggtctgcaccacacagacacaggtaacaggttgctctcccactcacctttgtgcagcgcgtcaagcgaaagccatctcccattccttgacgccatcggcaacccgcgccgcgcgcacattgccgtagcccaaccccacgctatatggtcccatgcacaacgacgtcgccggtctcgggttgcttccacttgcctagatacgacgcgccaaggaagatgacgcgtcgcgctgatgatctcctggttgccggaacgctcgtcatctccatcgtcttcttcaggtgcgccgctgccgtggcagccaccgagtatgtccggcctccccccgggcgggtcatcttcactgagcacaccaagcccgcctcacatcctcaacaggtatactacgtacacaaatgcgagttcttgaggatgcgttctatattcgtttagggaaatgacgatcgatgattgatccgtttgtatctaggttcatgtgtcgctcgtcggggcgaaccatatgagagtgtcatggatcacggaggacaagcacgtcaagtccgtggtggagtatggcaaggtctccgggaactacacggcgtcggccaccggcgagcacacatcctaccgctacttcctctactcctccggcaagatccaccacgtcaagatcggaccgctggatcccggcacggtgtactactaccggtgcggcatggccggcgacgagttcggcctcaggaccccgccggccgcgctcccagtcgagctcgccgtcgcgggggatcttgggcagaccgagtggacggcgtcgacgctgtcccacgtcggcaggtccgactacgacgtgctgctggttcccggcgacctgtcctacgccgacgcccagcagccgctgtgggactcgttcggccggttcgtgcagaagtacgcgagccggcggccatggatggtcaccgaagggaaccacgaggtggaggccgcgatggcgctcccgggctggccgcggccgttcacggcgtacgccgcgcggtggcggatgccgtacgaggagagcggctcggggaccagcctctactactccttcgacgccgccggcggcgccgtccacgtcgtcatgctcggctcgtacgccgacttcaactcgagctcggagcagtacaggtggctggcccgcgacctcgccgccgtcgaccgcggcgcgacgccctgggtcgtggtgctgctgcacgcgccctggtacaacacgaacgcggcgcacgagggggagggcgaggccatgaggaaggccatggagcgcctcctctacgaggcccgcgtcgacatcgtcttcgccggccatgtccacgcctacgaacgcttcgtgagttcgattttgatcagcgccattgctcgaacggttgatcacacgtacaattctcaactaagcagtgcacgtcttgactttgtcgctgcagacaagggtatataacaacgaggcgaacccgtgtggaccggtgcacatcaccataggcgacggcggcaacagggaaggcctcgcatttgagtaagcactaaacattaacaccggcaaaataacttacaaatcttgatagctaaccatagctcacggctaaatctggttggatatcagctttcggaagaaccacaagctggcgccgctctcgttgatgagggaggcgagcttcgggcacgggcggctgagcgtggtgaacgcgaccgccgcgcgctggacgtggcaccgcaacgacgacgccgactccaccgtgcgcgacgagatctggctggagagcctggctgccaacggcgcgtgccagcagagtagcagcgccgccgccgccgcggactctcagaacgacgagttgtagcattgcacattgcttgatattaattcaacaaattaatttgatagcgctcttaatttgcttgtcacgtgccggtgaacctgggtgcttactttacgggcaaacaatgcatttgtaccatagtgtggttagtggccagtagtgcttaggccggcggcatttgccgtgcctctgatagctagaacgaacaacttctgtgcctgtttgtgggtgtaatcatggttgttaccattccagatttcctgtgtgatgtgctttgcacgctagttctgcctacccttgaactcaataattaaaatgttcgtccatagacacacggtagtcatatatgtgcgcggacgcgctagcttgttaagaatttcgtatattggtgtggttgggcaatgcagttatgactcatcgaagtagtggtttcccaaaccgctggagccagattaccgcgccctgtcggtaagcactgtaaccgcggtaaccgtgacaaaccgtatagtaaaatttattaaaattttaaattattttttaaatttatttgaatttaaggaggttaccacggtttttctcttactgtactctacggtaaccacgcgaaccggcggttttggaaacccttcattgaacttgaaccaatgcataaacagcatatcagatcaatcagagaaaccagaagctagaataacaattagagacagtatgtgacaaaaaagtattggtcaatcttacattgtgtcaaattgtgaacgtctgtgtacactactaaattgtcaacattagtagtacatatgccggcttggcggccatgacacacgacgggacggggtcgccggctcgccgccggggcgcgccgacaccggccacctcgcgcaccgggtggcgcgctcccgcagccacgcacggccggtgcacacaccctgcgcgcgtgcagcctggtgtagcgcctactccccgacgacgaggacgtcgacccggcgtcttcgtcgacgccgcatgagccggcgccggcgcaggaagaggaggaaagcgaggaggccgagcagcagggcgaggcggcggagttggcgtccgcgtcgccgccgctgccgccttctcgtctcgcgtgcatgcgctggcgggagccgaccgcgcagaggctcatcctcgccggtcggccgctgcaatcgctgttgtctcctctccgccggcgaccctccaacctccatcgctgctcctacccttacgccatggccggcaacctcacgaccagagcatgcggcgttatattactgtaactccgctgcgaaagcaagctgtcatcttgcagcgaagcgacgcaaggaatacgactaccaggactggatcgagttaatggctaatggtgatcgcctgatcggtaacgatgctatgtggctcgcgtcgcgccgagaagagggcggagatgatcaaaaggcgtcagcgcgaggccggaccaggaatccagcagggagacaggggtgcgtggcgtttgtttcaaggttcggcaaggaatcccgtcgcgatacaggaccggacttctgaaaaggagaacaggaccagacttcgttgatgagagggcctgcaaagactgaacggatttttgtttgtcacgttgtactgaaccaaagtgcgctggggtcaaccggcaaactgatcaagttggttgcatctccttttttttttccagatagtgaatacaaatgagtcatgacacacataattgtttcaatttcagaatttcttagcagccactacataaatacataagcaaatagagtacgtaacaaattaagcttcagtgttcaacttttattctcaaacacgattacaaaagaggatataggattgcaacgacacgattttgaagtttgaaccgggcaatctcatcctaaatcacggcactgacaagtgagaaacactttgttcccttcccagcgtttgctcgttcgacgacgactaacacgcgacaattatcaccaaatcttttattctttgaactaccactaataaccgtagcagcagctaagcacgtatatattactatattagtttatataggtaattaaacaccgagaaaaaacagctctacgacttcgctttctcacctcacttcttgcagaccaggccggcgctgcccttcccgctgccgcagagcgcgtcggccggcgcgtcgaccatgccaacggacgaggcgagcgcgccgtcctcgccggcgaagcgcgccacctcgcagtccgtggcgaagatgtcggaaacggcgtacttcccggcgctacccatgaccgggatcttggcgcccacgtccacgccggcgctgacgtagtcggggcggtaggtctggcccagcacgccgtgcacgtcggcgctgatggagtagaacttgaacgccacattgaggtgggcgaggctgtcgtcggcggtgaggccgtagccgtggatcctcgagtcctcctccgtgacgggcaccgcgttggcgacgatgcggaaccggccgtcgaggcgcaccaccacgccgttggccgggccggtgcggaagaccgagagcgccggaacggaggctgggctccagctggcggcggggacggcgtccagctcgacgggcgcgccgtcgaaggtgatcacgaggcggtcgacggcggcgtcccacctgacggtcctcctgacgccgaggtagaggcggtggccgccgaagcggatgccgagggcctgcacccaggtgaagtcccgtgccgccgccgcgttgcgcttgccgatgaagtgcgcgttgatgtgcaggttggcgtcggagagcaggcagaagtcggcgtccttgcgcccgtggaacaggaacttgttgccgtcgccgccgacgaaccgcgggtcgtagcactccgtgccggtcagctcacacactgcatgcaccagtcacagtccaaaacccgacatgcaaaaccgatcatcaaaaaccaccccaaacgtaacgcgcctacctactattaccatgcatgatatgcattctgttttgaactttttgatgcgttttcttacggcagacgagcttgcaggtggggcagtgaacgtagcacatgtcgcggcagccgcgcgggcacgcgcgcggctcgaccgtgcagtcggggcccgacgccgtgttgttctggttgtagcagctcgccacggtgggcgacgagccgggggtcatgtagatggggatcacgttggggtccctcaggatggggctgtccgggctcagcggctgggcgcccaccgcgacgacgaggaaagcggtggcggcgagcagcagcgccgccgcggacggccggacgggcaccatctccggtgagagattgatcgagccggtgagatagttgttaggggggtgagatagttgttaggggggtgaacgcacgttagtggttgtgatacgatggaacaggctcgcgcgcttttttataggcggggtctattggtggcatattgagctctgaccaagcgtgtgtcgttggaattaagcatggctttttcgccaatcaagtctggggaagtcaacttctctctcactcgcgcggcgagctccacatgaaacgattccacgcttgacatcccggccaacggaatgcggttgcttgttcttgatcttggtttcgagtacaatcttctctacgttatggcaaccgcaggatccacccttatcagcctgttccaaagttatttatattttccttttctccctaactcacccttatcagcctgttccatagttatttatattttcctttcctccctaacgaaaaataaagtgtttatctgcttgtccatcttgattctaacgcaaaaacgtaaatccaatactcccattcttccaatactcacatccatttttttttttgggggggggttgggttgggggggggggggtacctgaacaatctttccacactagacttaaacgccgagaatatgtcctaacccaagtgagcatggccacaaaggttcaacgaatcttcaggaatgcggttttgagtggaataactgatgaagacacgagtacggtgtaatcttcatcgtgaggcgtaaagcatgacctgggacgcacgtgttattgtccatgaaaacacactagatctcaagttgctatcttgcttcaggatgttgctccaagaaatctaataggctattccggatatctggatcaatgtacttcaacaataccgtactggattgagtgtaccagctaattagtaattactctactgacaacgaaaacaatccaggcaatagtggaaaaattacagatcatttggttggctatggtaagttcacaaggcacagcaagatgtatgagtgtattaggagcaatggctccacggttttgacttcctggatctcacattagactcgcagctatgactgtgtttagttactgaaaaaagttgaaagtttggggaaagttggtagtttggaaaaaaaaaagttaggagtttatgtgtgtaggaaagttttggatgtgatgtgatgtgatggaaagttggaagttgggggtggagcctatgtataaatgcaaattgtactggttagcaggtgcgattgttggtttggagacagcatactgtggaaaggaacgagtgcatgcccatggccaataatataccatatgctacactggtttgcaaatcagaaaacgaaaactaacctaccaaaggaaccacctcttcctgactgcaggagttgtctcttgcactggagaactttggctccctctttttacgattccactgttcagcgcttccaaccttttcctgcaaaaaaaaacaatgtaaaatggaacagcaaaaacacaaattggcatgcaaaatagaataacagagaaaaaacaacttggcatgcaaaatggaataacagagaaaaaacagcttggcatgcaatatgaagaattaagttcatttctgaactcaaataattcaaaagttcaactggagtgaccagaaattttgaatgcaattcctttgtatataatttgttcagtactttatgcttataatggggaaatcatgactggaagacatcccagaaataaaaaggatgaaggatggcacagtgcttgaaaaacaacccttcacaaggctcagcacagacaaccacataaaaggacacccatgcctacacatgggagactagggttgtaacagcttcatttcatctgaagcagatcctccacatcaccaaaaacataatgcattaatgatacttcagatgtaaatttaatctcaactgcacggaaggaaaaaaaatgacaagccttgttttttatatgtatatattgcaattttaatccaccatctggatttgaattaataaattattcaaatgcatacgaatagttaaaaacatggttaatcaccataggcccactagcttcttaatattcaaattccacatttacaaattacaagtgagctctttcgagtttcaactatgacatagatgatcacaacgcatgaccaatacaaagtttaataccttgtgtctccaagctgtccatgtaagctccatctttggcgaaatccttccatgccctcaagtccactagcaagaatcatgcgcctataatagaaatatgaaagcacatacaagcaaaactgatgaaatcgtgtggataaatcattagaaaattcagaaaatccaatgattcattttgtatggtgctgaattatggttacaaggtactcttacaagtgtttggccttattcctggtgatactcatagactcataggtctgtcaagcacaagaacaagtacaactcatcggaacagacaaccgcgtgtggattgtgaggcctaggaagatcctgcctgtagtctatcaggcaggaaccacgtagttctctcatatgccactaaatccccagagcagatgcaggcaattataagtgttacacagagcattaggttaagcactatacaataaccatctaggaatctcaatctgaaattcagtatagtatatataaattatttacgtcgcctttctttatgcagtctaaatggccattttcgtttgatctcatcaaaatatatggccttacgtattaccacaagaaaacaggcgcaaggacatactcttggaatgtctagtacagtatctcttatttaggacctgaacacttcacacgggctcacaacagttgaatgttaatcaggaaactgtataaaacgagctgctaatcacactttgatcattgaatacatgtagggtagaagtgccatgtttggctacctttcaagcagtgtgatttctgattggagttgggtagctctttccttagcttcttccaggggcattgaaaaacccagcttatattcactatcctgcagccgctctcttatttccttgtcctgtaaaaataggagataaagtaacatgttaaacaataagggaaaatttacctgccatttttcaaataattataatacaactgacccttttctcagcacattgtcggtatagtacaatttcatcttggcaaaacggctcaatatcattgatttgcagacctgtaacatataattgctttattatagtacttactacatatggagtaaggaaagcatgatttttatgtcagagaaatcagtaactcacataagaaaagatttttgagtatgccatcacaaatctcaacaccgtcaaggacatgtgaagcaatttcctttggtatgacaggggatggcaacccacgcatgagatcatcaccaacaagaatggtctcttccatcgtttcctgcttatcgactgttgaaaaatatgtatgaaaaactaccatcatttgcacagggccacgaatagaagttacacttgaaatgcacgaacttggaaagtaagatcaggttctctggcatgctggttatactgcatgatactgactagagagttagttcctgactgtgccacagtggtttattaatgctgaattgctgatagcataggtctggttcttgcatgatcagcaaaagtcatcagttttttatgatcgagagaaaaaaaagagagttatttcctcacagttgccattacgaacttcaaaattaactcaagcccaggcaactacaatcgccactaagcttgcattaacaaccaactgcacaacctatgtgctaaaacacaatttgatcctccaaactttttaggcggtttgggcaagagaggatgaccaagttttgttaagatttacttccccaactgacacaaaataaacaaagcttaacgaaatgggaatgggcaacagagccagcgcgtgcgtaccatccatgattgcctagtaaaccttcacctccggagaacaatcagattttggcaactcgaaccgacttcttgcagccaacaatcatggaaaaaaaaacaccagaaaatgtcagcttcgattcgtcttaggggaggcgacggggagcagcgtgggacgaatcacatacagatacaccaaccaaccggagtgtccgcgacgaatcccgcggggaaatagaccggagaagaaccagaaggcggcggcgagcggcgaccgacggcgcgccgcggaggtgaaggggaggaaggagaccggaggaggagagagggtttacggctcaggtttccccaactcctgccgcttgtgggctttctccaacgaagatatgggcctaaacagtggcccatagacttgtcttacggcccatttatcgatagcccagtgcaggcatgaggcatgaggcacacggttcaggtttgcttttctcgagtaccagttcaaatttcaaaacaccgagaaagagtatgctttctactagtactatgtttgatcggctgcttactgctccctccgtcctaaaatataagtatttttagctataaatttaaacacatagctaaatgttgttatattttagggcggaacaacggaggtaatagtaatttctggtgaaccacgttttttctctctattttggattgtgcctgtcatgattgtgttttaccatgttggctccattttcctcgtggttgattcattagcaggctgttttcacaccatgatatttctgaaaaattctgggctgattttcagttgtgagatggagtatgactgtatgagatggcagaaacagcccgatgcctacacgatgcccgctttgctcttgccgtcggagcagcaccgcacgcatccacgtagtcctgagtcctgacaatttgaccgttctgctaacacgcatactacacctgtgagacctcacatctgtctcaagtcttcaggacagaattgtctgttatgtgttcttgcacagcacctggctacaagcttccaactcgcccgtatgaacttctctgaaatggatcgctgcatgaatccccttactccgatccggggggcttcagtgctactaggagtgttgtgagatctgcaaacagtatctacacactggcctcttgttaacaggagctacacatgcttattatcattactcatgagtgggcattttgctttcctttcctgactgtccaacaccaacatctccacttgcaatttgcagactcaaactgtatatgtctgtgtctacctaccactgtataatgttttgtgaaattcaaagaactgataagtaccggcctgttgggacatcatgagaatcgacaggtaggccaagtacattgctgaatgttgattattccacaccgttcttggattctcgatcttatacgaagttttattttatctcaaccagacgatgatacaattctgcaaccaactccatggctccacctccatactcccatacttctactcatagttgataccatgatactatcatatcgtgctttcattgtataccatccaaggataccagcatgtattcaggctactgtacgtacgtcacaggtcatagcagctgtttccttgggtacagccaaaacgactccatcaagcaggagcacagatgcatttgtaaacgccgtacttgtcttctcataaacacaagcagtacacagtacactccttaccatctgcattagtttctcgcctccggttaatttccagcacagtgggcggtgaaatttttggtgatcaatctctttgcacggtctctcgcgccctgtccgacagttctgttttagtggtcaatccaaatccggcccgctcgtatgcatgcaggtaatctctctttgtgttagtatttaacaccgtgaaaggaccacgcaaaaaggcagagtttcgacagaaaaaactctagctggttaatggcgtgtgtgacgcctcacctatgcgtggctgtacacgagaaaattagtgccacccttttcaatctataggtaagctacaagtaacgttaggtgatgtactgatgtgcccgtgttgacctgcgtggcatgaaaatcactgctaacaactggtctaccacatatatagccgaagcgaattatggcctagctagcgagatagatgctgtaagtaattaacaagaaataaaatggattagttagtacctatatagtctagagatattacgacgttggccgtgccaatctcctgtgttactgtgtgcgcccgtccaaacttgcaacgctcgagctgagcagatgatctgctgatgatgatgagagctgatgagctgtagagaagctagaggcaggcacggcgccgtggaacacgtcgatacttctcctcgcggagacgaaggatgcattgcgtccgctgtacacgcccatgcgctgtcccccggtagtagcagcggatcgtgacatcgtgttgaaccggcagaaacatccaaaacgaactgatactactagcagcagctagtactagtattattagacgagagggccccggcaccagtcactgcaggttaagcgcacacggcctcgcgagtctctgtagatatgcacgatccgtcttatctcttctctgctcctgaggccggccgtgagaggtttaacgggattccttcgttggtgtagtagtagacgtgtagtcctgtttgcctcgcggtcgcgggctagccaaaaaaaaaaaaaaaaagccttggatacctccgcggcggcatgtggcacccgccccacctgcgagcgcgcgtgatacgcgtatttgtgtgtcgcgccttgtccgcatccatccgacgatttccgatccgatgcagcgagcgaccgcgcgcgcgctccgccccgcggcccgcgccaacgtgtgcagctgcgtttccgtgcgcccagccccggttgcgctagccgctgttgctgccgtgctacgggcctacggcgtactccttcgtccaaaaaaaaatcaaattctgaatttatgtgtctaactttaaccatccgtcttatatcaaattgttttataatttgtattttcattgttgttagatgatactccctccattccaaattgatctacatatagttttttaagttattcctaaatgatctatatatttgtgtttatttattaagtctattcgttatttgtgcattggagtaaatggacatttatgcatgcatccatgcacacaagtatttataaaccacatgcaatatcttgatttactattggctatgaaatagtagagatggtgcatgcatcgattttgttactagagtaaatatagtatgagagatttattaacttttcttggtcttggtgtacctatgaaatatgtagatcaatttggaatggagggagtaaaacatgattaatattttatgcctgacttgtctttttaatttttttcatattttttttaaataagacggacggtcaaatgttgtacacagaaaccggagtttgtctttttttagacggaggaagtacgtcgtggagagacggacgctcggggtgcgggtggggggggggggggtccccggcacggaaggagatcgttgctgtggccgagagcgatcggtcgcctcgcgcgctttctttgcctcgttgctgtggctgcgagcgacctttccgtacgactaggagaagagaggaagagatactcctcctagtagtagattccactctacgggaggccagccggggcccccgttttgacacacggtgaaggcgaacgatccccctgtttccgcggtacgagtcgtaccgtacgcgcgccgcggtggatgtgagggtgaaacggctagcgaggctatgcaaacgagcaaatcgtggttggctggtacacggttgagccgacacgagctcactgatcagcaagccacatattgggccatttcgatcaggggatgacttgtttgatgagaaaatttaaagttcgcttggactttatacgagccacgctacgctagctttcgccttgtttctctccaagagatgacgtgcatgctactgctcttgtttaacttttcgaacatgatctcttttttgaaagatcaaacgcgatctcaacttgtggctagtccggtagtaccacggagcgtccgttttgaaatgctaaaaaatcgttgataatactccctctgtaccaaaataagtacagttttacactattcacgttcaacgtttgaccgttcatcttattttaaaaatttgtatgattagtatttttattgctattagaagataaaacgtgaatagtactttatgtgtgactaaatatttttaaatttttcataaattttttaaataagatggacggtcaaacgttgaacactgatatctatggctacacttattttggattttggtacggagtggtatatgccaacatgggagtggttacatcttcaggcggcagaagaaaatccagaggattgtgacgatcgaggtcgtgcacagttcaaccaatatactactgcttcgattgtgatttgcgcacacattagtaaacaaataatactgtactgtactagtttggattcgtctaaaaaaattaccagtctacatactatgagccttgttaattttgatgtcatttttaaccttaccaagttttggtaaagttgttaaaaaattatctacatttagtttgctgctaaattttagtaactatataaaaaatactactaaaattttggcaagtgcaataggtttttttttatcaaagtgaacatgccctataataatttaataacatactgtactagtatcaacttgcagttggtagtaccgaacaagtactacaagccatgcttgcttttctagctagtcacctgaattcgcaagcttaaaatttcaaaacaccttaggcaaactgacatatgggcccatggaaagaaaacaagaagaatggcgttttattggttactactaaccataattttttacttaactttaatcgtccgtctaatttaatttttttaaaaaattaaaaacataagccacgtataaagtactacccatattttattatctcataaaaataaaaatattaattataaaaaaatttcaaataagacggaccatgaaagttgaacacggaaactcacggttgcacttataatgagacggaggtagtatccattgtttttagagaacagaacaaaatgaaaactactcaactattgaaaaaaatcattaccgacgtaacactaatttagggttgcgtcacaagt

SEQ ID NO: 20647 - DNA, 2084 bp, Oryza sativa
cgtcgcggatgcacgcgcggtggtggtaggcagccaaagaagtttcttgggtcggggaggaggaggagggagggagggagggagggagggaggagaggtggcatgaaggacttggtgtcgtgcttcagcgagcacgccgtccggatctctgacgtcgcgtgctccggcagcgcgaatgcggcgacggtgtcggcagcgggtgttgctgcggcgggggtcggtgatggtggcggcgcggggagggcggcggtgagcgcggtgacgagcgtgtaccggtcgcggctctcggcgtccgggaaggatttggtcatcgacgtgacatggtcgcgggcgcccgacgggccggcgctgtcggtcgccgtgcacgacgccgcggccgcgtcgaggctccgcggcggcggcggcggggccgcgggcgcggcgccgaggcacctgcacaggaggaaagggagcgggacgttcaccgccggcagctgcgtggtgggcgtgttctgggacttcgcggcggcgcggtacgcggcggggcccgagccggtgtccgggtactacgtcgccgtcgtggccgacgccgagttcgtgctcctgctcggggacatgagccgcgggtacgtggagcggctgcacggcgggataccgatcgccgggtcacggatggcgcggcggcgggagcggttcgtcgggtgcgggtgctggtccacgagggcgcggttcctggagtccggcgccgagcacgacatcgtcgtcgcgctggacggcgacgcggaggcgtgggtgaccgtcgacggccggaaggtggtgcagctccggcggctgcggtggaacttccgcggcagccacacccttttcctcgacggcggcgcgccggtggacatgacgtgggacctccacggctggctcttccacgcggccgacccctcgccggcctcctcctgcgccgccgtcttcacgttccagacgcgcggcgcgtcggagacgaagttctggatagaggacgacggcgacggcgacgacgatctggaacaatctcagccaccggctgcgccgcgcggcccgaaacagaagctgggcggcggcggcggcggcggcgctccgtcggggcagggattctgcttactgatccaaggtttcaggggcgcatccaagatcgcttgatctgtataaatgccatgagagattcgccattctttttcacttcttcttcttgcttgcgttgcttgggattgtagtatcaaaattcgacaatgggtttggtgctaattctcgttgattaatccgatgcatgacacgagtgtgaaatgtaggagtagaaggggaggcttgacatgtacaattggggtggtgtgtttcgttttggtttgcttcgtcgccgtgcagatttgatatacatgactgtaactgtgtcctaatttgcagaaaatacaccaaagattgcaacttcttacatgaaagaaatgatttgattatattcactctgtatgtgttggtgttgcatctgtctgtgattcagatcaggtgcagtcatatctctctggacacgaggaaactgaatcacatagatgaactagcaaaaattgtgaaaaactaatcatggatttgacaagttgagtagagataaggatcaaagcactttctccataatgctgcacgattgttgtcattttcgttcttgaggaaactacacacatgcatagtcatattttttcttaaatccatagctatcattttcacagatgttgatagctcatttggtaagagtacagcttatgctatctcgaaattaaaaaaaaaacaacacctacgttggactcttcaaatagtatattgtagtaaaatcaccacctgttcataacacgcaacaaattcgcattacaaaagcaggctgctgttcttaaaatttgccacgcacttctatcattgccgcttgcaaaagcttaaaaattagacaagtccttgtactaaaataggccggcacaactgaagattgttcaaacatcatcctacctgacgttttctagatcagtggagaaggcttcaaatatattggaatttacaaatgttctttgcatacgtaagcacattttttt

SEQ ID NO: 20648 - DNA, 4394 bp, Oryza sativa
cattgatatcactgtgagtagaatcatctacctttttaatgtcaaaaatgttcttgtgaggtaacggttgatgatttgttgtaatattagggtgctgcaggaataaaaggtcatgagtttgacattgtatgcaaataaaaactgaacaattataatctacattctagaaattggatactccaccatgtgttcatccatattgctattggcatgtggggcaggtttggtttaaggcataaattaggcttaccaatatttgtcaattttaatagtgtttagtgtctatttggtttgaaaccaaattttggcatgcctaagaaaataggccatttcaatagtgaacttagactattttggcttcaatccaaatacaactttaccttaccaaaattagtcatgccaaaacttactaaaatttggcattgacaaaatttggtaaggcctatctagaccacaaaccaaaccaacctgtgatttgaaaccgtattcacgaggttttcaggttgactggagataaggggcatgctatctcccgttgtgccccttggagtgcaccacgccatgcagaattgctcgacaattgtgacactataccatgatcaaatattccttgtgtgaagtaaacaaaggttcctgatatacaagaataaattgtactactaatttatttaggatgcacaaaacagtgttttattgataactgcaagcaagcaaccctgatttacttgggtggacatgatgacctttcaagcaaaagggcactctgaaggttgcaggggtatgtggttaaagcatgacgtggtttcattcctagtataggaagtcaattgatccgcagacccacacggcccaacggaaagatgcatgagatgagtgggttgaataaaaaaaggtcagtgtgggacaggatatccataatctaaaattttacatacttgtatgtcctatttctcgagggggatgatgaggtatgacactatgaatttgactgcttagagcatccgcaatagtaaagtaaggtgttatctataaagcatgtacatttcagcaatagactagattaatagtaaaccacttcaatggtatgtctacatggatatctatagctctttaatccattgccttatttttctctatagactatctccaggttagtagatagctttgctctctctctttatttaatctcttcaaagtagaaaaatatgctgacatgaatctcttatagagagcctatagataaccattgcgggtgcccttatgaattgggtttctcttttcttctcaagagttccctttggcttcccacccctccttttctactcccttcaagaacattgtgctatacatcattaactacactgaaattctcagcatcattccctttgctgaatggagaagtccgtagaatctgctgatctgctctacatcatcaatttttcaagctcggttttcaaacatctgtaccgcaccgtccgaaatttcacttttggcagcaattgaatggccttttggcagatcctatcatactgcaaaacgagtagggcagaaacgactacgggccgggcctggccgccatctcactaatgggctgagatggaggccgtaggcttctgatgggctgggcctcagctgccgccacgtgcggcaggcttcaaccaggaggaggtgggggcgagtcgtcgtcaacgacgacgacgaggaccacgcagatggacccgtcgtgcccgccgttcccgcagccggaggcgccaccgctgccgctgcagctgcagctgcagccgggtctgcccaggctggagctgccgacgctggacctggagcgcgtcggcggcgaggaccgggcggcgctggtggcggcctgccgggatctgggcgcgttccgcgtggtgaaccacggcgtccccggcgagctccggcggcggctgctggagctggggaagcagctgctgggtcgcgacaccttcgagctgaagaaggcgcggccgggctacttctggggcacggctgcgctgaagtcgctccgcgtcaaggaggtcaactggctggagggactccatgtcgatctcgtccccggctcgtcgtcgtcgtcgtcgcaggtcggcgatggcgatgatgatgatgatgatggctggatgcggatcagggcgctgatggcggagtacggcgaccacatggcgcgcatcgcccgcaagctgttcaacgccctggccgccgagatgggcctggatcatcaccaggcggcgtcctacctcgccgagcgccagggcttcctccgcttgtaccgctacccgccctgcccttcctccgcctcctgcctcgggatggagccccacaccgacagctccgtgctctccatcatcctcggccaggaccacgtcggcggcctgcaggtgatccgcgacggcgcgtggcgcgacgtcgcccccgcgcccggcgagctcctcgtcaacctgggcgacatgatgacggccatcagcggcggctcgtaccagagcgtgcgccacagggtgctcgcgagccgcccctccacggagagggtgtcgtgctgctacttcgccttcccgcaggaggacgccgtcgtcgaggcccccagcggcatcggcggcggcgtctacaggcccttctcctacagggaattccgcgagcaggtgcaggccgacatcaaggccgtcggcaccaaggtcggcctcagccgcttctatgcgacggctaccaggtagtaacaaggtagaagatgtgctgctgcattgtgtaggatattgtagtacaaggtccatggtaccaattggtatttgcaatgattttctggctaattgcttgtctgaataaaaggagtatacatggcatgataataaattttctagccaacattacatgtaaagataaaagggagaaatgattgaaatcaatactcaatactatattttaagatcatcgcatcattttacattaatcgggaaagcatagcatgtagcattgatggtgagtagtatcatttagcatagtattaggagcctaaaatgtaatatacgattcataattgtttagaatgtatcgtcaaagtcgaatgactgttggtagatgattaaaaggtctccatgtgttgtgggggttaagtggatgtcaaacttaactgacaacatgaccaaacaatgtaacaaatggtaaagcttatatctgacaaagaaacaaactcagagatgtgaaacacaatctcccatggtatgaactgaaagaaaaggccaagcttcagactgcttaaggagagtcagatcaataatagaatgcatcagatgattattgtggggggctacatatattgagttcaccagctgattgtgcagtgcagtggggtgcttcttcagggctacctgactgtcggttcaggattgtatagtaaatcctatattgcactgctattctcaggagtcaaagtaaatttcaaagatcgaatgttaatggaaccacctgctagttacatgtcagaacctaccccagaactatatatggtggaaaccccaaatttggtggaaactagcgtaaaccacaataaaatgtcatctaaataaaaaaaaatctcctatgtagatgaggtgattgtggacagccgtgcaaaaagatctattcgaaatttgactttgcattgctgaaggtacatactcatttaacatccttgaacatgctgataacaccagtgaattcttttgggttgttgctcgtagatgctatcatcatgccttttctttgtggctcctaataacaacggattacggattagtagatcaagtagcagctcaatgcaatataaatcacgtaattggaatcgacttcagcgcctgtggcaaatcctgatcaatttcacacaactcaataaccaacagaaagactacccggacaatgtgacgtgttccaagttcagtttacaacctaatttaagagaaccaataaaatggagggacgaacctgaatcattcaagactaactaggcctaaaattgttggccccagttcccttcctatacatgttccagtcacgtttgatcagaatgggcattcaatgtgcacatggagtcagactcaactatgaacaacttaaactacttaacagttgtaataactcacgtcacccgtctctctctacttttctcattgtattagagtatcatactactgatcttgcatcttcaatacataccggctcgaatcatgatgcctgcagcaacataagtacatagcactgccagcacacgggttcagttccatcgaatggacgcctctggagtctggagagtggagagggagagaaaagccaagctagatccggaattcgggagcacaagtacgcatcggcagcgaagcagatggacaaagttgggcacgtacctagctaat

SEQ ID NO: 20649 - DNA, 688 bp, Oryza sativa
attcctgcagcccgtccagaacaatagattgtatccatgttgaaatgaaaactgtgtaaatgccccaccagccagtggtggatctagaaaaaatttagagcccaggcaaacttaactatagctagtatttgctatacaaattaatatttccttcattttttagttgcatagaattgtaatggattatccgccgacgagccctagtgacttcctggggtcaccaggcggtagatctgccactgccaccagtgatgatagggtacataataattgaaccatgcaaaaggaagtgcataccttgtactttccaggctttaaacaaccgacgcgatagtcaaaatagctattactccagtggaagttgaacacgaataccaaatctcctctctcgaagatgatcaccttatcctcctcgtgtttgcgcgatatatactggtgctcagatgtcatgaactgcagcaacgttctccgtttaatcagttaaatatctccagtacaaaaaggatggctagagctgggacaggtaacaacatgcaataacccaaaacaacaattttggatggtgaaacacaatttcagatcatacttcccagattcctccaattatatgaaatttgaaatctctactccctaagttagtgaagtgatggtgtgatctatgcagacaagtgggtgtcatttgctggga

SEQ ID NO: 20650 - DNA, 658 bp, Oryza sativa
attcctgcagcccacgacggggagcagaacccgcgccgtcgagctcgtactccactgtccccctctcgccgaagtcttgggcgggaggaggcgctcgaggaggtcgaaagatccgcgacttcgccgcacgcgggcgatggagaaggacggcgagacggggagcgtcgtctcctcgtctacggtgatggcagcacgccccagggcgcgctccaggctgcgggcgcgctcctgcgtcacccgcccgtcatccctgatccagagactccaacccgacgttggctagatgacgtggccaatttggtcatgacggcgcagcagcgcctacgcgccggctggcggtcctccgccactaaggccactggcgttgctactgctggctccgtgtcgtcgaggcggagggcgccgcgagcggcggccgttacccgccgttcgtccgccattccctcgtcaacgcctctaacccaagaagatgtgcgtagggggccagatgcccgcttcaatctcaagcgccggcgcaatgatcgccgtgctgcccacgcatcggagggcgcttcctcgtccggagcgccacttcggtccgggcacgggggccagccccccgtgtccccggttggcggtgccggctgtcgagcctttgtggcgagccttcggaacgtcc

SEQ ID NO: 20651 - DNA, 5986 bp, Oryza sativa
cctgcagccctgctgatggcgatgtgcattagagcaggtacaatagcaagctaatagtctgcttacctaatattttaacatatatgatagagagagggaaagcagagagagcaaagcggacgacaatctagtcgccggctcaagactaggcgctctggccccctgcagctcgggacaaccaatcgaaaattagaacttgaacatgtagaagttaccaacacctgatagaatgccttggttaaagcatggatgtagccaattgctgtatctaccgttgtttagttatctcttaaataatgtggtgaattttggagccggtagttaactctactattgaacttgctcttaggagatagagagagaagacaccaaaccaaattatctagagagggagagacggggaagaaaggaaagaaggtaatgattcggtaatctcaggaggaaggtatctcttaattaggaagcttgacaggcaataggctggtgctcacaaggtaggtataaaaatctcacctttttctctattcctctccatctcatcacatcccagaacttcctgattcttcaaataatcaaatattattatctaaattcaaataattaattataatttctcttccccctctaacagaaccgtttctgtaaataaccctatttcttcaatgaaaatttacgctaggagcatctccactgtttcctataaaaaagatatgtagttgtaaaatttagaatataaactaaaagtgtaaaaccgattctcgcgaattagctactcctacagtgtacttaccggctacttctcagctctttaaattccttaaaagagagcctcagtatctcacctctcaactaagctttgcacttaacgctgtagtcacacctttatagtactatgcttatattccctactacacaatccaagatttaattctccatcaccagtggagcacaaattccattccgttggcgtctccaaagcggatggatggtgcttgcatcatgcctcctattatttttgtttttggttcccaatggcgaaaggaagaatgagagaggggggggggggggggggggaagccaactttgtctcctcctgtaactgccgaggcataaacgcacaagaggaaggaaaaaaaaacagcatctttcctttactgctttcctaaatgcacactgaaacttcccaaacgaaaacggccggcacctgtggcagcaaaaaagtagctggatgtgtgaagggcgcgatggaccgcccgtcaatgagtgaagggaaaaaattaagaaaaaaaacgcagtactagtagtactgtgcagtgaaggcattggatatttggattagaaagtgacatgtgaggatgcacattcagtgaccttgtataactgtaaggttaaatgcaagtctgtttcattacccaattttgttttggcacgactggtatatggactagagcacgtgtatatatagtagtaaaaataacactgcttcttgcccattttcgccgagaattgagttgttagactttactgaattaggaagcctaacagagtagaataactaattaggactttaggagtagtattagtagtacgatgtacggtcgcaaaacatgaaattataaacgtaaataagttacacttttatatttgtttgagcattaagcatctttttaaatatctaaagtttcataaagataaatttgtttgaaaagcattcaagtaatattctaactttaatttacctgatttttacaaacgtgtttaatgggatagaaattcacaaccgaagtttcagctgcattttttttcaaagattgtgtgccatccaaaaacaacatcttttcaaattgaagggggtgctatttcttttaaagaaaacatttactcggtacctaacattcttaaattctaaccccctgaaataacttttaaattacgaatagtgttcatgctatccattttaaatatcctccgaaaacgaagtagtacatctcatagtacgagttttgaacaagttcggtccccggtccggaagaacagaaaacttcccggattcccgctttctgaacatgttattgctaacttgctatgcctacggagtatggactacggtctcatgacgaagtcaggagcgtctgtgtggaccgtcgtacgcttccggtaccaaagtactccaccgagtagtaaaatcgcatgcactggacatagcccacggcccccaaaagcgaaaagtccaaactccccaaagcagccaaagcaaccgcaagccacggtcacacgtcggcacgccgccggtggccccccccctcctatcctatggaagcatcggatcggaggccgctcggcatacgcgccggtacggggccagtccaagtgtgttgccgccgccaccagcttccctcctcctcggcgtcgcgcatccggcgcattgcatgtgcgcggcttaagcccctttgaatcaaaggatttatatagaaattttataagatttaaatcctacagttaatttttagattgaagctttccaaatcctatgaaattcctatggaatagtacattgcatgtggattttgaagaaaatttagcaagagctctaacctcttgaaaaatttcctttgagtctatctctctcatccgattcctgcgtttttcttgcgctccagtcaaacgaccattcctatattttacctgtgttttgcaatcctctgttttatactttaattcctatcatttttttctattcctccgttttttctatcatatgatttaaaggggccctaaaccggcagttgtacgtacgctgtgcagcagcgcaggcctgcagatctcgttgcccccctcgaggcgcgcggcaattaaaaccggggcgcgcggcgctgttgcttgtggcgcagggaacagcgtgctccaatcaatatgcgcgccccgcgcggacgacgctgccacagtgcaaccacgccgagaccacaccccacccccgcgcggactccgcgcgcctctcaccaactttgcggcgcgcgattcggttgggttttttttttcctatcggaaacgtcgaaacgtgcagggcgcgtacctgcgataccaacacacgagtccctttcgttcggggcgcccacggaatgaaagaaattcggtggccgaacgccccaaacttcccctcccccgccggagcgtgcgcgcacgttgatcggtacggtgaggcaaggttgcccgcaacgcgccatcgttgctacctggtactagtagtaaacaaatacggctacgaaacggaccctttttattggcctacgcaggcttgcagcagcaagccaaaaccagcaacacgtacgcgcacacacaaccatgtgattggcccgtttggggctgggctgttagagcacgcaagatcgatgtgtaggtgcagcttattagcattgttgttggcttattgcacaaaggaaaaccaacaaaccaggttaagttaagcacagaatcagcatgtcgcacggcacgacatgcactgtatggaggagcttcctttctcgcttcgcgctgaccgatggatctgccataatcattgactagtgaacagcggtgacaaatctaatacttggtactcccagactcccagtaagtaggcctgctaatgggttggatgagaatgggtttaatggatcggttttcaatttggattgttttggtatgggtgtaaacggggtgagctacctaatggactggggcggtttggatgatgaatagaggtgggttggattggattggtttttggtttccagttttcggcctgaaatgggtggagtccatggattttcattggattggccccaatggactaccggcggcaagaaggacaggaagggcaaggagtacagaggtgatagccagccgccgccgtcgtcgtcaccggcggcggtgcctacgcctgtctgccaagaagaagcggtggtggagctttcgacggccagcggcggcgacgaccaacacgtcgtcgctctgcttctcaggcgtgcacgctgtcatgcagcagcatgaccagctcgtcgtcatggccgcttcgccggcggcaccggaggcggagaggttgactgccgctggcgtcgccaaggaggagttggttgcggcggtcaggattcaggcggcggaggtgatgcgcgtggcggcgccgcgacggggcgaggggcagcacgtgctgctcggcaccgccggcgaaacccgagctgcaccacaaggtctcgccgatgccgtcgacgttgacggactcaagcgcgcggacgatgagcggccgccggccggctcgatgactactccgccgcggcgtccgaggccagtgggcgccaacaccgcgttgcagcggctgcagttgccgccgccaatggcgaccacgaggcgacgagctgacgacgctgcagcagtggatttggaatggactcgaatggtttgaagaagtggattgaatccacaacggggaaatggtttggtttggtttggtttggattgagctgagaaatgggttgggttggtttggatcatgaaagaaggtaagtggattggggtggtttggactattgaatttcactgttgtggtttgaactggaggcggggcgggtcttgcaccattagcaggcctaccagtaagccgccgcattgctcccgtttttatataggaaaacaaataaatgtacgagtataaacttgcttgattggttcaacacttcaactagtggggcaagtacttatactaagcctgtcttattagctggagtactgaattgtcctttgctccggtttctccatttaagatcttattatatcactaatgatctcagcacctgacgcgccgcatgtgcttgccgatcaggattcaggaatcgttcagaaagagatgggaaaaaaaaacagaggatgatactctatttttgtaagaaagtactccaaagtacaagcagagatccaaaaatttattgaagaaccttcctatttacccagtgattggcagcatccaagcatttgatccaggaatactagttgttttatacctatgagcacaacaaccttgttcgtaattggtaaaccaacaacgtgttaagttagtcagattcccatatgattgtacggacagtgttttactggatttgagcacagaaaagaatacgagttttgtctttggcaacgaagaaaagacagtagtaacattgcgacaagttggatctgcccgattgagccgggaggtttgttcccttctcttgctgcaaaatggaagggtgagcaggcatgtgggccaggccgacctagcaaaactggtgtgacggcccatcgtctatggcccatacggtgcagctgccttttctcctcctcctcctcgtcgtccccaccgccggcgaggggagggtttggagctagaagagatataaatctgagcggcgctgttctgattttgggttgatctcgacatagttgtgttgtttgaatcttcttgttgtttgccatatactgtggtattttctttttttcactttggggcctagatgcggacgccgaaaggcggcgatgagccgatgggctcaaatccgaggcggattttgatattgagttagaactaatcaaacattttttcccccttgtaggtatgagtgatgatctggcctcgcccctctttcgcgacgccttgctcagatcgacggcgacgcataagcctacctcgctggttacacccggccgaaacctcatctggatttgggtaaaattaccttgatctgttcctttattttctcttgagcagtggcattacgttgttgcgtctggctgtctgcgtaatgtcttgacataaatactcttcctgttcttgcatgtctagattatcttcagagctggtatgtagtagtctcagagagagaacatggcatatttgcatgtccaaatctgcaatctgcagtatttttactaggtcttttctcagctttaacagcgacatgtgatctcttaaaatcgt

SEQ ID NO: 20652 - DNA, 1557 bp, Oryza sativa
cacagcttatgagctctgtgcatctgatatgaaaatatatgtcaacatagtaggataatgatattatctaataatcatgagcgtgttggtggatgttcttcaggttatgacagatccagacgtgccagggcctagtgatccgtacctgagggagcacctccactggtaaatatatatcattattttacaagtaattaatccccgctgaggccatagatggctcctattgttaaaacatgaataaacctcatgagtatcaaatatccatgaaaaaatataaaccagaagtgatctgcagatacatggctaaattagctaggtcattgatgctactccttccggtaaaaaaacattatgttttggacatttacacagccttgttaatttgtattacaaaacattgaaaaacaatatgaactcataattttatagaagtacctttttaggacaatctacacacaattaatataattttcatgcatccaatataaatattttaaaaattatatatggatgtccagactcaatttaaagtttgacatgaaacatatctaattaagacaacatattttcatgaccggaggaagtacagtgtagataataattaacttcttacctagcgaaacaccctccggtagacaaccactgcaagttcctacctgaaccaacacaaatggccatcactaatataatatatgctcagctactcataaaatagcgctcaatctgataaagtatgcgctttagtttaacataattaatatattgaccctggcaggatcgtcactgatattcctggcaccactgatgcttcctttggtaagtccttttcacagatatatatatatatacgtacaccttgctttagcttttacaagtttaataattaaaacgagagctctgatgagcccatggctgtgcacaatacacgcatgatgcatgctgattattggcttgtgatcatctttaatttctctgaacaaacttacacgaataacctatatatatatatacatgcatgtatgtatgcgcagggagggaggtggtgagctacgagagcccgaagcccaacattggcatccacaggttcgtcctcgtgctgttcaagcagaagcgccgtcaggcggtgaccccgccatcctccagggactacttcagcacccgccgcttcgccgccgacaacgacctcggcctccccgtcgccgccgtctacttcaacgcgcagcgagagacggccgctcgccgccgctaattaaccaaactgccaaaaaccaaattaagcccctcttgcaggcatgcaatatgcctcctgcaatattaattgcagatgcagctagccttccaaactatatattgcaactaattaagaatggactactacatatataatctagggatcgatcgagctagatcacctagtggcatatatatatcagccactattagcttagccatgtatgaaccaaataagaactcggtgcagcaagcgcgagccactgtttagttcgtcagtgtagttaattggtatatatgcctatatatccgtgtatgccagag

SEQ ID NO: 20653 - DNA, 8186 bp, Oryza sativa
agagagtatatttatgaagagtgccatttatagattgatttattcggttggtatggtttgtttgcacatatgtggattaatttagctttgaatatttgtaaagtagtatatttgatttcataatatatactaagatttttagaaatttctaaggttgtttggatagcatgcaaatgatatggatatttgaactattgagataagtgtaagtgcttattattttacatgtaagaatatatagttggatccataccactacaaatataacattttagataaataccactactattcacaatatcggctatgtaccactggaatttggggaaattggaccagtgccactctatcacgttttcctaaaaaaaatctctgttatccccaactgcatgtgggacctaactgtcagttccgtcttcacctccctcccctctgttctctctccccaccaccatcgttgacaaccaccgttgcagccgccatcatcgaccacctccgcggcaggagaggcctcgagagccactaccgttgctactgtcgtcttcaaccccatccgtggtgggaggactcgggacccgccaccaccatcctcgatgccaaccacggcaggaggctcgggagtcacaatcctcaacccaatctgtgcgggagggctcggaagctattgccgccgtcatcatcgtcgttgtcctcatagcagtagcggggatggagaaagagatgggggaagaaagaagagggaggatgggggaagatggacctcatatgtgggtcccaaatctaggggtctgacggaaaacgtgatggaatggcactgttcttgtttcttcaaattttaatggcacatagccaatatcgaaacagtagtggcatttatctaaaatggcatatttgtagtggcatgatccatttaaccctaataaatatatgggtttaaacattgatttaattgtaaagctagactacaaccattcaaactaagtatagccaaggaaaaatagggccaagtgccctagctagattactaattaaatattttctatcatcaatcagaccatcaactgatcaacctgcttagggcctctaaatataggcttaggcttactagtttcgatttttaagttatatttttagcttatacactagtggatttagagttataagtttaacggtagagtcatacatatttcttacatcagccaaaattttattttccaacctagttttttgatttaatagtataaagagtggcttatggctttaaaagagcaaaaaaaaattgcttgcttgtttaagagtggcttgtttttctcttctaattcgaagatcttttatggatttttggtgtgcatatgtatgcatatagatcatccacaactgtgtggctatctagctagcataaaaatctatgcatgattgcttggacagagttgggcacgtacgggaggcaggcatgcagcagtatgtacggactcatacatacaggggtgaatacgtacgggaggcagggtttaagggattttttttttaagattgctccgatggttgataataataggcccgccaatttaaatgaaaatcaatggttagatttttttaattgccacgtggcagcttgagagcgttttgaggagtgccatgtagcgtcttgagagcgtttctagaaagtttaatggacttttagtatataataatagataatagatagataaggtaataaagtaaacaagtcttaagcccttggaaacggtgacggtaaaagctagggctctcgtgctggcaacttggcaagaactccttatttgtagcatgaaaatgctgtccttagagtgacaagcagagaagtgcacacctataaagagtgacaagcagagaagatatggggtctatggggagagtagactccactctagcaccaattaagccatatatctacgcaacccaacaaacacccctagctgatggcaaggatgagggagaagaaccacattgtcatgcctagccgaccttgtggtaactccactatggtcccgacgtcagtagctcttgagcatcccctatgcccacagctacagttgacgatggcaaagggcagtgtaggggcaagctgttggtgagatcagtcgtgatcaacactaacgaccataaggatgatcaaagaacgaccaaacatgactcgagagctaattctaggaagagaagtataagcaatgatggaaggaagaagagaacagcaacattaatgaactaaagtggaacatacttcccttcggttatgaatatttgacacttaggacgggactcagttaaacttaatttataaattttgataatcaaagtaagtttataaaatccaatagatttttgatattttaagacagatctacattttttttattttataaactaagcatttaagaatttgtgtaaggctttaagaagggcagatgcataaaccactaatcatatttgatggccaaaaatatataagatttgaaggtggattttcattcgaatgttgaataattagcaatcctgattttctaatgtactaactttaaaagtggtatgtatcaaatatcaaatatttacccccggttcgtgtgtgaatagctttcatgcaaatttcctccccaattctatgctcaccatccatgccggcaccatagttaatgcacactgttacatggatctcattgtgtgatgccttgctatactccctataatagtatacttaagtgaaattcacttaatgcacattcatagtggtgtttccgtacatgctagtatttgattgatctaaccattacatgagatcatctcgattacaattaattattttttcactatgcatgagcaatcatttcattattgccagattgtgcggaaaagattttctaataaaggcgtattctaaacagctaatcctatctttctatatagttgcactactggagaatgcatctttgatgggttgagcaaaaacacaatagtcccggttccaataagaaccgagactaaaaatactctttagtcctggtttaaaagtgcaagggggactttatgatctttagtcccgattggtgttatcaactgggactaaagatcatttttagtctcggttcaaaaagttgtcaggcccccactacctttagtctcggttgtttataccaaccaggacaaaatacctatctttagtcccggttgtatataccaaccgggacaaaataccggagctgcacatctcgatcccatcgtccttatctcctccctcacacacgccgatactagtactcctccactccacctcctaactcctcctcctcccctcccctcctcccttcccctctcgatccgttcggctgaggcggcggcggtggcggcgggcagcgagtgctagcagcgcacaaagggggaggcggcgggcggcaggcggcagcgggcaggaggcggcgagcggcgataatgctctcccctcagccggatcctgcggaggagaggaggaaggtagcggcacacgaagggggaggcggcaggcggtgggcagcggcgggcgggaggcgaccgaagctggaggcggtgggcggtggcaggcggcagcgggtgggaggcggccgaagggaggcgggaagcggcggcggtgccctcccctccgccggatccggcggaggagaggaggcaggcggtagcacacaaagggagaggcggcgggcggcggcggcgccctcccctctgccggatccggtgggaggggcgacgacaggcggcgggcatcggcggcgggcggcggtccccagcagtgaagaatttttgtgaatttgtttagattttttttgtgaatttatggtgtcaataatctgtggatttgtgatgtatctgtgaatttgtgatgtcaattatacgtgaatttgtgatgtcaatgttcgatctttgtgatgttgatctttgttatgttggtgagtttggcgtgaaatcaatattcaaagaacaatgaaaaaaaagagaaaaatagggactataaagggtagtgccggccacgtgatgggcattcccgaattcgtggtcccggccggttgcataaccgggattacacggggttacgaactgtgggtgaagaccctttctccagcagtgttggtacccaccaaggggcatttactcttataaagcaagacatgcaagaaaccacatcatcaacaattttaagtcattagatcatattagtacaaagataataaccgttggatcaagaagctacttattcatccaattcaatcatttattaattatccattcacctctctttactccacctcacaatcacacatagcactgttacatattttgtgcataacaccatgttttccgaatacaactcaaattattgtttaatatgtgtcttttgttttattgtgcatgataagataacatataactatttggtatcgttacctgaatctattttcagaaaagaaattaaacttgagtgaaatagagagatgcaaattgtcttactataacaatacccatattgcgcatgaaaataatattcatatattataacaatacgcaattactcttggaaaaataaagcatgaattatatttcaataacataagacatatataaatctacattatcatatattttgtataaacatagagttgcacctaaccatttaaaactttgacaataaaactataaaacccatggcaaagacgtggggagccaactagtgggtgcatggattattcgtaccatgctttttgaagtgtaatattttctaagatatctttttctaatatatttgttagtttatgatattcaattcatccatatgagttatttttctctatcaatattatctattcaatcatgcagttagaaacacgtctttagtcatgtagctacctatatgcagccccttcgaatatgtcctgagattatttgtaccaaagtaatcaggtccggagaagtaaccgacaataaagtaaacattcctcgatcgtaaggagaaaaacttttcttcaagcacccaagttggtaatgtccccgtttgcatagttgccagggagatggagaccaaaggagctactacctctgtcttatagcaagtttagttttagttattatgcatctagatgcatatttaaaattttttattatatttgatgatggatggagtagtgatttccagcgggtgatcgatcgagaaattaaagtggtaaagggccggggcctcgctgcctaaattttacatcactaataactatcctgtcggttttcggcagatgatacagtagtacagtacagcactatgatgcttgttaagagtagctactagctaagcagctagccaccacactgtgctcacgacggtgcggcaccaagaaagccagtgacgtcccgacacactggagagtagcgtacgtagagtgcggcgagtgtgtggccgatctccgcgcgatcgacgcgaaccgcctcattcttcaatgccccaaccacattttgcgcctcagttactccactccctctgccctccccaccaccatataacgcctcgccaatgcttctccaaatctccaaccaacccacaaacgatccatccatcactcgatcgtaacaactttgtagtcacgcgccatgcagccgacgtggctcgccacgatgccggcagcgtcgtcgctggtcgtcggcgtcgcgttcacggccgccgtggccgtggccgtggccgccgccgtggcgaggcgcgcctggaggcacaggggcctccggttgccgcccgggccgccgggttggcccgtcgtcggcaacctcctgcaggtggtgttcgccgggaagccgttcatccactacatccgtgacctgcggcgggagtacgggcccatcgtgaagctgcagatgggggtgcgcacgctggtcgtcatcagcagcgccgagctcgtgcacgaggcgctcgtcgagaagggccgggagttcgcgaccaggccggcggagagccccatccggagcatcttctccagcggcaagttcaccgtcaactcggcggtgtacgggcccgagtggaggtcgctgcggcggaacatggtgtccgggatgctgagcgccgcgcggctcagggagttccgccccgcgaggctgcgcgccatggagcggttcgtggcgcgggtgcgcgccgaggccgcggcgtcgcgcgacggggcgtccgtgtgggtgctccgcaacgtgcggttcgccatgttctgcgtcctcctcgacatgacgttcggcctgctcgacctcgacgaggagctcgtcgtgcgcgtcgacgccgtcatgaagcgcgtggtgctcgccgtggcggcgcgcatcgacgactacctcccgttcctccgccccttcctgtggcggcagcaccgccaggcggtcgcgctccgccgcgagcagatcgacacggtgctcccgctcatcaaccggcgccgcgccatcgtccgcggcatgcgggccggctcgccgcccgaccccgccgtcgcggcgccgtactcgtacctcgactccctgctcgacctccgcgtcgagggccgcgacgccgtgcccaccgacgaggagctggtcacgctctgcgcggagatgatcaacggcgggaccgacaccacggccaccgccatcgagtgggccatggcgcgcgtcatggacaacccgtccatccaggccaggctccacggcgagatcatgcagcgcgtcggcgacgcccggccggtggacgacagggacaccgaaggcatgccgtacctgaaggccttcgtgaaggagctcctccgcaagcacccgccgacgtacttcgcgctgagccacgccgccgtggagcccgggagcaagctcgccggctacgacgtccccgtcgacgcgaacctggacatcttcctcccgaccatctccgaggaccccaagctgtgggagcggccgacggagttcgacccggacaggttcctcgccggcggcgagacggcggacatcaccgggtcggcgggcgtccggatgatcccgttcagcgccgggcggcggatctgccccggggtgggcatgggcacggcgcacatcgcgctcatggtggcgcggatggtgcaggcgttcgagtggcgcgcccacccgtcgcagccgccgctcgacttcgaggacaaggtggagttcaccgtggtgatgaagcggccgctgctcgccatggtcacacctcggaagctctccttctgacgcgtgcatgcatgcacgcacatacaacgtggcagagcacgtaagacactgagccgtggggcctagctcgctctcctgatggattgtctattaggtcagcacgtgagatataatactactactcgtagctacaaattattggaagtttgctatttcgagtcattgttttaagtgaggtatttcccggtggaaggcttatacttacgtacgcagttatactttccctaatagcgagtacttataatgtataagtaacacttctgctcaagattaatgcacatgttcttagtatatatgcatattattattagaaaaagtaggaattaccccttgaaccataaaaccggacatttttcacccctaaatatatataccggacaaattacccccctcgaaccaattcagagcggttttgtccaatgtggcacacacgtggcaatccagtcagcgtttttttaataaaaaattatgggacccacctgccatactcttctcccccctctctctattctctctctctctcgctcttttctctctcgccgctcacgtagcgcgcacgcgaggacggtcggcgagggctgttggcgacggaggaggcagtggcggcggcgaggcgaggcggcggcggaggcagcgagcgccgggaggcgagcggcgacagagtaggcgagcgccggcggggtgcggcggaggaggcagcggcggcagtgaggcaaggcggcggcggaggcagtgagcacggggaggcgagcggcggcgggagctcgcgctgctcgagacgaggcgaggcggcggcggaggaggaggcgagcggcggcggggtgcggcggaggaggcagcggcgaaggaggaggcgagcgccggcggggtgcggcggaggaggcagcggcggcggcgaggcgaggcggcggcggaggcagcgagcgcggagatgggaccaatcgcggggctgcagg

SEQ ID NO: 20654 - DNA, 1660 bp, Oryza sativa
ctcgcgccgcgcgccgtcgccatctcccctcgagccccgcccgcgctgcgcgccgtcgtccgtcgcccgtcgccgccgttgccttgagccccgtccacgcgccgtcaccccgcaccgcctcgcctcctccgccgccgcgctcgcctcctagtccccgcgccctgccacctagtccccgcgcgccgccggacaccgcgcgcccacgacgaggaggaggagcccgcggtggcggcggtgtcccaccacgcggaggaggagcccgccgcccgctgcgcgtccccccgcgcccggtcggcctccacctccgtcgccactctcctccgccgcaccccgccgccgctcgcctccccacgctcggtgcctccgctgccgcctcgcctcgccgccgctgcctcctccgtcgccgaccgccctcgccgaccgtcctcgtgtgcgcgctgcgtgagtggtgagagagaaaagagcaagagagagagacatagtagagagaggggggagaagagtatggcaggtgggtcccacaattttttattaaaaaaacgctgacgggattgccacgtgtgtgccacgttggacaaaaccgctctgaattggttcgaggggggtaatttgtctggtttacatagttgggggtaaagaatatccggttttgtggttcaggggggtaattcggacgatcgcgatagttcgggatgtaattcgtactttttccttattattatgtctatcacatgaatttttagtggaaagtattacattattgtattgtgcaaacatttttcatggcaaagatctagcggtttcgtttaagatacatgacaaattaaaatatttgtaattatgcgcggaccctgaaaggtactccatccgttcttcccaaagacccaaacactatttcaattgtgaccactaaaagaattttaaattgctagactataatgagcaacagcataatgctgatgtttaagatgcaacacacttcaaaataaagcatcttgatactctctccgttttttaatattatgttgttgacagaaaacattagaccgcttaaaatctaataagtcataggctcatagcccgcgaattcttaatgtcatttgacaaaatccatcccttcaaatcttgcgaattctaaaccattagatcgctttaggattcgtgcgctgaacctaaccctaatttcttcttccctctcccctcaatcatgtcgctaccaccacttcgctcccctcccttgggcacgcgctccaccccctcctgcgtcgccaccgccgcccggctcaccggctggcctgaaggcgtcaatggcgctggcgagagatccctggcctcctccccctccccccttccgccctctctccttcctcctcgagccatcgacggcgagatacccccaccaccaacgccggtgccaccactctccttcatcccccatggctccggcgcctcgccacttgcccgttccaccacccaacaccgtgccgccgcttcccatgactatctctctaagcccggcgacctcctccttcttgccccctccccttcccattcctcccaccctcaccccacctagagagacgctaattcgtcagtcctctggtggagtttgggttgttgcaggcaccggagaagaaaaaaaggtcattggagttggaga

SEQ ID NO: 20655 - DNA, 3691 bp, Oryza sativa
tgggatcatatcaaatatatgaaaacttatctcaatgagagagatagaggtatatatctatatatatgagaaagcaataagatgtgatgtcttttttgtcttcattggttatctactgctctctgcattttcatattttaagtcattttgattattttctagttaaactttttaagtttgatcaagtttatagaaaaacttttaagtcaaactgtggatggtgccctccgtgagatgaccctactgtagttttcagaaagaagaaaaagaaaagaccctaccgcatatatcgaccagtttctcgatcgatcccctcataatgaacctccaaatgcagcgttgctttaaaacttgtcggcatagaatacacccaaatataatgctatcgttgtcaacaaatgtagtattaattaggcaatgattgtacaagaagcacagcgcgctaaaaatattattttaacagtgaaatgttttcgaggattattttagagttttgacaatgacacggtcaccaaaatatattcttaactttatcttattataatatatacaataaataaataaataaatgcatgtttactttctttatattactttgaaagacagatgtagatatgctgttttgttcctttaaattaaattttgtatcacaaaggaaaaaagtataacaatcatctcataggtagtgtcatgtcttattttgtatcacagaggaaaaaagtataacaatcgtctcataagtagtgtcatgtctgtagaaacgtgatactccatttccatttccatttatgtaagccatttttctgaccattttatcatttagcctccaccagctagctcggagattcccttctaccttagcatatttcgttgcctcaccaaaaacagtgagccaaaataagcatgttcctcattagatttgcaactctggacccacaatcttgtgtcccatgcctctccaggtagggagggagaggaccggagagaggccagcgacggtgatggccacgtagtgaccaggctggcgccggcgacggggacgtagcgacgcgggggaggaggggaggggagaagcgccgccgtcgtttgggaggatgagaggccgccagcagtgaggaagataggagggggagagggaggcgactgagagggagaggagcacgaggtcgatgccgcaccgctgaggtcaatccggagccaaaaagctcgatccgtagcttggcggcaccgtcgttcgcggctttcggccccgacaaggtggagccccactcagcgccgcttgtgtcgtgcgctgctgttccgcctgtcgccatcgcttgggccgagccaccgctgctctgcttgtcgccgctcccaaccatgacctcaaccgctccactacgtcgagccgcttcaatccgctacatcaccccatccaccctattttgcaccggcggtggccggaggaggaggaggaggggaggcgtggcggatgaaggaagagggggaggcgtggcggaggagaagagaaggggatggcaggtggaggagaagagatggggatggagaggtagaggagctcgaggtcgaggccaatgttgatttggaaccggcgagctcaattcgcagccggcgccgatgccgctcgggccgcccagtgccatcgccgctcgggctaccctagcgcttcgctttttcttgcctcggcttcttttgccagtaaggactgggggaaggaagaaaggagagagaggggggtgatgaaaagtgaaagagattggtattggtgagacccactacaagcaagttgcattgtggagtatgtagcttaacatgttcttggtctgtggcatgtgaagaacgacaaatatcagggacggattgctattgccttaatggcctttacaatgtggtagctgtcatcagccgatctcttcatgtcagcgattcggtgtgaatctttaccatgttcgtaggtaggcccaccaaattaaagcccgcgtgatcttctttggtcacctgttcttggcgtgggtagagaaggctacggatgtgttgggaggatgtggtttcgttccgctttttctatatgcaccgtggatcttgtggcttccaggtcaatcttggtagcgtcttggaccaaggctacgcgtggcccgcattgtaaagtccctaattgcagaagcacttatgattatacaagcatcacaattatttgtttcaaacaaaccatacatattaaccttctcatttcagactaaatcttgtacagttaacttaccagcaacacctacaaattaagtactacaagtaatagtcacctagctaatactaatatatgtacggacgtaacagtagtctggcagcgcacgacgagccaaaaccggatctcgtctgaggcttgcctcttcaccagctagcagcgttggcacgtacacaaactattccacatagagcgtgtttgcgtgtatagttcacgtcaaaatttaaagtttggttaaaattagaacaatgtaacagaaaagttagaagtttatgtgtagaaaagttttcatgtaatggaaaagttgaaaatttaaataaaaagttcagaactaaactcgccaggacattcaaccgatatttaggttagcccttcttcactctaaggctaatctaagcccttatttagttcctaactttttcttagaacttttaactttttcatcacatcaaaatttttctacacgcataaacttttaactttttttaaactttcaattttagtcaaactatcaattttagcgtggaactaaacacaccctaacctgctgttttggtagtgtacggaagactaattctctgcaccgtactgtaattacgcaagtccgtaaagtgcatgatcgcacattaagtactgtggttacgcggttaagcaaagaagaacacgtagcagaatgcaatcagccgtcgccctgtttttctttgcttagtactgatgcataatttccgagttttcaaatagtgcgtatttttctgaaaattcggaaacaattctgtatactccggatccctctggtttttaatatatggtaccgttaacttttgctatatgctttggttattcgttctacttaaaaaattttatagaaatcttaaaaatataaatattgcttaaaagttccttgagtaataaatcaagctacaacaaaatgacatacttaaatttttaagagtaattttcacaaaactacattattttgcacaatttattacaaaactacagatttagtgtctctgtttatcacaaaattacagatttaagaacttgtttcataaaactatagattcagtgtattcgtttatcacagaactacacatttagtctttatttatcacaaaactacagatttagtgtctccattaattatcacaaaactacaggttttaacaatgctaaaacctatggttttatgataatgaaggcacttaacatgtacttatttatcattttgtgacaaatgaaaatattaaatctaaagttttgtgaaataagttcttaaatctgtagttttgtgatatattgtgtaaagtacatgtagttttgtgataaacgaagaaatatgtactttcatgaaacaagttcttaaatatttagttttgtgatatatcgtgcaaagtatctgtagtttttatgaaatttacttattttttaataagaaaagaaccaaac

SEQ ID NO: 20656 - DNA, 21205 bp, Oryza sativa
gcaaatagcttaaaacaaatggtttaaacaatgccgcagaagaaaggtttttaagaaaacatatttttcaaagtgtactccctccatcccgaaaaaagaaatctaggactggatgtgacatattctagtacaatgaatctggacagaggtatctccagattcattgtactaggatgtgtcacatccagtactagattagttttttatgggatgaagggagtagagcacttaatattttaagtttaatagtttggtaataagctgaaaggaatgggtctggtcaaaatttcttagccattgaattgctggaattttcacctttgatcgtttagaaaatcctaaaaaagttattctagaaatgatcattttttgcggcacgaacgtcattggcatcgtaatccaacatgatggcgctaatgacgttgatgtagccccatgtggaaactaagtcactaatgtgaatgagacaacattttgctgtccaggaactatttgtatttttttgaaaatgatctatttgtaatgaaaaatatttacaaataggtcctcattgcttgcatcattatcactaaggatctatttgtaatttttttttattacaaatagatccttttctactacgaatagcagccccatcacctcacttattcatggaataagccaaacggaatatttgcgaacgaaaaataatttgtgaataaaaattttatatatgtgtttttagtgatctaaaagcaaggctgaaaaataaacttcaatgatgaaaactcaaaatcggctccaaatttaaagctgaaaaattaaattttgactgataagcataagcataaacgaaaagatgggactctaggtcttttacattttcacaaatagatccttggcgtcaatgatattggtgatttggtaccgtcccctatcacattaggccattcccaacccaataactaggatggtgtacatagcattaaataagctatcacataggatgaaaaatgatgtggcaagtgaataatgaggaaagagaaggaaaccatgtcttgcatgagacatggtttctacacaacgtccaagacattagtgagataagtagcattaaatttaagtatggaatattggtgtttgcattggaagaatagtgtctagtactagtttcttgatgatgtggagtttatgaaaattatgtctaatgttttagattgggaatggccttagcgacttagctttcactagagacgagggggacggcgccaacatcattggtgcaccaatgatattggcgccacgaaaagggtgtattcttggaataagttttttaagatctatttgttaaataagtttttcaaaatgatcaagaagtgaaaaatccatttctcaaaaaaaaaagtgaaaaatacagcattgaattgttcagatcaatctcccgagaacttgcccaccgtagcaaccccagccttcatggcgtattcttcggtgtctctctaacggctactgttgttcattgtcatccaaccatttcttccatccatgacaccctcactacacttaatgaaagccaatcttggagggtctccgtggtttcctcgccgttgtcaagatcgctagagtaggagcgatttgtttcaccttcttcaatggcctttttgtacggtgattaggtgatagtagtccactacccggaagaatggaacagaaagaaacactctcatcgcttgtatcacctttctgtgtgtgtggatgcactagtaattaaccgggtccatgtggcccgtctcattatagtatctatccctctcatcaagagccaaccaaccgcagctagttgttatataagcaaatgctcatcattccctgccttcctggagcgtaattaaatgttattaggactagtatgttgttagccttttgggacttaggactgcaatccatggcccatttcggactccaccaaccaagaattaatagaactactctaatcaacttcatgctagctgaacgccagtgacctaccagccaacatgagctgatcatattagcttggccaataactaggatgtgatcattctggacttctggtgacagcagtacagcactttctgcaagggccattcccagactgcagtgtcctgcaagaaccattcctggagaaacaatgacctgaactgccagaaatgctcccaattgtaaggattcatggaactctggttttcagaaactctgagcctctgaattcagctaggacaacaatggaggtggttggctggtcgcattacattactttgtacagaatgaaaggaagaacaaaagtgagtcgacgtaacatccttcaccttctttttcctagccttgtttccatgatatgttcttgcttaaatacgtcagttttactcgacagtgacaacgcaacaaacacccaagccaattaattaactgagagaagaggcgaaaaaaaaaagagagagaacgaatcactcttgagttacaagcaacatgaacgggtcacgtgaacatttcacaaatccatggcactgagattacagagaggaattatatgcctctaggggataacattatctggcgcctagtagagtgaatcgaccgtcttgttcagctcctcgagcttcttcatacgcatcctctcactttcgctcaccagctgcgtcgaaattataagttttcagtgaccgatttgacgatctgaagatcaaagagatggtgtgacaaacgtttattaattctactcacctcaattagcctgtttacaagcagtgccttctccttgttcttctcgttgtacgcctccaggatttctttgtattccttctcctttataagttttcaattcaagacagacaaatagttgtgtcagcttattcagtcccttggaattaattcatcgtatcacgtcgcaaattgtttcgacagggtattccgactattatgttcaagaagttgtactaaaaaagttagaacctgttgaattgcaaatcaaatctgtgtcatgcgctcatgctattcatgcctaaatatgtatttatgtgcagttctgcacatcaagtctgtgccttcaccttcttgacgcaggttttgccgagaggcttgagctgacggttcaccacgtcgatcctcttcctgatcacctccacctccttcctggttggatccgccatcccttccagttcctatcaaagaacaaacaattcagccacacgcatcatttgcagctgattttttttctctattcatatttaaaatttgggtaattttaccattcttaagaaggtatctagaggtaccaaatttttctctaggtactcagtatctcaaggtactaaaaaaaattttttagtataaaattttgatacctttagatactttcttaagaaccgtaaaatttctcttaaaattttcttgcatcttttctgagctagctgatcatttggtgtgcctttaagcatcatcaacttgtatgcagtacgtgtcctatatcacacgatctctgttacaagtacagataaaaaagaattgttcctttttagggtcctgaaacagcaattgctacttccgtgctgtttctgcagttctttcagacgaaatcaagctgaaatatcataaattataaacctaactaacagctcttaggacatatatgaattgtattttgaaaacgtgacatgaataagctgcagacattccaagtcggaaagtgacctgtcggatgaaggcaaggcgcttggactcctcctcgacgcggccgagctgcgcgaacaccttctccctcacctccatcttcttcctctcgatctgctcctccttggccttgaacaccgacagcgccgacctcgacgacgcctcgccggcctcctcctccccgccgccgccgccgccgcccagcgacgacgggtgcttcacccgcagcaccatctgcatcggctgatccacctccccctgcatatccaactacccaatactgcaatacaccctctgatctgtactgcagtagtctacactggtggatattctttctttctcctcttcctcgcttcccgccatttataccccccgccacgatcctgtccctctctgccccccgtcccggcttcccgccgcggatgctgcatgtctaagcaacgggacgggatggaccgacgtaacatggctcctgccaatccaacctgcgggtgtatcgcacaagcaagagctactccatcgagaaaagaattgaagaaaaaaatggcggaatcatttcattcatttgtctgcgacgacggatgaggagtcgcttctgtcagaaaaacctggcgatgttaggttaggtgagacgagagctagcctcgcgcgagagctgtcattggcagtgcagtgcagtggaggggaagggatcccgatcgagtcgggtgagccggcggctgtcgccggttggtgcgcgcggccgtctccctcctcacgccatttttttttcctaaaagaactttttcgatcgagtgggctagctttcgcgctcgattcgtcccgcggcttagatttttcccgtctcgtcgcattgcaagagtaggcgatagccgatagcttagcttactgctttttttaattagggggaggtagtgagggggacacggcgccggcgaggcgaggcgaggcgaggcttggaagacacaagctgcgccggccgcggcgtcgccgtcagttcgccgtggaaagtgggaaaatgtgggcgacgacgcgtgcaggcttcggcggcgacggggagatgtgaggtggccggtccgatcggtggatgccgagagatgcagccgagctgaggcagagcagtaacgaactgttgctctgcacagcgagagaagcacggttacacgaacacagtggggggtttttttcgctgtcattttcgagatcggatcacaaatggtacggacacttgtgtaaggacaaaaagggatgcacgcgagagcatctcgctttgtgcgactgcaaatctaatgcatgatcactagatgatccatggttgttagctttggctgaaacaatgaggatgttagggctcctttgaatcaaatggaaaacggaggaatagaaaaaacataggattgggataggaaatgtaagtgtaagagaattggaaaatacagaaaaacacaggaatagccgtttgattagatcacatgaaaaacacagaagtcggatgagagagataaactcaaaagaatttttccaagaggttgaacctcttgctaactttcctctaaaatcttaataggattacctattccataagaattttaaaagatatgataggattcaatcatttgttttaaaggttaccataagaatattttccataagattaaaatcctctaaatttcctacacttttcctacttttcctacaaatcaaagggaccattactagttctgatttgatccttctatttagcaaagctctttgttgcgatagtttcagaatcaccgataccgatgtcatctttcataaaaagacaactgaagcggcagaaggaagtcggtggcatcaaatgcaaccaaaaacagaacagattcaaaggggtcatccaggcccaggagacagagtttgcagaagaccactactactaaaaatttgaagccttaaaaatacgaacagcacaatagatcaatttgggctaaggttcaaccgtttgctgaaataagttgtccaataacggagaatcactatataaagcttatacagaacatagtaactgtaagcactgcggttccagctgatatatatcctgttttctaacaagcgaagagggtcgtctgaatcaaatcagcaacatcataactggtggctctcttcactctcctggggcagagacaccttgcttcagtttttccctcttcatcttcttcttcgagactggcttctttttgcgaggaggaagcgtcttctgagcgtacacatagagagcgtagttcccgacaaagaaaagcagcaggaaggtcgcgaccacaatcaggactatcattccagggttcagtcccttgttgacctcctcaatgactacattgttctgaagaccagaaaacaaatctatcaagcactatgcatgacaaaagggcactgcaatttaaatgtatgtgacttctttatcgaaaaaatactatgaggcttgcagggttagaagaagttaacccttccataggagtatatgttacaagttactagacacatagagccagagcagagatatctgtggacatggatgagtctgcacatattgccatgtatagatctccatacacagataattcgaaagctagataacaattatttgtactgtatagtcacccacatctgtagttctgtacagtttgatcacagcacaaaataaagcttattactaaggattgcatgttttcaacactagcaactagcccatccaagagtggccaaaactaaatggaacatgatagataaagtgaagtggtctgcctagaattaccatttgcataagatacacaggatggctattaaacatatgcagtagacatatacaaggttggtagtaatcacatacaaggttgaacagagggaaatgggatggcagtgcataactgcatatatatattcattgaaaacagcagcaatctatgtcaacattcaatttcagcatatttacaggataaaaaatattcaaaatagtgaacaaacaatgtggacttgataactgaacaaaaaatgaactattggaatttggaaagcgcaaagttcgcgatataacttgattcaaaaattaatttaagtttaagaaactaaaagatcaagtgtacatcatggacatcatggtaagtaatactccctaatgaatggccaccgaatgtatgaccatgcaaagactactgcaataatccgacagatctaaccctacccataaaaaaagcaacaagtgcgtgaatccattggcactaccatatcaacggaacaaaagaagtataagaagcccgtaagttccttaccgcagagtccgcgaactgatccgccatggctgaccgggaccaaacacctgcaactctggatccaacgatggatcaaactctggcgaaaaaagaaaaagaaaaagaggagcaattcttaatcgagaaggggttgtatcaatctccaccaaacctcaatccctacctctccttttttagatattttatttagcctacggcagctgctgcactattccgctgttcgtggccgatcgatcgtcgggtctcgccctcccgcttacgggattcggttaaggagttcgatgatctgataggattggaaggtgcgagtgaggaatactactgaaatttttgggggagttctgagagacggcaggacgaggattcgagcgaggaggaggggatcgaaggggaagacaacaatatatttgggcagatgaccccacccagcagatggtcacacggtgcatgtgtcaaaatgggacaaaataaacatgtcatcgccacctgctggataggataaggatatccttacaaagacatagtaagtacaatcctattattttcttttattcgaatcacttattattaaataaaaatttatttgtgtgtaaaatttttacatggtgtccttagccactcaaaagcaaatgacctaaaataaactacggtgaaaaaccaaaaaatcaaattcaaaattaagttctagtaaaataactctctaacagcctctccaaataactctctaagctaaattttagccattccagtgaaatttccctccaacagcctctctaacaggatggctaagtcatatggctggccaaaaccctccccacactagccaaatttgaccagccaaaaatcactggccaactgtggaccccacgcgtattctcctcctatctcgttgccggccatagtccacagcgccgacgtcgtcgcatgcaaccgccgtcgcccgccgcggcctccgccgccgtccgcaccgtcgccggcagcggcctccgccgccatccatgccgtcgccgcccgcgacctccgccgtcatccgtgccgtcgccggctgcgaccgccgccgtcgtccaccgcaaccgccgctgccgaccccacgcacaagctggagcatgagcagagctgcagaggcacaagctggagcacgagcagagctgcagaggattggagaaaggggaggaaaaagaaagaggaggagaatgaaaggtgggcccattgattaatagagagagtctgttggaatagaagacaaatttgactctctaaatttttgttaggctggccaaattggtatttggagagtcaaaaatggccactctgttgaagatgctcttagggtgtgttcagcacccctttttcccagcctatttctctcgtttttcgcgcgcacgtttttcaaattattaaatggtgtattttttgcaaaaagtttttatacaaaagttgcttaaaaaatcatattaatctattttggaaaaaagattagtaaatacttaattactcacgtgctaatgaactgctccgtttttcgtgttactgttccgggttgggaaccagtgtatacgaagacaccctaagaggggccaaaaaaaagaaaaactatagtaagagggacattttaacaatctcatagagtatgacttgtgggctcacatttgtcaataatatgtgggtctaataacaaaatcgttaaatgtaacacgtgaaagtggcaaatagtaaatatgtgatagtaaaagggcagcagagcaggcccattatcatatatgaaaccttctcattatcatatatgaagtagatttatcatatactccctccgtccctaaatataagggattgtgggtgaatgtaacatatcctaggctatgaatctagataaagggtatgtccagattcatactcttaggatacatcatatctatttataatccctcatattttagggcggagagagtaataaattagtagtagttggcactatgcataagaattaaagcaacaagtgaatctattagcactatcataagtataggtttttcactcttggaaatacattttctctattttaaaatgaactaatttctatatctaaatttttaggcaagggttggtttattttggtacgaaagattgctatcatgtttggttgcttgatgcagagctgtgcggcagcaatggttgcttgaagcagttggctgcgacgcagccaatccaccaaacagccgaacaaggcctacgataatatacatatgccagaaaccgtcgttgtatcataatgttgcatcacatcattttgtttggctgtatgtatcatactctctccgttaaaaaaaaattaacctaggatattttgagttttcttgggacggagttcataactgtatattgtatattttgatggttatatattgtgaattggacgtcatagttgcgcagaggatcaagctggtgtggatacatgagatggtcaagactagtgacagtagccgagccaaaacagatcaaagcatcatcaaggatccaagggcaaccgggaccctggagcatgaaatctgtctttgtgggtttgctgataggcgtgcagctctcttttttttccgcgaaagtacgaaagtacagctattacaatcaacataagcgcatggattatgtgcacacgtttcttttgaaatgaagatttaatcaatttgccatttattaggaatagttagcaatataactgaaaaacgttcagatatgtatggcctgttcaggctcaatttaatttgggatgacgcaagcatcatcttgtgcaacaaacttgaaaatgcgaaggagggagcccaagctactatggcacgccggatgcatgtcagcaccaagccatcaaatacaacagaaaacagcatcaagttataaatcattcagatttcagattgcaagatggctacgcaggttgcagaaattttcaggcacgatcgctagctaaatcaaagagacacgcagaaacaaaaccaaaagaagggctcaatttgcagtgctgttcaacagattgctcaaataaggcgtctaatacaaatgtaaaccacttaggacaaagcttctacataacatagttactgtaaacactgccgctccagctgataattcttatcatgcaaaagaagctcaggataaaatcagtaacattggtaaactgacgaatctcttcactctccgggtgcagaaaccccctgcttcagcttttccctcttcagcttcttcttggagactggcttcttcttccgaggaggaagcgtcttctgagcatacatgtagagcgcatagtttccaacaaagaaaagaatcaggagagttgcaaccacaagaaggactatcgttccagggttcaggcccttgttgacctcctcgatgatcatgttgttctgaagaacaaaaaaataaactatcagaaaccaccctaaagattgaaaatataattgcgatttaggtagctggaaaaatcaaaatagttaacccttcaaacttatatattacaaggttagtatgaacaaattagagcagacatgtacacccttttgtacacatgggaaacccaaaagctgacttcacagatcagcatgtctaagcatgtcaacagagcatgtcgacaaattatgttcaatatggactgttcagttccactacatatctgttaccctttattcatacagatttatcactgcgcagacgaagcttaattttaatacattattgagtctgacatttcatacatttacatgttttctacactagcaactagcctataagtaagattccaaaaactagtccgaggtcagccaaaacgaaatagaatgtgtgtaaaggtttgccattcagagaaagatatgacggttaactgatataaggatgcatacagaacaacaagacacaagtgttcagaacacctgaaagtgtttgaaagcaagaacatatacatttaaaagaggcaatcatgccaacatacagttccagtggattcacagaacataaattataaaacactccaaatgagagcacacaattgtgctcttaattatttattgaacggaactacactaatgaaaaggtagtcatgaatgccatgaggacaaagttaaattaagcaacgattaaacgatcatgtatgtatcataaataaaatagcaattcagcagaccggcaagagtaaaattatctagtgatgtcaattcttgaaacacgttatacacaaccagacacactaacctaatcaggtagcaatttaatcattcagctaggggatattttcctttttgagttggttcatgtggctcaactttggtttcatatctagtctaccagccaatttgcttcagattagaggctgatgatgataggacacagctaaaaaaacaaaaaactgaagaggaaacggaacaaccataaaatttaccgagatgtaacaaaatgtatgaccatgcaaaaactacagcgcaaattctacagatctaactatccacgccaggggactgatccaacttgggacatgggggttcagtttttggggggaacaaacaaactgttacttgtattagttaaggctctgaaattaagagaagagcttcttccagatctacaagagaagctagggtcaacacaagcaaattccagacaaaagcaaatccgccgtaaaaacgcgtcgagatccggtcaaacaaccgaaacgtcgaaggtttcgcacccctaaaaccaagagattaaacagaaacagctcgcagatccttaccgactgatccgccatggcagcgacgatacccgcagcaccagacgacaccagctgcggacctctgtggatcgaaaagaaaattagatcagcggctttagccaaagaagaatttctcggaggaagaagagaccccgtggaagtgagagatctccacagtggattaagcccgccgtcctcacctctcgcttcttggcgcggatttctcacttctcttcctcccccccttggcgacaagctcgcgtgatctgctctgtcaccgcttgctgctcatgctcgttcgtccacccgccgtgtcccgcccggctttatgtatttgtctccgagccgagccgagctttacccgatttctcgtttctccgtttatctgtgggccccacatgggtgtttccttggcacatagaaatgggacgtggctgattcatggtcaggatctgccgtccaccgctggatttgtcacctctctcggtcagtatccgtctgatcggtcaacggtcaactcttgtgtgaaggaacgagttgaggttttggatagggttactttttttggataatgcgtgagcagcgtatttttcgaattgggcaaatagaagtggagtttggatgagggcattattttggcatgaaaaatttgatttgtaagttcttctcgagaaatattatacaaatacaagcgcacgtatacacatgcatgtactcacttatatatttgcgtgcacactgtactataatgctcgatatgatgtccctaaaagtgttgcattaaattagatgatgaagtgaatgagagaagtgaggaaatggaagatgagtcactcctcatgcaaggagcaacattcacacaaactcgaagagaaaaaaaataaaagaaaaagtggattagacaaacaaacaaaaataaattcattagggtcagtaagataaaggtagtgtagaggtgatgtattgtatatatcacctcttattttacatggacaaaaatagatgtggtaactacctcttctataaaacttgttctaaacactttcgagaatttaggctggtatattttgagattgatgaatttaccacatgtgctgacaacttaaggttgacgtagtttaaaacttgattttgaaaataaaaatcatctaagtctatttttctataagggcgtatatataaaagttttatccattaattcattttttctaataagccgtgtgacttataatcaatattaggacaaccattttgtgaatgaaaattaaaggagggctaaaataaaataagggtggaaggaatgaatggctaagattaaaacttacatgtgggaaatggtagtatatattttcctaatgccattagccaaacatactatgcgggctcctgtcataagtatttaatgtttaagagtaaaactgagtcaattttttattgccataattgtgatatcagtgtaattttatagaatctatgcagacttacaagttaataagcttatgatgttatgataatattccactatttttaaaggcaaatttatgcatataacttttttagaagctaattacttgaaatttatttacgatagtcaaggttttagaattatgaacaaatcttattttaagtatcaaatatttatcaccagagggagtaacttttgctaagaagatggttaaaagcgaaagtctaacaggtggaacaaaccaatgtagtagtagtagcccaaatcgtgtaggtttttgttaataatggaaaattcattccagcctttatttcaaagaaactagttaaactacagccaaatcgcttaggtacccagtaaggattcaatccaaagggcgaaactgctcttcaaattcatcaaagcaaagatcgatgtaatgtcacaccgtcaactgttaaaataggtgtcaaatatactagtcctatttggttacagttggacttggagttgtaataggtgttagggggtggagttagagtcggactctgtaacccgtcatttctcttaaatagagagggggcaccacaatgtaatcatggcgactacaacgtagcgtagacacgcagggagatgatggcggcgtggccatggactcgtagcggctaggagctatattggttggggaggagcgcccataatcagagccccggggatgtaggcttcggctgaacctcgttaacaaatatcgtgtgtttttgtgtcgtcatctggcatgtcttgggtgatcaatgattgaagcgatcgagaaggttagtcgtcgttccgctatatcgactaacttttataacaagtggtatcagagcataaggtttcagcattggatcaagaagacatgtggaggaggaaacacgaggtggggatcgcgcatcgacaggagatcgtcagccgtggcgatgagatcgatggcgacaacgaggatgttgcggaggcggcgacctcgctcgcgatcagaccggcgatggcggaacgtgaccggaagacggggccgggcgtggccgaaggcgaccggagagattggaggggtagcgccatggacggcgcacccgacgcacgcggtgaatgtggatccgcggcggcagggaggctactgacggaagggcgaagccagcgagcctggcacggcgcggcggacgtggagggccgatgacgatgaggtcgtggacggtgaacacgagggttgcgactgcggtgcgtacggtgtacggacagcgcgtatggtacgtgctatacacgcacaagacgcgcatctggtgaacaagaagtgcagcacacaaagagtccaatggagctacgggcagcatgcactaatttaattagtgtttgcatggtgtaattatatgtaaaatcatacgacagggcttgatgcatgtacgtgcatgcggggctgcagttaattgcatgcaatagcataacaaatatgcatgcaagccggtcatgcatgaggagagcatgtggcaggacatccatggatctcaacgtggagtcgtgtgcgtcagaaggccagagaaatcctattcgagcaagaagtggtgtgtgcaaatttggtggtggcacgtgacgctaaatgagatatattggagccgattcttattggagcttgacacgggcccgacttggactaggcagcattctatgggaaggattcatcgagtttgtccaggactcaggttcctgtccgactcggtgactaatgacgctctttaaaagaaggcgtcaggacaggattggctaagtaactcacaacagcgtaggcacacagaggtttgacacatcgtttggtggactatttggcaggcgacgacgcaaattgcacgagttcttgggaagaaggcgcacgggtgcgggtggaccaagccaggctgacacggttaggcagctagcaggcggctaaaccaagggcagaagatctggtctaatcggtgcagcaaacagtcggtttgctgttgaatgtctgagatcggatcacaagacgagattgtgaagacgaatacagacggtactgagaaaggcgagtattctggtggcgatagaccagtcaggtcgcgggttggcaagttggcgccgacatgtatgaaatttgatttggtgaagtttgacggcttcggaaattttggcttgtggcaaactagggtcaaagatttgttagctcaacaagaagtttcaaaggctttgaagggtgtcaaaccggccaagatggaggatgacgattgtgaggagatgcagttgcaggcggctgcgacaataaggcgatgtctttcagatcagatcatgtaccatgtgatggaggagacctcaccaaagataatttgggaaaagttggaagctcagtttatgtccaagactctgaccaataaacggtatctgaagcagaagttgtatgggctaaagatgcaggaaggggcggatctgacagcacatgtgaacgttttcaatcaactagtcactgatcttgtgaagatggatgtggaagttgacgatgaagacaaggccatagttcttttgtgttcattacctgaatcgtatgagcatgtggtgactactttgacgtacggcaaggagaccatcaaaactaaagatatcacttctgcgttgttggctcgtgattagatgagaaagaacaaagagggtgaaacatctcaagcagagggtttgctagtcaaagaagatcatgctgggcataaggtaaagaagaacaaaaagaagaagatggtgaagtgcttcagatgtgatgagtgggggcatataagaagggagtgtccaacactgaagggaaaagctaaggctaatgtagcgacttcttcaaatgactcggatagcgatggttgtgatcttctcacgatgtcaagtgcacagtctaaggatgcagaagcgtggatattggattcagctagctcgtttcatgtgacgccaaggaaggagtggttctcttcatataagtctggtgagtttggttttgtctacttaggcgatgacacaagttatccggccgtgggagtaggtgaagtcaaaatcaagctagaagatggaggtgaacatgttcttcaaggagtcaggcatgtaccagggctaaagaggaatctgatttcgcttggaaccttgcatgaagaagggttaatattccgcggtaatcggaataggaagaccattgagatcatgaagggcaagatgactatgatgactggagagaaggtggagtcgcatctttacaagctgcgagggtgcactgttgcaggtgtagtccaggaggaagcggttgctgggatagcaattgcttttggtggcggcgggtctggcgcagactcgtcgggcggcttgcggtgaagctgcaaagaagacaacccaagtctggaggaccggtggatcggcatggtgattctactacttctaggtggcgtatattcgccaaggtggagtttgttaaaataggtgtcgaatatactagtcctatttagttacagttggacttggagttgtaataggtgttagggggtggagttagagtcggactctgtaacccgtcatttctcttaaatagagagggggcaccacaatgtaatcatggcgactataacgtagcgtagacacgcagggagatgatggcggcgtggccatggactcgtagcggctaggagctatattggttggggaggagcgcccatatcagagccccggggatgtaggcttcggctgaacctcgttaacaaatatcgtgcgttcctgtgtcgtcatctgacatgtcttgggtgatcaatgattgaagcgatcgagaaggttagtcgtcgttccgctatatcgactaacttttataacatctacagattaagggatcaagctatcgacagtatgacaagagaagacacaagagaattatctccagtagaagtttcagccttgcaggtataccagaagtgacaagcgaagcagaaacataaattaagcaatttatagtctagattcagagacaacataacactacagtctacaggtcagcaatcttcaaaatgtaaccatagaactcagtagtcgtagtgtagattcagaaattcaactaaacataggaaagaacagaagcctaccagtggcatcacaaatacagtactcttcagcatgaaatgcatcctactaggtcataatctagattcagaaaggcaactaaacacgacaaaaagagcagccaacagcatcatgaatactggatagcagtcatcttctgagtgaaacctcaaagctcaaacatttagagcgagttcagtagtcagcgatgataggtgtcgaagggatcaggcagagtattcgcaagctctaagctcaagtgctcgagatcatggctttccatgtcttcaaacacgatctcagcttctgtggaggccacgtggctttggttgagcagagcttgctgacctgcaacgcattggggggtgctgaacaccttagactgaatcgtcatgagctgcagcacctgtgctctagcaaggagaaaacatgcaaattcaagcatgtagatgttgtgaactttgctttccagtcggacgctgttgaggtggttcatgacacacccaatgtgatcaagcttttcgtggtagcttgagccaacagtgtcggtgctatcctgagtcagatcgaaccttgtatcagaggcctgcacggaatgatgaatccaatgaatctgtgttcagctaaattgaacaggtagtacctacacagacagtgcaatgcaagtattgcaacagctcaagctcaaccagttacctgaacgtgcaatgtctccacgaaaggaaagaaatttagcaagttcatcagcttgtccatgtcattcttgctcgagaactttacactgatagccagaatcttcacgctcagaagcggagcacgcaaaccattacagacatcctgatgcaatgcacaagtaaaaataactcagtgagagcaactaaagagtagagtaggagaacgacgaggataaatgaaacaagaaaccaccttctcaataacctcgtcgaagaggaggaaattggacgagctgatcacgacatagccgaaagcggtgagctttggcgcgccagagacgttgatggccgcggtgaggcgcatgtcgccgaggaggcgctcgaggcagggggcgtcctccacggtgagctcctcgaggttcttgtactgccacacgccgagcagcacgaggctgcggcaagagcggacgcggatgctgcgggggccctcgacgtgcttgagcatgacggtgcgcagcgcggggcagccggagaggacgctctggagggcggcctcggagaggtgggtgctcgacagcgtgagctccgtgaggcgggccgcggaggccccccggtcggagacgcggcactcgccgagggcgagggactcgagggtggcgcagccgaggagcgggtcggcgagcgcgaggtggcaccactcgggcgcgcagaggagggcgacctccctggcgcgcttcgcggcgagctcgcggaaccaggcctccgccgcggcgacgcggccgcggaaggaggtgcgggagaggcggaagagcgcgacggggcccgggtgggaggcgagcacgcgggtgacggcgtcggcgcgcgcggtccacggcgcgatcggggacgaggaggcggtggttctggttcctcctcccagtcccagggcggcgagggcggggaggtcgaggtcgtctaggcggagcggggtggcggcccacacgccgcggaagcgggtggagagggcggcggtgcgggccgcctcggcggtgccgaggagggagaagatcacggagaggagggcgtccgggagctcgctgatgtagtcctcgccgcctccgtccgctgctgccatctcgccggcgtccggggccccgcggcgcgcgctcctggctgggggtttggagaggatttgcaggttcagtcgaaagagcagtgctgatttgtgcgtcgtggctcttggctctcttgatttttcacaatttgatctttttgaaaaacttattttgcaaatagaaatcacaatttgatctttttaaaaaacttattttgcaaatagacccataaaaaacttatcacaaaaagagtcaattttttaggtgctagagtcattggcgccgtcctcctgccaccgtggcgggtcggcgctaaggtggcagggggagcacgctaatataattggtgccgcctaaaaaggactattttcggaataagttttttcaaaggtctatttgtgaaatgagtttttcaaaagaaccaaattgtgaaaaatccagcttggctcttgcccatggcccatggacagtgttgatttctttcagctgcaaatctgcagtaacatatattttttttgggtaaaaattgctacagaacactcaaaatttgtatgatttgctggtagacataataaaaacatgtcatggttgaaatatacttaaaaaaactagtaatttgctggaaaacactttcggttcatttggagagaaattctttaaaaagactggaatgccccttagggtcaaaagcttttgagcggagactgtagcaaaatgaaatatagtgtgtactagtgatgtatttgagtgatgtatttgaggtgatggcaaatttaaacttgcataatttctaaatttttactctaacatcatgtttaaagcatttggtcagggcatctcatctttcttaagaatttatcaatccaattgaatcgaaagtatcctctatcaaattaccattttctaggatgtctttttgccgtgacacgtttttttacgtctatcaataaattgcaaaaattttggatgtcctatagcaaaagttgcctatttttttactactttcgtcccaaatataaggagttttagagtttgacacggttactaaaaaaaatatgtagattaaatagtggaatattgtgattggttgagaagtggagctaggtgaggaaattaaatggtaaagggttgtgatttttttttttttttgaaatttggtgaagggttgtgattggttgagaaagaaaatgttgatcgagaaaaattgttatattttaggataaattttaattggctaaaaattgttttattttaggatggagggagtacttttttactccagtttttttggcaggaaaactaagagcggttagtcgaaagtaatttgaaaagatttggatcaatacgctatattgggctgtatttggaagtaaggtgaggccgggttaggctttggttgagtaacaaattcggccgtacttctccttggcccattaaacaaaaacgaatgtttaagaaaagatgcatataaaatgcagcgaatgttggaatgtgcaacaatatgaaattcctccaaaagactatgcaacgatataggagtatctcgcaaggagatcgaaagcgcgaaaaagtagcacaagcgcgaatatcaattttcatcattgactaatcaaacacagccaaaattttaaattttaaagcataattctatatttctatagttcgttttgaaggttttttttttcattcattcttctgcggcccatttaaatggtttttctgctctgattgcatgcattgtcttatctcaagaaatatgcagtaacagactaaagagaagcttattgagcactaaatacaaggagaaaaacatttctgtcgaacagattattcataaacatacaaatgccaaccgatatcgttatgtacaaaactacagcgaatgcgcaacataggatgggtttggtatagctctgaaaaaagccgttcaccctggtctatttccttcacgagtcactcgaaaacaggagctcatcagtaggcttttctacctcatcttcctggcattggcgatgaaacacaagcccctcaaatcacatcgtcagggcagcctttcttttcacctttcacttgagttgtattccggcgtcattaccaccaactcccttgagttgttcccccaatgatcagagctgatcattagtcct

SEQ ID NO: 20657 - DNA, 2368 bp, Oryza sativa
taaatatttgcttgagaaaacacatacggtcgattgtgaacctacaaatgattacctaaggaatgaacaaatgggtaaatacagagaactcattaaattggtcaaacctaaggtttcaagctctaatgtaagttagcaaattaccacacattaaatttttttcagcaatatttcgtgtcaaatagacgttgggtgctagtgaagcaataaatcattgtaccaacagaagacaaccaatatgatgaaacaaagtcaattattcaattctttttaggtacgaaattaacagatagtaccttatccatcaaccagaatgcaatagtcttgtcaccaactagtgcttggtcatgactttctgcataagtaacacacttctctgaccaccttctattcgttagggtgtgcacgatatcacccattttccaatattcgtcactttgcctgcattaaagaaagttggaatttcatgacaacatatttggaagttggaacctacccagaacatacattaatactagctctcagtaactcataaaaaatatgattaaaaagtgtaaaagcagctcttcaaagggcatagcagcagtaccaagatggagcactagaccagtaacatggcactataaaaaggagagcataactcaatgatatccagtaagttagttgaatgtctcaattttcagatgtacaatcaccgaagttccagcacttacttgaggagttcgatccatttgtccggtacagccatatgcaaacgatagtcaaaaccaacaccaccatcttgaacaggaatacaaaatgtgggcatcccgctgacctgaacagaaagcagggatgtaagttcaaccatgttgctctcacaaatagtttatagcataattaaatatatatttggtatcatatgctagccccattttgcattgtgcaacttaaataaatcaaattacattttctcatttaatgaagaatagaaaagaatgctgttgagaaactataaccatcaaggaacatgcctgttagttcttccaatgcccttaaactttatcaattggggacaaatatattatattttatatctggttgggaatagatactaaccgctttcacccaactaaaactaattaattggtttgtgtgaagtatcaatatgacagaaaagcagataccataagcacttacatcttcaccaatggctacagcctcaggataaagcccatgaattagatcgttcaccagcatcaagtaaactactgcatcaacatcagtagcaaatccaaaatattcgccatagttgccagtaaatgccacctataacaaaacttgacaattttagaaaaaacagtagcaattcccatcaggggcaaacaatactagaatgaaatccaagtatcagcagcaggagtcataataaatccattcaaacatagcaatggtttctgcaaaaggacattaaggcatgcccaaaacagaaatggcagcactctgaaatgcaatttaccagaaacacttgataacttacctgtaaaccatgatgagtatacatcatggaggtcaccccatcaaatcgaaacccatcaaacttgtattcttcaagccaccaccttgcattcgacagtaaatatcttaaaacctgcaagaggacataatgtatgcattggtaaggacagagtaacggcaatagtgaaccaatctatggtgacaatagtcaactgttacatacttcccaactcccatagttgaacaggcgagaatcccacatccagtgatgaccccgtggtccaccatggaagtaatgtgtatcagtaccatcaaaaccattcaaaccatccagggtattgtttgatgcatgactgcaggatacaaccaaaaagaaagaaagaaatggtaaaactatccaactaaaaaggatcaactaaatcaagtggatggaaaagaagtaaaaaaaattatctggtctataaacacatgaataaaggggttaagtccaagtacaataggttccgaactcttcagtcaagatattgacatgtatatacatggaactctttatggaataaacagtgtcatgggtggacgccagtaatctaaaatactagatttacacagacaaacaaatcaacatttcactaattacctgtgaacaatatccataagtacaagcaaaccaagctcgtgagctttatcaatcagagatttcaagtcttctggggttccgaaacggctacttggcgcaaagaagttagtaacatgatacctgtaaaaagaatataacaaagatcaaaccaggtcagaaacagaaagaatagttgcactattggtgtccacacaaagaaatttgttcagaaatttctgcatgttcagaacacta

SEQ ID NO: 20658 - DNA, 2912 bp, Oryza sativa
taaacctgctacataaatagaaagaactagattgcattctacaaagcgaaaaaggtttcaagacaaaaaagaaaagtcaaaatattaataacttattggcataccgggctactcattccaatatgtgattcatatatccgcagcgaatttggtcgtttaggttgaggatgttggaatacatatttttcctgcagttgcgtataaacaacattaggagatggaaaataaaggttaaaatggaatatcctgatcaacaaagaaaaaaagtagtattacacagttctataaggttttagtgacacgagcatagatttttttaaaaaaaatgcaatggaaaaatatttcgtttaaagactgtaaggtagaaacatacttcttcaggtggatcataatatataccgttgtacggtatttcacctggagcctgcacagcaaacttaatccaggcaggaattgaatcctttacgccagatggtgtatccatccgaatctggaaattaagaaggtgaaagaagatctctcagtaagctcattttgaaaatgattaaaccctcaactaagtaaatagccaatcagaaaacttacctttacacgtgagccatgaggaatagcaggggatccatcagcattgttaggcagggaaatctcccaaacaccatactcattctgaaagtgatcatgccatatatcaacactaataagagaaaaaacgttgctggcacatgtaaataggctcgtatgctgcgaaatacacccttctcatgtcatataataaaccagtgtggatggaagtgtacaaaattcaaggcgatgtttggaaaatgggtttgggatatgatttcccacccccaaagggtaagttttgatcttagccatccattcatttcacccatttcatcctatccctccattcatttccatttcccaatcccacctctcctaacccattttccaaacacaccccaaaaggctatattaaccattaggatgcaaaattgcatgcatgtgtttactgtttaccctaaacatgaattctgctattttggactcaaagaagatgatagttagtaaagtaaggaacagtgctctgttttcactgactttgagacaatatagagtagcagcattttagaatgacacacgtgaggttcaactttaaggaatataaacagaaataatgaacccagataattgaaaatatattaatgatacaatacaaagatggaaaataaaaaggttgaagacgtactctggtcatagtatctgcatttgggttccaattgttgaagtcacctactaatgctgcagactgcaataggatgaaaatgtcatttttaattcttaatgtgatgactgtttgaaaagaagttcatcaatatatcatttgtgctactggtataattccagtacactggatagggagtagtgaccactgccaaatcacgtacctgtgctccaggtgcccattctcggtaggtaatgccttcagcgctggaaaggacggaataatgatattgagtttgatcatttgatatccaagtagaatattgtaggcatttctgtagtaatgcgactttaattttacctgcgggtgaatccaagcttttcgtaaccacgagaaaatgcatccaagccaccttcatgttggtcaatagctgcacgcattctcttgtattcactgtatctgttcataccaccatgcataccaaaaaagatatactgaagttaacagagtaggtttcccaacaaaagcgccagatatcagaaattaatttgctgagttgacagagaagtgaggggattaaactatgcagactacttgccacatcctttttggtatctctagtgatcagtgccaatgatttgtattgcatttgtgagatatcacctctattttcaaatattataccaaccttaatcaaaatgaaaaaaagtaaataactaaccggtagtcaagatggttccgaaatccttccagcattgggtcaatttggtatatcttctgcccatctcctggtggtgggataactcgtggtttatcctccacagttggttcatcagcatctttgatcacaccctcagtcacattttcctcaatgtcttgaatcacttctgaagattcaagtttgtcttcagccacaacctttatgcttgcttctgccactgctggaatctcttcctcctcctcaaaaggttttactttattatcatcaggtatctacacagaacatagatggatagactctgcatgagacacccaaaaagaaaaaaaggtacattcttttgtggcaaagttgctagttggaagacccaacttggttttcagtagcccaacagccagcacaaggtcacaatgcacaaaacacatgaaacctggcattgccactacatcatttcatcacacatttggtcagtgaatgacaacagctcgaattttattcccggcattacctgagattcttcaggttgctcttgagtttccacgtctggttccgcagaggacagcaagtcgtcgctcccaccgccaggcaccagcaccttcccaggagcacccgcgcagctcacaacgccacctgcaaatgcaaagccgactctactagtcaggcaacgccataccacccccacttgcaagttgcaacaataaataagagatcatctgcatcagcctcaaaacgaaacataaaaaggaattagagaatgatcacagcgatttgtaacactaactcatcttatccggcaagaaaaaaataaactctggttctcagaattcagaaacagtgatcgcttcggtgcacccaagtacccaacaaagtgcacacacacatcacatacggatcgagagataacagtaaaatgggaggaataacgcatgcccgcgaggctgtgagctgcaatcgatcaggagaccttct

SEQ ID NO: 20659 - DNA, 9657 bp, Oryza sativa
aatagataagcacagaggatcctaatccaatgaaagtctagttgactaaactcaaatatagattatacgaaactataaacactaatcaacaaaacaactcttggtacttcctatgctcctgatgattggccaattgctgttgcctttctaaaagactacaacaccaagcgtgctcaagcagtcaagctaagtggtgtactagtgcgcgaccagtgccaccatatgtgtgatgtgccgcacatggccacgcaccgaacaacctagagtcatggaggcgggcagccagcctcgtagcatgccttcatgtgcttggcgatcccagcctgtgaaagacgcttgctagtgctcctagctgcccaaataaagtgctgatttgcctgctacgcagcacagcagagaagccgttccactgttgcaggccgaggagcctgggcgcccagggtggttgggccctagatccacccctgtatgacaaggtaacgccacaactcacaactagcatggataactgctaactctcaggagctgttgtcaacgaatccactgtctttttgtttttacctagaccttgattttagtggcgtttcctactttcctcctgttcctgtacaatagtcgcctcagttgcaatttgtaaataagctaaaccataaaaaatatcaatatcaagataaactaatgaggtttctataggggggttaggacataagaacaagcccattttggccctcgaacattgctcgaattccagttctcaacctaaaactcaacagccacatatttttcacactgaacatccaactccaataccctagaacctattctgtgaaatgttggccaaaatggtgatctttttcgcaaacgtgcaggtttggctaacatggacccatctaagtggcatctaccccgaaatttggctagtgggagtccatgtcagcaaaaccaacttgaaaaatggttcaggaagttatttctttgggtttggaagttggggatgcaaaacagcaggtttttgaagtttggtgaaaattggactcacaacagagttcaagaaccaacaatagatttttccttatgcctatggaatttcaaaatggtatgacaaaatacaatgaaaccagcgaaacgcacactgataactgtttactaggaatactcaatagcccactgcctgtaatttttaacagaatgtcatttaaaacgtgagagcaactttaataaatctgactgcatattaggttatttttctataaattcaccaaggctatgtcaaaagtcaaaacaaattaactggtttaaacactttatgttaagatgagatagcacaaatatggtccagtgcctctacttggttcataataactaaagattatcacactcagtaaaggatttaccattttattttatctcacctttcagggtacgtaatccttcagtaaacgaacttgttaaaaactttatttcttagaggggactaaaatgtcttgacatggcataagaccacagaggaaaaaatacggatattgattttctcagtttagaatagtgggaactgggaacagaccgttgctagaattaaactccaaccctaagttgggtcatttacagccaaaatcctactagcatgacacaatattgacccaacaaacaatgatgtaaagatctatttattgtatatagaaagcaccttgaatactgctcaattatcaaagtgtttatagatgcatttgtgagactagaatagcatctaaaatagatactaaagaccaaagtgttctgcaggatatgttgatctcttcgctatagtagagaacaatggcactttggtgcattgaatgatacatctttgaggtatgtgagaggggattgagtttgcagaaacatcaagttaggcaatgcgaaaacctaatagaagcataacttttatgttgtggtaccaagagtgtgcaatctgcaatgggatgaaatatttgctcacctttggtatgttccaaacgtcctgcctcccgcttagcattgcaacctttgatatctttgtatctttagttctcaaaattctaaactgttcattcaaatcaatcgacctctccaggccagcatgaaccgcaataagcttacaaataatctgtccttcgttagtatcaatgggtacattttcctgccatacaaccatgcaaatatctaagaaacaaactccctttgcacctctcattatactttgcaccataaaaggatagcatacctcctcatggatccaaaccaattcgcgcagaaattttttgtgctcctcaggtacagccttcacaagatctgaatgacaataaaactttgtaagcattggtggtttctattgaagggaatcagggatccctccctccctctctcaaaagctgtatttactggtaaaaacaatagtagcaaattagaagtagctttgtatagttgcagcgggagttgtactatgaaaccatgcttacaaaccctgcacgagaggcatcaattcgttgtttgctttcattaggtgggctaaatgacactaccttgaaaagttaccttcactgttggtgaactgctcgctagcttgctaaattttgttatgttgagactacaggtcatcgaagtactataaaataagtttggcgctaattctgttagtgtatacaaaattcacctgtctataaatgttatcatggtcttatacttttgtgctttgtaaacagtactaaagtactaattcctaagattgtaactagagaaatagacaattgtgcattgatttcatatttcctggcatttggatttcagaacttcttttaaggtttacgcattgtatagcattttaacattttgggaaagcaatcagaattttcaagtttgaagccaaacgataacaatctagagagttactagtggcttagtgccagtcacctatggtccgttatgttccattgcaaagcatgaatacagatgaataaatcttgtgcggtactcctgaacactgacctggggatccatgagcaacgccgtaggactcgaaggtagggcgcgcgtcgtagatggagcccatgtacgatgaccccctcttgggattcctcttctccttcatgatcccgccccatctcctcccctggcaatgcatcccctcgtggccggggccacggtaccacccctcgttctcctcgttctggatgtactccccccaggtggacgagaacggggtgccgtcgggcggcggcggcagcgccccgacgaaggcggcgaaggcgaggtcgtggttgccgcagaggaaggcgtggcgctgcgcggggtggcgggacgggagcgcgaggaggaagtcgatgacctcgcgggtgctgggcccgcggtcgcagtagtcgccgaggaagacgacgagcgcggtggcgaaggcgtcgggcgggagcgcggactggaggttcgcccacaggctctccagcttggagatgtagccgtggacgtctcccacgcagatcaccacgcggggaggcggcggcggtggcggaggagacatctcgccgccggcgtcgtttcctgtttcccacaggttgctgataacacaccacagaaagagaggaaaagtagaattccaatttccaagtagcccagggaaacaaacgcaccgtccgatgatggtgacaacacgatcctgaccgtccatcctgatgccaactcccctcttcggctcctccaatcctctccagtgcggccggtgcctttctacagcggcgttccactcgggttggtctctcccccgaggcacggccgccgccgccgccgcgctcggtctaatcggaatctatttctcgacgcgactccgcttccccggctcccctctcacccttccgcgccgccgccgccgccgcttgtagtggttggggggcgagcggccgctcgagagcgaagcgatgctggagaaagacaggatagcctacttctacgatggtacgaccgcgcattcgctaagcccccctcatctcctctccattctccctaatcactggagcaaccctagctctagctctagatgatagagcgaaatcctacgccgtctcgatgttgtgtggcttaatttcgtcgaagaaggggcatgcaattagtacctaagctgatttctagtggtgttatatgattgtggaggttggagtggatgttacggttggacggcttatgagaaattccagaactatgaacttcccaggacttgttcaactaggatttgtggtatttcagttgccctagccctaggtgcatgacgcatgattcattatcagtcagtaacataaggtggggaagcaacccttgaatcaagatttgaattagaatcgttgatccctttatctgtttaagagggcgcagtcaggctagatttggttaacaagttcctatattctttagcgccagccattttctaaaaggtcaccaacgccagccatatgtggttatttcttagatcacacataaatttccatgataagttctctcacatattttgtactaggtggtttcatgacttgtgccctcattcacccatggtcctttacatctctgtttatagagagccactcattttgcagatgtgaaaggaagttttcattgttcaaaatgtgtaatttttattactcattttgttttgatcgtttacctttttactgtgtcaatgaacaattcaggcgatgtgggcaatgtctactttgggccaaatcacccgatgaaaccacatcgactttgtatgacacatcatcttgtgctttcatatgatcttcacaagaagatggagatatatgtcagtatgaactttatttattcccttcgtttgcacttgttaactgcctaaagttcctttcacctcttacttttcacacaacgatttatgcagaggccccacaaagcatatccaacagagctcgcacagttccattctgctgattatgtggaattcttgcatcggataactcctgacacccaacacctgtatgaaaatgaattacgtagatgtatgaattatgaaacttttctcctctatgaactagtactctgggatttgttaattttacaataaaatggttgtcacatatcttgctactcatgtttaaattattataaatttatttattaagttccttacctggatctaataagtagcttagatcttcatgtacagttaaactataaggaatctcatacacaacttaaggctaattagcttcacttacatgaatgctgtcaggtgtatattcacgatatgcctatttgacaattcaaggaaaatgagggcatgtttggtcccctttcaagctcaagcaacttcccatctaacgctgcctagatagcgttggtgtttagtacagcttagcaagtcattcttcataggatgtatatccttgcccattgaagcgcatcccttgtggtcaaggtttacatgatttggtgcactaaatagttttggatatctttacagtatttatatagtattagttgcactcttctaggacacatgtgcttattttacagtttcagggcaaaataactgaacacctaacctaagtagcagagtaatctggacaaaagatccaacttacccactcttagagcttttccccaattgaagttggtttccaacataatcctcatgccttttggagctttctaacttcatttatctggttccttcatatttgttcccagacaatcttggagaagactgcccagtctttgataatctgtttgagttttgccaaatatatgctggaggaactctaggtaatatgaaaattctgaatgcttctttctaaagtgaactcttaagttcttctttgctattttagatgcggctcgcagattgaatcataaaacatgtgatattgctatcaattgggctggtggattgcatcatgcaaagaagtgcgaggcatcagggttctgctacattaatgatctggttttgggaattctggagcttctcaagtaccatgccagggttctctatattgatatcgatgttcatcacggggatggagttgaagaagccttttatttcactgacaggttcatgctgtttccaataaagtcatggatatgtagttaatcatttattgctgccaatatttttccaatccaatttccatctctgtgcattttgtgaattttggtggtaccataatatttatactaattccagtctcgggcttttgattttgcagggtatactaatattgtatacttattttgattttgcagggtaatgactgtaagtttccacaagtatggtgattttttcttccctggcacaggtgatattaaggtaatgttccactaacaagctcctgaatattttttatgtactttttggtatgatgtggttggtgattggcccttctctgcattctgttttatccttacccttttcgcatgaagtgtgtgtgacatgcgtactctcatttgtgtgaaaagagaagagacagattaaccaaagatggtccccagttgattttgtaatgcacaaaattgatagcacctgtaggtaattgtttatgagcagttaatcttgtttctttttagttctacccgccaagaggctgtaaatatgtaacatcatagagttgaactttggttttttttactggagattcttggcatgttattctatttaaatatcaaccattgtaattgggaattcaggtggttatgtatttgaaaaacgtcatactagaatgcatcataattcgtatacgcatgcttaattgtcatctgggctgacaaaaaaaaaacatgtgcacatatacgcccgtcatttgaatcttgtagtatgttaatttgttatgtatccactgtactactaggcaactttattaaataaaaatatcccaaataactggaaggtagagcaagtgtgctacaaaaagggcaaggttgaaaatgaacataaaacatgccatgttcttctcagtaacgatgatactttatatagcttcgttttaaatgattgtgctgcttcatattgatttacctgactctcatttgaaggatataggagaaagagaaggaaaatattatgccattaacattccacttaaagatgggatagatgactccggctttactcgcctttttaaaacagtaagcccactttacattactttctcatctttcatgtcattgtttagtcttatcaagttatgcatgtctattatgtaggttattgccaaagttgttgagacatatctgccaggtgctattgttcttcaatgcggggctgattccttggcacgggaccgtctggggtgcttcaatctgtccattgaaggttctgtacttcttaaatctgatgtgtacttgttgattcagcagaactgtgctctagatgtaaagttagtgaactgtgctgcatattcttggatgagctattagggttcaggcggtatcttcgagataatgtgaaaccttctctcaagtctcaattatttcttaccatagttttgagattgttattgcactaatagttctgacttattttgaaatttaaattttgtttctttgagctatacttagtgaatgatcttttaatacttgcatgtgtacttgcaaacaggccatgctgaatgtgtgaagtttgtcaagaaattcaatatccctctactggtaaggagaaaccgttactgcgtgtgatttctcttgttcctccttggatatcaatgtatttcccatcatgcaggtgactgggggtggtggatacacaaaagagaatgtagcacgctgttgggctgttgaaactggtgttcttctagatacggagctcccaaatggtattcttttcttttgcaattctgtacttctcggtccttttggcctgttgttttagaggacactactagtaatccctcaaatgcatgcaacagttcatgtattcttttcctcacatttgctggcatatcaagttgcaaacagatctatcaagaacgggattgactagtagagttccttaataatttctaaaacagcagtctgtgatatgagttttgcatgactttcctttgcagaaattccagacaatgaatacatcaaatactttgctccagattatacattgaaagtatcgaatgtgaacatggtatggaaccttttctcattggcctttgtttgtcctacggttgtttggtgcattgatatttgattgctattaggtgcatcaagtaactgtccttttattactgagtatggtctaagcatttgagctctgtagtccatttggtatttcggctattcaattggtttgtgtttgctagaagtttaaaacttgcgttcctttcttgagaatgtgcaaatgccatatcacatgttgtgttttaaccggagcaggacaacttgaatagcaagtcatatctaagttcaatcaaagtgcaagtcatggagagtttgcgggccatacaacatgcgcctggtgttcagatgcaagaggttagtttttgattcacttacacgaggaaacctcccaactggaatttgctatgtaaaaaaaagggatacaagcaggacactataatattcctttccttttgttgcctatctttttcttcgttcaacatatttctgaacaagaacaatattaacatttttgcaggttccaccagatttttatatcccagatattgatgaagatgagctggatcctgatgaacgtgtagatcgtaagtgaaatactcctgggatgcattaggatgctaatatgtctgggtgtctgctgttccaagaaaacgaacggcagacagttgttttttttagtatatgttgtgtgttccacattatgctagtcctttcttcgtgttgttttcagacctttgaactttatatcgtccttatacattaactgtgtaaaatgttgcgcagagcatacccaagacaagcagattcatcgcgatgacgagtactatgaaggtgacaacgacaatgatcatgaggacggggcccgttgaaaaaggttctttgtatgatgaaactggatagagaaagtctggtgctgttgcgcggtttaacagcgttaggtgggaaatactgtcaattgacttgttaggatctaacacctttgcctgcatatagtgcgtgtacgttcctactttttaatcagttacatatgctagttgcatgcagagattgcaaattcttagtcggtggtaatgattcatagtttttggctgcacacatttttcctatctttttttgtttaaacccggcgtatgtggttatcaggttggacctactctcaacgtccttaaaaagaaataaacttctataatttggatatactttgtgttagctttttctttaagatagagggagtcagctggtgcacacgttttcctaagagtgtttcgcactgctctgtcaacttgagccagatcgttctcgctatcaaattgggcctgatcggtaggttttgggccaacctgagctgaacgcagaggcgttcccgggcagtaacggctggcccacctgtcacgttcactcacgctacgtgcgcttcgagcgttcgacggtcacggggagtcggagtcgctgccaaccaaagcgggcgtcgttgcgttgcgtggcgtggcgtggcgtggaggcagggggaagcatcgcgcgcgcggcgtggacatgtgt

SEQ ID NO: 20660 - DNA, 11482 bp, Oryza sativa
gtcccagctcgctgccgggtccgcgccacgaccacgccgtgaagaggccaggcggcgaggcggcgggcgggaggagcgtcaacggcgccgctccggctccagctcccgctcccgcggaggcgccggcgaaggcgccgcagaggaggcagaggcgcgggcctcatgacgtggaggacgaggcgtgggggctgctccgggagtcggtggtgcgctactgcggcagccccgtgggcacgatcgccgcgtgcgaccccaacgacgccagcccgctcaactacgaccaggtgttcatccgggacttcgtgccctcgggcatcgccttcctgctcaagggggactacgagatcgtccgcaacttcatcctgcacaccctccagctccaggtgatcacccgccctttcgtgtctcaacactcgctcttagatttttggttgggtcccaaactgtcgaaagagaaggactaatcactaatgcttatgcaattgatggtgatgctcctaataattgtactgcatactagtagtactagtagtagtgaagagggatgatttgaaattgacaagtgagaagtaaagaagcaaatgtaattatacttgcaattatggccagcatagtgactgcagaaggactagccaacgaggaaccgcctaccaaaagaatcgcaacaattttatacatcgagttgcatagattgctatagacatgctttcatttgctgaagtcaccacccacttaacagtagtgtcaagaattgtgtttctaagcaccttcttgcttaaataagtcatgtgtttccaatatttaaatctggagatcttcttctcttaaatctgattgttaacatctgcagagctgggagaaaacgatggactgccacagtccaggtcaagggttgatgccagcaagtttcaaggtgcgtgttgttccacttgacggggacgatgatgtaactgaggaagtcctggatcctgatttcggggaggctgcaataggacgtgtggcaccagttgattctggtgggtatagatgacgttccttatctcctattttgcgcacagcataaagatgtggcactttaacaatggttttcaggtttatggtggatcatattgctgagagcatacggaaaatgttcaggcgatctgtcggttcaggagagaattgatgtccagactggaataaagatgatcttgaagctctgcttagctgatggcttcgacatgtttcccaccttgcttgttactgatggctcatgcatgatagatcgtcgaatgggaatccatggacacccattggaaattcaggtagcatgaaaatttaacagagtgaaatatcataagttcatatagcaaagcaaacttatatgatcggagttaggcagtaaatgcattttgaattatggtatttattacatgctggacttgcaacaattacagttctgctctataacagcacatataggactacagtgtgcaaatgtcattcgggaaatggggcattatacgtttgctactaatttatacatgatgttcatatttcctttcttttgtaggcacttttctattcagctctcttgtgtgcacgtgagatgcttaccccagaagatggatcagctgacttgattcgtgccctaaatagcaggcttattgcactctcttttcatatcagagagtattattggcttgacaagagaaagctaaatgagatatatcgatacaaaacagaggagtattcttatgacgctgtcaacaagtttaacatatatccagatcagattcctccctggctggttgaatggatccctcctaaagggggttacttcattggatacatgcagccagctcatatggataatcggatgttttatcttgggaacttgtggtcaatagtaagtagtttggcaacatcccaccagtgtgatgctattttggatctggttgaagccaaatggtctgatttagtggcggatatgccaatgaagatatgctatcctgctcttgaggatcaggagtggaaattcattacagggagcgaccctaaaaatacgtgagccctatgattatcatgtaacccgtgtaatttagactgtttggatttcatcttatttgttttttttctctttcaatgcagggcttggtcttaccataatggaggttcctggccaacactattgtggcaggtacttgtgtttcattgctgataagtgttcatttgtccagtttagtgccatgaaaaatgaaaccttgtccatgttttgtttgaatattggaaccagttttttcctcctgtttaaagtttccaatcaacccctcatttgcagctcacagtagcatgtatcaaggtggaccggtcagagattgcagcaaaagctgtggaggttgctgagcgacgtattgccaatgataaatggcctgaatactacgataccaaacgtgcacgattcatcgggaagcagtctcggctttttcagacatggaccattgccggttttctcgtggccaagcagctgttagaaaaccctgataaatcgagaatactgtggaacaacgaggatgaggaaattctcaacgctatgaatcgcatgactgatgcatccaatctgaagaggcggcgtggcaggaaaggactcaagaagacttatattgtgtaagtccagaaatagtttcggcctatcgtcatatgtgtagaatatgttataggaatgatgagttcttgttgtacataagtacatttttgaagatggaaacctaatctcacatttttgtcatttcatggccccagtttagtcactgtctcactgatctagctagctctgggtcgtgtggtaagtagtactaactgaagtactcaacctatttctggaggcttcttgatgatcacatcaacatggtgatttactgcagtaatgaattcatcataatattcacaacgcaacacagctataagcaacagaacagagtgccttacggtcatcaacgaaagcacacaatggtgtacattccgtcggcaacggaggcctatattgtgcggtcactactagtcagtactcagtactcagtagcaataaacagaaaatgcacacacatagctgttgaatccgtgctgcccaactttatggtattggcaaggaataaagttacgcaagttattacccgccttcactcgggctggtagtacttcccagacttaacaagtgacagccaattccagatgccactgaggcaatatgcaaatgcaatacaacatgttctacttctatcattgcactcgtacaagatgactgccgaagccgtgctaatctggtattttgatggtattaacaaggaataaagtagtagcaggtttaacagccgaacatacttcacttccccaacattggcaggtgacccaagattttactcatttccaacagaaagctgcagggaagtgaaactacctctagctacatgctatggatgttcttccgaatacaaagtaatattattaccaccactagaagagctcaaactcaatgtcgtctccattcagcctgaactccaggcacttgccttccttcttcttccgtgccgtcgtgaggcttgccgcgtcgaagcttttcggagtctcaggcggtgcagtccatcggatcaatgcccagttcaggccttcgaagaagggatgccgcttgatctcagcagctcctttcgttgagcctagccggtactccggatccttcacaagcaaccctctgatcaaatcccgggcatggaagctgacagcagggttatcagggaacttcagcccctgcgagaccacatttgtcagtgtctcctcattgccgggtcccctgaacggtgtcctgccatagagtaattcatagagaaagatgccaagagtccaccagtcgaccgagctaccatggccatctcctctgataatctctggtgcaagatattcatgggtaccgacgaacgaatttgaccttgcatcagttggctcaacaacaagctgtggcagtgatggtttcttctgaggctcacccctcggccgccgtggcctggaaggggtagaggaaactagccgaggcgtgaagcaagaagaattggcccatgacggttggatacagagtggatcaatgcagctttccgcacaagggccagaaggtctactaggttcatctcttcctactgatgaggcccttacaagcattggatttactgagcacctcagggacagatcgaaatcagagagcataatgtgcccatcttcacgaacaagtatgttttctggtttcagatcgcgatatatgacccccaacatatgtagatattccaatgctaggagaacttcagcaacataaaacctgcaaaataaaaaggtaattctccctgtgagttacatcgctcaaagaacatacaccaattgatcagttaaaaacatcaatcagatggcagcaagcaagactgtatcagtgtctgttaaatgagactatagctcggttagtgtgaagcagccacatggcaatctcatgtatgttaggacatcaaatgaaaacacgattaatagaacttaagttccatacctagcagcagcttctgaaaaggtcctggtaggctgtttctgtcgtagaacatgcaggtcaccgccagggcaatactccatgactaggcaagacagattatcggtcgtgaaaaaagaatacagagttggaagaaatgggtggtcgagcatttgcaggatctccctctcagtttgtgctcgaagcatcttctttctacttatcaggtactcgatatccataactttcaatgcgaacatgcattcagaacccaccaattcagctagataaacagtcccaatatctccacaaccaagttgtttgagaagcttgaagttcttcagtcccaggctcccttgttggattgccatgcgcctaatggccccccatctcacatcttttgacatgtgaggcctgcagccattgccactgaaactaccataactatcatcgcttatgcttgtgctggtgctataatcacccatgctgctctttgagctttgggagcattcacccttttccttcgatcttgacaactcactgggctttgaaccatggatctcaccaacaccacatcctttggtgccacaattagctccatcagtgctgatagagctagccgcagccttcttgttgattggtgttggagttctgggttcatcctgtagggcctcgtgcttcttattagcttgagaattggaactttttgcctcacaagtcttgtgagataccactgcagcagctggttctggtttgaccttcttcttggtggaggttttactccggaacaccaggcgtgaaccgcccacaggaactgcacgggggctagatgttttcattttgccctttctctgtttagccaccgcaggacctgcaggcaaatcttcacttgcctcagatgacttattactgatcacatcttggattctggttttctggacctttgttgtggttggagatgctgaacgcacatttttcttagctgggcttttgttccgtaccttgttcttggcttccgttgacttcaccgatgaacttattacatccttctcaggcaaaacggacacttttccaaacttattcttttcatcccgctccttgttggtttgaaccacaacagatgtataaagcttcttaattgccccagcttctggggtatttgacaccgccgtcggcttcggcatcctcttcatggcggccatctccgacgcctgcgagatgcacatcttcctcagggcctgtttcaggctcacagactcaacaatctccgagctcgatatcggcgacttcccgagcgcgataagcctcctatccgtgctcgtctgcccagaagcccgtgcggatgtgcgcacattaatcgatctaatgagcctatcgagatcatcctcgacggagcacgaccgcgctccatgctcctgacccaccggcttcactctcaccctcaggtgggtgacaccaccaggacgggcatccttcgactcatccaccaattcgactatctctgagcaacctgaagaacccatctttctcaaaagccctctgctgcctccggagctgcgcctagtagagcattaactcatgcggcctcacaactaacaaccgcatctggggaggccatccaaccgctgacgcagctcaggttaggaccagtggttgcctgcagttcggtgaccaaagaggcagctttcctggatcaagaagcggcatcacggggccctgcaagaaaatcaagcacaaactggatcagatagagcaaaaaacccatctttgctcagggaaaaaaaacttagcaatatacaacaaggagtaagattaacactaacgagaatggagaaaaagcagcaaccaaatcaagtgaatctgcagcttgaaccagagccaatctcggtgccctcctcctcaaaatctccccccacagctctccttttccccacccaagagtagaaatttgaaaaacacaaaagaaagaaagcaaaaggaacacagatgcggtaggtgaggtggggttttgctctatccccagcaaaatgatgcgagatccgttaacccctggaggcaaaagcaagaagaggacacaagcagctcagccaaaaccaccccaaaacttagggccagccaaaaacaccagcatacaaaaaagaaggggaaaatgaagaaaaagaacaaagatttgtgcctattagatgcggggttttgccctggagaaacttaccggcaggagaaccgcggtggcggcggcgacgggactagggtttagctggagcgccgccgacgagtaggacaaggaggcggagctggagagagagaagggaagaaatgttgggttttcctttggagaagagttgaaacggagagagctcagcttcagcagcagcaatgcgcgcacatcacgaggagcaaagaggaagacgaaatgagagcggctgcctctgcctctcccctcactcactcacgcctacacctatgccctacaaacttctgtcacacacacacacacaaacctatccttgctctaccattctctctctaccacggtgaccaccgcaaaccgataaaggccccaccgggggcaccaccacccctcccaaggattttacgcttctttatttattgggtcacatttattaatatctgtagccacgtatcgcgtgctgctactgctgtgcccctcctctcccctttcacgtctctctcctcgcccttttcatgtctctttctctctctccagactaccgagcttttctctctctcttttttttttctttttatcttgttttgtcacccacaaccctgatgaagaaaagggcaaaaagaaacgaacggaacggaacggcacggcccgtagataaaacaattcatctacgaggagatagtaggagtagagtggtagaggctgctgtgtctggctatgctccgcctgcggacaccggacagaaagggcatcaaagaattcacggttccccgtactacgatttcgatttcgatttcgatttcgccctaacctcagcgcgcgcgtggcccgcagcgtcagcggcgcattatcctgccgcggcaacatggctggagtaatcaccggggcgctgcgcgtaacgtgatgagtggttttggccaagctcatcactgcggccgcgcaggcggacgggaggcgcagcggtgaccggtggtggtaccgtggtaggcggatgggtgaacgtgagacggtcagctactgaggtgggctcgtgatatcgtcgagccgtgcggtgcgtgacgcgcgcggccggccgcagctggcgaggcggcccacgggccaccgcaccaccccaccaccacgtacaggtaccaccaccaccaccacagccgcacggtcacaggcgcctcgtgcgcgcgcattgctgtgcgcctccctcccccacaccgcctcctcccgcctcagctgcattcactcgtccggtcgttgctcgtgcaccatgcgtccacgcccatcgccggcctattcgcttctctcctcagctaagaactttcacggtacgtttatgtgccattcagcctcaagcggtcaggatgggaatggttaggatatggattgaacctaaaccgttttaagtgagttcgtttatccatggtttaatagggttgatccaccatgagtctattatatcaataggttatacatagatatccaaatggatcggttactcttattacatatgggtaaaactcggacccaaaatttttaaactcgcgttcacactataaaaacttatcgaattcagttgaattttggtgggataatttattgtacagagaagcaactttgtataaattttgagccctttatacaagtggggcccacgatgcattactaggacccaaaaattctagttatatgtgtaaaactcggacccaaaatttttaaactcgcgttcacactataaaaacttgtcgaattcagttgaattttggtggaataatttattgcacagagaagcaactttgtgtaaattttgagcccttcatacatgtggggcccataatgtgttgctaagacccaaaaattctagttacatgtaaaactcggatccaaaatttttaaacttgcgttcacactttaaaaacttgttaaatttagttgaattttgtaggaatgaattattatatagcgaagcaactttgtacaaatttttgaaacatttatacatgtgaagtcattttagatcgaaccccttgaaccttaggttctaatggtttgatccgtttgatccatttatatttttggagcaaccctacaaatccgttaggacaaattgatccgtttgatccatttatatttttggagcgaccctacaaatccgttatgacaaatttacggataggtttagtgcataaatggatcgaccctaaccattcccatccttactcaagcttataagtaggagattctcagccacgtcaatattttctgtgaccaaactaagaacgcgtgaccaaactaagacacatgttattcataaaaaattggcagcatcgttaaggcagcccacactcgtcgctagggaaaggagagagggaggaaagaaagctcggcttgtctcgacgactagggagggagaccgtcaacggggagggaaggagggagccaagaaaatcgtcgcccctgcttccacactgcaccgtcaccgggctcgttgctgaggaggggagctcaaggccaacgccggccatagtcatggacgaggtagatgagtcagcgctagacccgccccgtcgccccctttttgtacgccaccaagctcttgcagtgccgtaccctgccagtcggaggaggagaggtggtgccgtcgccaaaccggccgcggccgcctcacttcctccaccatggaaaatgcaaagaggaggagcaccgccgacctcgccatccctcgctcccgtgccgccaaccttgccactgcttttggggacaaggcgagggatggatctggtcgctcgtcaactgctcccgcgccaccgaccttgccactccacctaacgtcatcgccctcgacgcgtgggccgcttcgccggcgttgtcgccttgacctcgcctcgctttatccgccattggggagaggaagataggaaaaaggggagatgaaaagtgaaaaaaggtgatattagtgggacccactataagtgacttgctgtgaaacatgtagctaacattattctttgctcacatggcacgttaggttcggcaaaatgtggtggccaactgctaatgctctaatcctcgacaagggtccatgagttggtgcaactgcgtggcaacgtcagtacgcctccgccctagcaaggtgtcagggtgggctctgtctcattggtcctgatacaatacacacgaaactttttccgtcccaaaatgtgcatttttttaaggtagaggggtttatatttatgagtatatgacagagataaaaattaatgtaactatcagttttactactacattcatcccaaataaatttatttttcacccatcacacaccaatataaaacaaaaaaatagaatacctttcaattaaactggcccgcgcagattgtgcagctagcattattatattttctctcgtataatagtatatatgttttctcattatattattaaaatatattacaatgacaacataattttaaattttgcaataactttacgaaactattaatgtgtaatattcatattgtattttatatacatgttagttattaattatttttaatatcaaattttagttatttgtaaattatatatattcctatatggactctagactcgtcttttaatattttcttttttttaattctgaatttttattatttctaattgtatttctatgtggactctaaactcatctttcaatattctttaatttttaatttcaaatttcagttacttctaaattgtattcctatattaactataaactcttcttcccatgtttttattaatttcaaattttagttatttgtaaattgtatttttatacgtattctaaactctacttttaattttattatgtttattctgaattttagttagttttaaattcctatatggactctatactctacttctaatattccttatttttttaattccgaatttctattttttcttaattgtatttctgtatgaactctatactctacttctactattccttatttttaattccgaatttatattatttcctaattgtatttctttatagactctatattctacttttaatattccttatttttaattccgaaattcagttatttcctaattgtatttctatatggactctagtctcctcttctaatattccttatttttaattccgaatttcaactatttctaaattgtatttctatatggactctagtctcctcttgtaatattccttattttttaattccgaatttcagctatttataaattgtatttctatatggactctgcttttttctttttctccgattaatgtgagaatttctaggccatgagagcgaacgtggaggctcatttttctattcctttaataatataatagatgtctctcgacttttctagttccaatgaatttatcatctactttcatacttaactctaatgtaataattatttaaaaataaatgtattttaagataaatccgagacagtaaaaacgaactcattttaaaacgaataaaaacttgctctaaaccctttatataggaggcagctctccagtcacgcatagtacagccgacgcccgagtcccgaccaaccagtcaaccactgcctgtctgcttcgtcctgcatcttccttctttccctccagaaaatttgaaaacgaaggttgcctcattgcctgggcaccatcagacccaaatccttccgagctggatgcggctgctcactcagtctcagcagtcagcactcactcgcctcgcatgataaac

SEQ ID NO: 20661 - DNA, 7971 bp, Oryza sativa
tgtaagctttcagggaactgtttatttagatgtatgtagttattctctatttcgatgcaagtccaaatgagtaaactgcaagtcagatggatgccttttttttatctaaactaattaaaactatagcacgacggtgaaccaatcaaaatcgcttaacaacacttaacagcccaaatgagtaaagtgtgtgtcagatggataccttgttgatctcatcctaatgcaccatcaccatagaagcagatcgggagagctaatgaaaggaggaggtgggaaagaggcaccagcgtaggagtaggcgtcggcggggggtgggcggaggattcggtgtcagtagcgggtgggcggagtaggcgtcggtagcgggtgatggggagaacgatgatgcggcggtggtggacagtacgacgcgaccggcattgggagcggtggagaaggatctgacgacgatggcgtcaccggcgaagggaactcggcgacggtagccaccgtgcgtcattgggagcggtggagaaggatctgacgatggcgtcaccggcgaagggaactcggcgacggtagccaccgtgggatcgatggcaacgcggagagaggagatcggcaaggcaaaggacggtgcgacaggtgatggggaggaggaggacgcagcgacggtggtgggtggggagggcgatctaggaggaggtgcggctggtgtcgcggcggattgcgagcggaggcggggtgggagggggtggcggcgatgggtggtttttttctcgttgattgcggatcgtgatccgtaggaatcgcgcatggatcgtgacccgtaggaatcgcacgtgggtggtgtggaagtgtgtcgcttactcgttcttgaccgtgtcaatgtacgtttttatgttggatcgcacgtctacgttggcttcaccatcaccactacgaatttttaaagtagtagagattaatttgttttcttgagaaagtgttagttaaattggatttgactagtgtgaagaagatgcatgctacaagaagagaagataaaattagactttactagttccttaaactaatacatggttagcatgtatttatttaccagtaatgatggatttgaatacttgaatgttatagttagcacttaggttatattgttgtttaaccattagttgcaaaggacattatacatcctagttggggtgttgtttagttgtacaagtgaactaggaattgactaatattaggtactgtcattgatggagttgtcttctgcgtatgacgatttctaaggtcctaaattatggatatgtaaatgaatataggctagtgtaataaatgaaaatgtagcttcgttcgttgctataataaggactgtccttagctactcacgattttttaactgttaaagggtatgttttgtggaaaaaaatatgtagaagttctttttagagacagtcatactacatataatctattttttgtaaaatttataaattaatatttaattaatcacgtgctagtaaataattactaacaacttcagaaatcctctgatttcttctacaatagagcctcttgtaatttaactcatgctttggtgtgtgttgtaaatgaggcagaagaggagtatttataggcctggaggtgcactgggaatttggacatgctaaagcatccttagagcatattcattctcctcttgccaaatgtccagttgatgacgatttccaccggtagaaatggtcacaaccgtcataggatgaggataactgtcagctggtgaaattttgggctgtttgggctagctgctggctggcccatccagcccagccccactatgtgttcctctgaagtttgactcaaatgattgtatcttattgggtttgtgggctcaaaactccatgggcttagatatggaagttatattctcatccttcatatatatatttcatctcaactttggtggtttgtcttctacatgcaaatatacaccaacacttgtgaaaattgttaaaaataaatcctacccctatattggacgttttacatttatggttttatgcaattattgacggtgttaatttggtacttaacacaactgtgtgctgctgtttcggctcatctcagaattccaaacgaacgcatggcctatggtgtcccaagctccactgtttattaattagattaaaattagaaattggcgcgccggttggcgcactgtcaatgcgtggataaaaatcaaatatttaatacaacctcttcataatatttttatttttattttcttgtgtaacgtgtagcatatagtacttgaaaaaattagccaatgatatgagtaataatttgcagttttagcacttaagagtttaataaattgatttgtgattaatttatcatgtgcatataaaatattgactttatttgtaaattaatacaattggtcaaaataatctatttttcccattactataaggatgtgttcagcagcttaagattgaagctaatcacacatgcacataaaaaagagcaactcattagcgcatgataaattatgtgttagctatttttttctgaaaaagtactactatgattttttaaagcaactttcgtataaaattattttgtaaaagacgcatcgtttagcatatttggaaatgtacacgcggaaaagtattatcaatgccttataaaacatgaagacatttattttcccagtcctcgagatgtcttatagaaatatgaagtatgattcaggtgctaaaaagcataagaagagacaactataatacttttgaccaaaagtatgccatatttgtattagacatataaatttctcaatatttttagaatctcaatttgtatttcgttccgatgcctccaaaatcctgaacacagccttgatatcatttgacttgctagattttagaagagtgaatccactcagtaccactaagttttccccacttttacaatctaccactgactttgttaagttgaataatatgccattgtgttttcttgaatctctattgcgtgccatcaccatccatgagccgttagttggcacccgtttgataaattgaattttttcttaatgcctaaaatacccttagactaacataccctaggactgaaaaccctagccgtgaacctccaaatcaatctggcagtgtgaggcggcgctgactcccatcgatggaaggccggacgcccaactccccgacgcgccgccagccgccccagcccccgacgcgcggccgagcacccggctccccatcgacgcgggccgcaacgccgccgccacgggtcacattcgcgtccgcgttgctgtcgccgccgcaggcagctgcatccgcgccaccgccggtgtcgcaggtcgtgtccgcgtcgctctcgccgcgggccgcaaccgcgccgccatcacaggccgcgtccgtgtcgccggaaccacgccgccatcgcaagccgcatccgcgtcaccgccgccgcaggccgcaaccgtgccgccatcgcaggccgcgaccatgtcaccgccgccgcgaagggtttgagagagctctgcactgctagtgtctgattgtctgaatactatgcaaaacagttttggcattatcccatcaaacaatgtcgatagattactatacatttctccctggaaaaaaaaccatgtacagtgagttaggggcaaataggtctttttacagctctaacagatgtccaactaacggcttgtggacggcaatagcacacattagaggttcaagaaaacacaatagcatattatttaacttgacaaagtcagtggtagattgtagaagtggggaaaacttagtgatactgagtagattctctcattttataaacttattttaatatgtagaactgaataatgaaaatccggtttcagatacacaaataaacatgaaatgacttttgttttttaacaggtacgtcttccgttatataattatataattattttgattttctttttccaagttaaacatttttaagaatgatcgagtttgtagaaaaaatatagtaaaatttccaacacaaaacaaatgttttataaaaaaaatatattcaatgatacgttcaatgatacatgagtattgtagatgttgctaaaaaaatttatataaattatttaaacctaatatatagtttaaaaaaatcaaatcgactttaatatggaacggaggagtactccagtaataacggctttgcagtttgcacggagacggagacggcaacgggagatttaaagcggccgtcgaatccggaccggaaacggagacggcaacggcgttccccgcctccttaaacagttaaacctacccaaatccccaaattccgccgccgcctcctcctcctcctctcgccgccggcgagaaccacggcgaggtgaccaaccaaccccaacccccatcgcgccccccgccactgcctcttctccccccgcccgcccgggattccgtccatggaccggccgaggaggccggggagcgaccgccggtaccctccgctgcggttcaggaagcggaagaggagcagcagcgacagtagaagcagcaagctcaacaacaagccagggtctgataaggtataccctaccacctggaacgcgcccctccatgcttggtgtcgccgtcttgttcattggattttgggggtggggggttagtcccctttggtggttggggtttagttttaaaaaaaggattgctggaatcagaggtgctagatgctgaatcaaacctcgaattgcttcagtgaggatgaaatttggttcaagagaaattaatagtgtcggttcgtttacttgttctatggaaacaaaagtatatgttaatgtgcccatgtttcttccttcagtttttcttttcctttttcctctccaagtattataggtttaaggagtcaggcaaaggagctttcaattttatggcgcttcgtagttttgctcaccttagcaagggaagatactcctaagaataagaaaatagtgtgacccttgagagaattgctatcaacttttttctgtttctaaaatggcttgaagttttctaggataggggatagtttttgttttcttttacttttgtagattgtcatgccagggctgtttgtcacgagtttaagtattgtccatgtaattactctctatgagactatgaaatctttgttttcgttttttgtcctctgaccaattacaataacacatgccttcttaaactgatccatagaatttctttttgttatttattaaactcaacctttttatggttattttctgctggtctagtcaattccgctttgaacaattaagataatcagattaatctactattttgtgcagtgggaggatgtctgttcaatttgtgatgatggtggtgattttctttggtaagtgtgcttacaatcaagttcataacatgttgcaatttagcttgttgcataacttgttctcaatgaaaaacagtagtggttaatgttattgcttcttactattacttgccctttcttagctgtgagggcagatgtttgaggtctttccacgcaacagagaaacacattacagaaataaaccagtgcacaacccttgggctaactgaagaacaatggaagatctttaggcaaaatgatgaaaaggtatatcttatttgagttgccccattctttagaatgaacgctcttttatgtctaatattgacatttttttcttgtttttttgggtaattcagagtgaaccgctatatatatgcaagaactgtaagtataatcagcatcagtgtttctcgtgtggattgctgggttcttcagacttgtcatcaggggctgaggtatgacaacaaagccatttgattatttttcatgaaggctttacacttgattgaaatgacaatgtggtatctagtacaacaaacaaggaaaaataggaggagactcaatttttgctaataaagaatgtactagggtctaggatatgcattttctttcttctttttattttgctaggattaagatgccattttctcattgtcatatgctccaaatgtctgttcaacttctaatatatgtatgctatcatatgagcaagtccaattatttgctaacttttgcatgtctcagcaggtattccaatgtgaagatgaaaaatgtggacacttttaccatccgaagtgtctagctagactactctaccctgatagcagtatgcagcccttaaattttgaggaggaagttgcccgtggactgaaattcctttgtccggtgcataaatgccatgtatgcaagggaggagagaacaagaatgacatggaaaatcaatttgcagtatgcagacgctgtccaactgtataccacaggaagtgcttaccaaggtttgacttcacattggagagatgcctctgccatcttccaaacattctactgttgaaacatggttcttcttttcttttgctcacgctttgcacttgttttgcagtgacatagtctttgaagatgatgaaagtaatggtatcgtgcaaagggcgtgggatgacgtacttcgtgatcaaattttgatctactgcatgtgtgttaactatgctacttttgtcaatcatatgaactgctcctcttgcccacccaaaactaaatggattattctctttacaggaagcatgagattgatccagaactgggaactcccgcgaggaaccacattatctttcctgattgcaaaaaccttttaacacgtggtccttcgaagcccaaagggcaagaagacgcacccgcagtactagatatacctgaagaagacatgtcgcctgatcattcctccgaaccatcccagccgcctccacagccggcagctgaaactgatcaaactgaccaggatctttccaatggtttcaattcgtttgcgccgaaggccttgttcccacttccatatccaggctcctgtggttggcttgatgactgaccatccaacctcactcatctagataaatcctaacacatatatacgccagcagattggtgtaattcctgctagaacactttgttcggaaattgggaagttagaatgtgcaacgcaatctactctgttgaactgtcacgtgctaagccacttgtgtgtattgttatcattattatgttattattttaatggaagataacattgcggttgaccagtgtccagtagcctgcattatgtttctgatgtttttgtttccagagatgtccaagtgaagcaataagctggtgcatatctgtgctattatatttatgtatttcgacaggcaattttgtggctaaacttctctatatctgttgtgtattattgaatttaggtgccgaaaaggattaaaaaatgttcgaaaaaaatattttgtattgaacaggaaaaatctgtgtgttaccctttccttttgtcatactacctttctgctgcagctgattcattcattaacatatctcctagcttaagatgatttgtgcatgcgttttccactcaagggtatattggcagcatagcagactgttcataataaatatcggtgccgaatttttcttcaaatcatggccgttgacaccgttcctgcctgatccaggcatccagctgtgctcggtcaagctgaggaaactaccagggcttagtggctagcagcacagttaggctgcgttcgttccagttcccaatccctcttcctcgtttttcatgcgcacgctttttaatttgctaaataatgtttttttaaaaaaaaatatataggaaagttgcttaaaaaatcatattgatatatttttgaaaaaaatagcaaatacttaattaatcacatgctaattgaccgttctgttttccgtgcgcactgttcatgtctggaacacaagttaacgaacccagccttagtgagcttgccatcttaggtttgatttctcctttctataaaatatttagggagggacgtctctcccttcaaatctttttttttcttagcc

SEQ ID NO: 20662 - DNA, 6818 bp, Oryza sativa
attaagaaagaggttaaaagaatatatactatgcccttcattagtagggagataaaaagagaaggggagaaaacgaggaagaggaaggagtacttttggttcaatgactaaaaatgagaagaaaaagatgtagtgaaccactctaaaattatgccgaaaaagagagatatatttctactaaataaataaagctaacaacggtaattaaataactagttatacatataaatatgcaaagataaacagtttatccaatatgtatgttgttatttatttattgagaaaggtggtcaaattcttcaaaaaaaaaataaaatatatctcttccattccttccttttgttcattcttcaatgatcagtggctgtgtgtacggatcgaatccccttggcaaaaactagtataacattttagctgtcaggcaaagccagatcatcggcgctcttataccatccaaaattcatgagaattagccctcttcaacccattttaaaattacaaataagaatctgatctcttttaattatttgacaaaatgatagatgttgataactgataagcgcattcatgatgctcttatatccaggtcccagctactaggtacaggtagctggcaatgcaagtcagaaggatcaagaatccgtcaatgctgcctttgatcaaattaacaaaaatcacatgatgcaaagttgaatcttgtgcccgtggaacccgttacaaaataatcacggcctcgatcatgatctagctagagagagaactcatggagattggaaactctggtgattattctaatctgcaccttaatgctcactggaatctgaacaccaaccctctagacgactacttggaatcccaatgagcaaatcttattgacaactcaagtcaattacagggatggcctattgaataatgattaggaatgctaaagcaaaagtaattgcgacaccatggactaaaaatactgtcaagctgcagcacaaacaagaaaaaaatatagtttcttgaagaggtgtgtgtgtatactactttgtgtttttggatccaacgaaaccatcaattttttttctctgtgactgaattgggcacagacaataagcacactgttctaagtgatcagaagtgcacctgaaggaacagttttgctttagatttagcagctcaccgtgtgatctgatcttcgcagttccaagaacttttaatggtgtgtgatcgatattcacaaggaaaattaaggttcgctgaatctccaggcacgcaggcagagcaattagctagttgtgtaattgaaagaagaaaaaaagggagtgcaaaataaaatgcagctaaaatataagagaggtttatatatacatgcatgcatgcatgccataattaatgttttgtgagatatatcttttgttcaaatcagggtactgtcatatatttcttatacacgtaatctatacattgttgcaagttgcgacgttaagttttccccgcaaaaaaaaaaaagttttccaaaattccaagttggcaaatttaaatcaattatattattgcatctcccagctgattttatatgtgtgaaagaccactatatacctgcagcaactaaacatctctcgcacacattgatacctatactgattacaaactgagatatatcataatgacgtactactgttcatactatcaacgtactgatcttaattagatcaagtgctgacttaatcaacatgcctcacacgagtggtcatatatagatcacacacgcacaaccatatatacattcaacatatatataaacaattaaccacatatacacactactcctcaactgttgattttaaaacttcatgtaaaaaaaaaatctgataacaaattaaacctgcaggatcaatgaattaaccctagcagggttagactttggatgcacaattattttttaccgcgctgcaacttacatcagacgcaacatagacaatgcgtttgtgcagaacgtacagtgcccgaagatacgactaccccatacttaactgatcagtagctacaaatgctgacacagctaggttaattagcttaagttaattacatttttttaattaacaactaaaaaaattaataaatttaacccagctgataccgtacgtacacttgtggtcaatgatcacataaaataacaactaatttaactcaaacccctagcaattggtctcccctctccttcttaaccttctcacccaattaatggatggattctttgattccaccatcacccttctcccctactaaaccctccacccccatggatgctctcctctagctatagcttgttctaagctctagccgctgccgtcgtggcgtagagagagacattttggccgcagcgaaaatctgtttttctagtagttgcgccgcccccatggaggccaactaccccaagtatgtcctctatgggctcctcatcgtcggctcatggctgctctcctgcctcctccatttccaggtcttccacctctcgctcttcccctacccctcctacctgctgtcgcgccgcgtcgtcctcccgctggcgctcaacgccagattcctccctcctcggcccgatgttgccggcgacgacgatggcggcatcgtgaggaggcgctcgtcgtcgccggcgaaggctgcggcggaggcgtcgtgcgatgggcggtatgtgtatgtgctggaggtgccacggcggtttcagatgctcaccgagtgcgtcgaggggccgaaggtgttcgacgacccgtaccatgtctgtgtcgtcatgtccaactccggcctcggccccgtcatccctcccgccgccgccggcaacgccaccgtcgacggcgacatcattcccaacaccggatggtaaggaacgcgtcgtgtcagtcgcctcgccgtcgccgtcgccgtcgccggttggtgatcatcttggattccatggatgcaggtataacacggaccagtacgcgctggaggtgatcttccacaatcggatgcggcggtacgagtgcctcaccagcgacatggcggcggcgacggcggtgtacgtggcgttctacccggcgctggagctgaaccggcacaagtgcgggtcgagcgccacggagaggaacgagccgcccagggagttcctccggtggctgacgtcgcagccgtcgtgggcggcgctcggcgggcgcgaccacttcatggtcgccgcgcgcaccacgtggatgttccggcggggcggcgccggcgactccctcggctgcggcaacggcttcctctcccggccggagtccggcaacatgacggtgctcacctacgagtccaacatctgggagcgccgcgacttcgccgtgccgtacccgagctacttccacccgtcgtcggcgcgcgaggtgtcggcgtggcaggccacggcgcgcgccgcgcgccgcccatggctgttcgcgttcgccggcgcgcgccgcgccaacggcacgctcgccatccgcgaccacatcatcgacgagtgcaccgcctcgccgccggggcggtgcggcatgctcgactgcagccacggcctcgagggcagcatcacctgccgctcgccgcgccgcctcgtcgcgctcttcgcctccgcccgcttctgcctccagcctcccggcgactccttcatgcgccgctcctccatcgacaccgtcctcgccggctgcatcccggtgttcttccacgaggcctccacgttcaagaagcagtaccaatggcacgagcgcgacgccgacgccgacaacgacaacgccaccgttgatcgccggcgatactccgtagtcatcgaccccgatgatgtcgtcgaaggccgggtgcgcatcgaggaggtgttgaggaggttcagcgacgacgaggtggccgccatgagagaggaggtgatcaggatgatccctaggttcgtgtacaaggaccctagggtgagattcgagggcgacatgagggacgccttcgacatcaccttcgacgagatcatggcgaggatgaggaggatcaagaatggcgagatcttgggatggaagctagatggtgacgacgatgtggttgcaaaagattcatgacacaagtgaaatggagattttttttttgtgttaattagtagtgttcgttttgttaattgttgtgtttttttgttgatgttaaattgtcactgttgccgtgtatgttagtgacatataaatataaatataaatatatcagtgcgtatattggcggtatgatgagcgagagaaaattagaataaaaaaacaatcaactagattgctttcagtttgtatatatgtagattttattaattgtatcttgtcaagcggctgtgtgcccaatatatcctcaagctttgaagaagagaggctttcagttttacatattagtatagcttgaatgcaaattacttatatggtttggcattggtataaaataaatagccaaatttcctgcacaaactgctaggagctagatcgattaaagtgtatttgatatacaattcttcttctattcctattatttcaaaacaactttgtacatgtatatatatacactagaaaatgcccgtgcattgcaacgggtgaatgttattttaatcttattattgttatacggtttagtgaaggtgaaattcaatatgggaatttgctttgatatatatttttctagaaaatcatgagctgcaattaggagtccgatcatctcaaattagcatgcgagtttttaaagatatttcttatacgactcattttgtattccaaaaatgaacgaacttaaaacccgacttaaatatggatctatatttccaaaagcgaatggatttaaaaaccgactcatacacagatgacgtaccaaagtaccagcaaaaatatcttcaatttttataatggtagagaattgtcaatttacactatataataatctagaacaaccaaatgcacatgatcaacaataacatggatttttttttctctctctattaacatggaagtcttttagacttggagagcaaacacaacgacaaatagataaaggctcgcaaacacgacgataagataagcactcaaacatatatcgcggttatcaacctatgcaagacagctcaaattggtacaactaggttgagttcaacataatttgataaaatttgagtcattaccttgaattttgagcgtttatcatcaatttgacccagttcgatccgttcaaatttcataaaccctatagtagatactccacgtgatttagtcaagtaggcgagaacatttctcagttggatggattaaagccaacaaacagattcccttacaacctcaattatgattttacccaagtgatcgaagaccctagcattgtatgcaccaataagactaaaaatatactacctccatttgttttataaaaaagatgatgttgttgacttttaaagtaacttttgatctttcacattatttataaaattcatgaaaatatgcaagtataagtcattcttaaagtttatttaataataaaacatgtcacaataaaataaatataacatttatatatttttttttaatagaacgaatggttaaacatcatgtcaaaactcaatggcgtctattagaagaagaaaaaagagagtagtgataattattgatccaatgttttgggcaaaactagttcctagggtgtgtgacaagaaaggtgtgtgtaacagtgccaaacaaatggcatgcatgtgctggggagacttagtaataaatccaactcaatcaatgacttggagtcaaaaggaaaatagatttgagtattcagagtagtctgtatataagcagggccaagctattgtagtgaaagttgtggaacaagctaagggtgactatatctcatttcatttaatcatgaagctttacaaatgttaagtaatactgtactagtttctaacttgattcctttatgactccattaattggaggactgttatcaagtctgaggttacagaaggccaacgtgcaagatcaggcttacgtgctattaagaatgtcatgtcatcatgccaacaagacagatcagatcactcaacaaatgagtgacttaatttttttcttaatcaaaacatgacactgtttggtaggtgattcttgacgtgacgaatgggctcggcatgccaacctacaattgcatgacccatcaacaacttttcattgattttcattcacttccacatcgcacgctgaagtactgatgaacctagagcactcatatgatcatatcgtgtaggtcgctttattctaaagtgctactattattgcggctcacactttttaaattgataaacaatttttttaagcaatttcacggttcttgaggaggtaccaccttttctatagtaaatttggtacttcttgatgtctaagttgagataccaaattttacactaagtttttttaccttatggtatcttctcaaataccgtagaattgctttttttttataaaacctttcttagtcaatttttttgggccagaagttaaaccgtgaagtataaggaaaagcaaatcgatttctgaatgggccggcctgttatgtaattcatgggttgggccagaaggaataggtccattttgcctccctcatctcttgcgcttgtgtgaataacatccctcaaccgaaagacagggtataacgcctccttcatctctgaaaactagagcaaatcatttccctcagtggttttgctggcggttttgtccgacgtggcgttgttgacccgttgacaagctgactcagcgtggtgggacccacatgtgagtgtgtacctctctctctcccttatctct

SEQ ID NO: 20663 - DNA, 2663 bp, Oryza sativa
atcgccgcgccacccgccgggtgcactctcccgcatcaccgccgccgcacggctacctctctcagtcgcaacgcgccaccagccgcattgtgcccgacccacgtcgacgaactgcaccggggtgaagggaaaggccaggggagggagagataagggagagagagagctacacactaacatgtgggtcccaccacgctgagtcagcttgtcaactgggttaacaacgccacgtcggacgaaaccgccagcaaaaccaccgagggaggtgatttgctctagttttcagagatgaaggaggcgttatacccggttttccggttgagagatgttattcacggaagcgcaagagatgagggaggcaaaatggacttattccgggccaaaaagaccggttgtttggacagatcaggggcatttaagtgaggaacatacagaactactgggtgcagtaatccaaactcctgaagccaaataaatcagatggatcatatatatatacgagttaatttgtgaattgagagcatttgattaattcagtcagagaagccagccttgaattaattctttgagagagagatagaaggggcttatatgctgttggagaaattgaccgcgacgacgcacacatgaggggtatttgccgcatcagattttagtatagttaaaggagcaacataagatgaagtcttctcagagatgaaatagtttgagcgagtaaaactgattccttttaatttcttaataacccaaaacttggaagccaatcaaatgaatcatcgtgtggttttatcttgactcgagacttgagaggataattgatggatgctttcgtcagtttccaacacccaactttgaagtgcaatcgcctacatgtatttgactatctgtacttctgaatccataaaatgtacgtcataggatttgcccaaatgctgtacgtatataggagtatatgatagcgagtgatttctgactgcaaatgctgctgttggagattgaccgtgatggatgagcagaagctactcctgcttgttcaagtcttcggctgatgaatcccggccctgactgaaccagacgtcagatgaatatatagatgatgaggtgcagacttgactggaacagcttgacatctccgtctctgagactgagaggtatatactccatctgaatatctctcgatctgtggaattggtccatgttgttggattttcgtctgttgtttctgccgcctccaactctgtcaatttcgtggatccatattgtcgcatgcagtttgacctctacaatgttggttactcgaggacgtcaattttctggggccagtagtcgagcaagttttcagtagtacacgcttggtcgttatatccgttcgaattaatagatgagataaggtttatttggagattaattttttggaaaaacacacaagtctatcttatggaagacatatgtatgagatgcttagaatcaccttgtccatcctaggaaagaatgatctccttaaaaaaagagtgatctcctagctagtcacttgagacatgcgtaacggagaaaactagaaagaataattcggtgtgcgaagtctgaagcattgcccacagatttctaatagaaggaactcaaatcatatatacatatacaaatcatccccactaccagaaattctctgcttcttggtgcttcccacgtcattagtttttccaaaaccgttcgatcgacaatgcatcccgcatccgcgccgtcccacatctcgctcgccggtcccactgcatcgctccccaccgcatcatcaagtatgtcttacccaacaaatttgtggttgcatggttatccgaagcaaatgcctatagatttttaacagaatgaactcggactcctcaagtgtatcttacttgataaatttagctgcttgcattattgcgaaagtacctttttcatgaaaaagtttcagtactacactaaaatacaagagacagttaagggaacttgaattcacttgacaaatttgtggctgcttgcattattgcgaaacttatctttttcatggaaagtttcggtactgcactcaaacacaagagacagttaagaaaactagtacttctcaattgtgtcttacctaacaaatcagcttcggttgtgcactctaacacaagagacagttgagggaactcaaactccaaactcctcaagtgtgtcttacctaataaatttgtggccgcgtgtattattgcaaaactacctttttccagaaaacataagacttattcggagcattgcctatagagtcaggacacttatcgggagcatattgcttataattttttaatagaaggaactcaaactccccaagtgtgttttactcaacaattttgtggctgcatgcattattgtgaaactaccttcttcatggagaaattttagtataatgtctcaaacacaagagataggagacaggagtactccattgagtggttgatacttgatagtataatgtctcttaatgttgaggagaaagcttaaggaaaagacgttgtgtctaagggcgatggtaggtagtctagtgctaatgtgatgcacaaagcccaaaacaagaacaaagaaaaattcttcaaagttcaacagaccactgacttcaagaaaaagaagaagaagaacaatccgaa

SEQ ID NO: 20664 - DNA, 4056 bp, Oryza sativa
taaaatttgtcaggagaaaactaggaggagagaaggaggggttgataaaaaagtgattgtgacctatgggacccactaaaaatagtctgcacagggattttgtactgtgagttttgtgacttgtgaagttcctcatcctacctagcagcccaggaccagcaaaattgcccggcgtattgtaaacgccctaagagcaaggataagagtgagctataaacttacatggaggagagaggtaacaaaaaaaaattaaggatattggctctcacggaagagctagcttaacataagctccaagacaaatataataaatgtacacgtgagagatagctagagagaggagaagaaaattgtagccaatcttatagctaatctattatatatgttggcttaagatgggctaatagtaggaagtgagctctaatattattctcgctctaagtaaaataaaaaaattgaacaaacatctatctagattcgttttaaaaagttgatttttttctaggacgaaatgagtactactcatatttctgaatatgcaacgtacatctttcattaaaaaaactactcataaatattgttgagtttttcaaaagaagttgtttttcagattaaatatgtaagagcatcatcaacagtctagctattacatccccaatcctatatttttgggattttggttaaaaaaactggtccaacagattcccaaaagagctcttgatgttttaaagttcccatctccaattttctcggtacgtgtatttgagggcgagagaacgactcccaatcccctccttccgcgtgtttctcccctccttccgcgtttctcctctccttcccccgtcggggcgatctccttctgcgcacgggaaaagaaaaaaactagaatttctattggtagtttaacagaagggcccacttttagtttttgggattgaatttaggctatctcttggaggaaggggttttttcaacacctattttcagtttaggaatcccaaaaattaaattttggcgatagattattagtagactgttggtgatgcgctaaacatgtgcttggttgtttggtttagaaataaaacaggatgagttagactcatctattcatttggtataaggtatcgggttggtgctaatttttaaagcatgtcctacatgtcaccgagagagaagtggattggataggtccactagtttaaaaggcaagactaacccagatcttatagaatatgtcatgtcagggtccatcccatcctatccatatccaaacgaaacaccctcaacctaacccatctcatcccttaaaccaagcaacccacactagtagtacacccctactgccgatgaggagctattgttggcttgttatatgcgtatttcatcggtcggatatcagatcactcatcgatggtagcagatagtagctgggggtttccaattcatgagtatagtgggaaggattggattgaaggttgtgttgttgtggttgttattattgttattattattattattattattattattattattattattattattattattattattattatttgacaattcaggtcccgttctttctagtcttttttaagtttgaccaaatctatagaaaaatatagtagtgtttttaacacaaaacaaatatattattaaaatatattcaatgtaagatttaataaaactaatttgatattttatatgttactaaatttttctatagatatagtcaaacttaacaaagtttgattagaagaaaagtcaaacaatttatgtaatatgtaatggagggaataccagaaaaatacgatttctaaaaaacaaaaactttgattgcattgtgtaggtcacttgttcaaggtttttgtgaattttatttctcaaaatactaatgtattgttacgttaatcaattaaacaatcaacctcaacaattccagcaaatttttgtttcaaataggtactccctccagttttataataattgatgttttagacaagattgaggttaaacttttgtaactttgaccatcaataactttaaaaatatttactttaaagaaactagaacaacatatatagatttgtatttcaaaacactataataaaaataaacatgcatttatttattgtatatattataatagaaaataaagtcaaatgtatattttgtagaccgtgtcattgtccaaaacgccaattaaaatgaaaccggagggagtagtgctgtagacttttagtgacctcctttatatgaattcattcatgcacacccaacccaatacaacaaattgtcaaattattatttattaaattacttcctttgttttatctttatgttggacgtaataaaaaaaaagaggagggactacattggagttatattttctacatcttttcaaagaggactaacgtaactatttgtacttggttcgatcgtagtggtcacacatgaattttcaagaaaaaaatcattaaataattaagaaatgcacaatcctaattataaaccctcattactaccaaggttaatcaagcacttcaatcaaatcaaacacaagatttttttagataacgagtcatcgagattagggatgaaaacggtcggaaacggtcggaaaaaccctctaccatttccattttcattttattttctcgaaaatggaatcggaacggtatactcggaaacggtaacgatatcggttatatcggtatctcggaaacggaaccgtcggaacgggaatataccgatatcggacggaagtcgaaaattcatgtcggaaacagcgaactgtggtatcatcccgcatttaactatgtatgaagatgaccttataatttcacccttgcatcattacgctgccacacaacaccgttatatgatgattaataagttgacaataagattgataaataatataaataaagttcaatgatacttcaacatcaatgtggctaaagcatacaatgtggcttacatgataggattacagcataactaatattgtccgactttttttaggatatagatttgaagtcttcgagaacaccaagctcacaagctggcatggcttcagctgatcagctccttgtcaaacatcattcattatttcatcatcaattgacatagctatatcgtcgtcctacagtggcacattgcataagaacttttatgttgacactgtataactactgttgtaattaagtttcatgctaaactagactttttggtatttccaggtcgatcacagagaggagtcaagatggtggggcccgccagtggatcccacagtctttcttttcctctctttcttttattttttctctctctcttatccttcccttctctcggttcctttttctgctctctcgatttcttctctgttttctctctcgttctcttctctgcctttggctccttcacgcgcgcccgagaggagagaggcgccggagatggcggcctggcgcagggcggcggtgggggaaggagagaggagaaaggggcggcatcggtggggaggaggaggctggggcggtgcggcggcgctcggcgcttggctcggtggcacggaagccggcggtggagcatgggggagggaaggtggccggctgcgacggaggccgtcggggcgaaggaggttgcggccggcgtcggcgacctggtggcggcgcccaacatggcgcggcggtgccccagcgccgatgaagacgatgatgcggtcaggcctagttggcttctttattcggaatgggctgctccttaatgcctaatgggctcctcctcctgctagccaggcccagccgacttccttcttcggaattttgtcggaaatttgacggaaattaccgataaaaaacggttaccgacaaaacggtcggaaaaaaccccatatcatttccgctaccatttccgaaagagattaccgtttccatttctgataccgacaattaccgataccgattgaaacggtcggtgcaaaccggaaacggtagccggaattctcggaaatttccgtaccgttttcacccctaatcgagatccacatga

SEQ ID NO: 20665 - DNA, 1071 bp, Oryza sativa
ctggcgccgtcctcctgccaccgtggcgcacgcgaaccgacgtggcaggaggagggcgctagccatgctggcgccgccccagggaggagggcgccagcatggctggcgccgccgcctccattcctgtttctctgtatggagttacaacggtgtcatttttattttattttttcggatgttttttcacactcaggatcacgatacaaccaaccacaaaaaaaatttaaactcgaactaccacttagctaagtctgaaaatatctagcataccacttagtctactttgcaccttcactaaaattagaccataactcttttagtaaaaccctttgatcagcatgttaaacataatgcactctaccactatatgaaattacttaatctaattcaaaatataaccacatgaaatgacatatataagttaaacagtacatagagatgcaatttttttatttttattttatttttttgatatttttttcacacttaggagaacataggaaccaaccgtataaaaaataaactcaaacggacaaaatatatgacatgtagaattttccaaaactctaccgaaatggacaaaatatgtcatctattaaaataggcataactttctcatacggactcggaatcaggcaaataatatatgcacggacatctacagaaaaagttacatccgattctccctcgcttcgccgggttcggcgatattaaaacctccaaattctgcttgcaagattgtgttttcgaggagagaaatttttcggtagagctttggaaaattccacatgccacatatttcatccgtttgagtttactttttacatggttggttcctgtgagttcctaagtgtgaaaaaaatatcaaaaaataaaataaaaataaaaaagttgcacatctctctcccctgcactagttcggagagagaggagaggagagtaaaaattctacatgtcacatattacgtctatttgagttcaatttttctatggttggttcttgtgtgtccttaagcgtgaaaaaaatatcaaacaaataaaacaaaaataaaaaatttcgggggggggggg

SEQ ID NO: 20666 - DNA, 11995 bp, Oryza sativa
cggcgacagccactctggcgccccaaaaaggaccatttttgggataagtttttctaagggtctacttgcgaaataagtttttcaaaaggaccaaaatgtgaaaaatccagaagctcaaacacccaaatggaggaaccacactcacctgcacagccgggccgccacgtggcggaatcttcgcctgccgccctcttcgccgacagaatcccgcgggccccacacaccacacgcgcttcaattcgatcggccgtcggccaacccaccaaacggtaggaaaaaaaaagaaaaagacgcaggaaaatatcccgcacatgctgggcggccgcgagaggacggttggaggtgggccccaccggacagttgggcagttgggagttttttggttgagctgatcctgcatacctgctgcctacacaacacatcagccggtgtgtagttcatttgacaccttggaaaatgacgtggttgatcatgttagcggaacacttgggtggttaagtgggcaaaaatcaccctgctatcatggacttgttagggaagatctttctggaaacatgtatcatcgacgcacgtactcctgattgattagagaagggtcgtggtcgatctatagtgtcgttttatagtacgtgtgttcgctacgtataatgtacagtaatgcttattgatgtcgtgtcaatggtgtacacttcatgataatgaagttgtccattctaacatcccatgagttataggaggttcgtcggcatagtattaaatcattcgttgttataattggtaaaagatgccatattattaattaggtttaacgatagctactttaggcccctttaaattgtttgaaagtcttatagaatttcattcctacaaagaaaaaaaaattactactaacgcttttcaaacaaaggattgaatcatatattttaatttctataaatagatgataattaagagattttttttagaaaagttacctagagttccaagttctaacctcttcgaaaatttcttgagtctaactctcttatctaatttctgtgttttttattaaatattcaaatgattgtttctgtattttctcatgttttgtaataaactattttgcagttgtattcccgttaaaattatatgtttttctttgctatacttttgtgttattcaatcatgtgttttaacggagccttaggctctgtccgtttgcctgggttgggaacccatccctccagcacagaaaaagaagcagtccattagtacgtgattaattaattatttatttttttttcaaaaatggatcaatatgattttttaagcaactttcaaatataaactttttgcaaaaaacgcaccgtttagcagtttgaaaagcgtgcgcgtggaaaacgagaaggggggagttgggaaccttgacataagaacagagtattattatgagtaggtgatgggtacgtggatttcaattgaaaaatctctccagatcagtatcatgcgatggatcaaagagtgaagcaatatattgactcaaatgcaccggaaggctacgcaacacgatgtgagaactttttttttatcaaagacctggcttggtttctttaagaggaattgatgatcaggtttaattatcaagtccagtagtagtaattaattaattaattagctagagatttttgatcaaggtgttttatctcattaagctaggtccagaatgccgtgcctagctgatgtcttttgaccacgtaaaacaaaggccctcgtcaagaaaggaagccgtacgtaccctctatagattccctcgtcaagaaacagaggccctcgatcgtcaacattattacagggtttcttaatttaattcatatatttcccaaataccctaatctaaattttatagatgtaggtatcgtgaaggtatcacgaggtgtttttcttttttaatttctgatttatttggggtactttttaatgatttgtttctttttcatttgaaattctccgagattttccatgaatctctgtgatatattggtgataacgcttggatgatactatatattcactcattgtactggatgatatatatacctctatatgatatttcgaagagtcatggagatacaatacgcaaggcagaatcattgagttttattctataattataaaggtaatactaaaattttatagagatatacagtaccataaatattcgaggtatcatagatatcttgatttttttttataaaaaattcttccacggaagaagcatggtatcttgagtactagtgtagtatcactgggtcattgtataatcatacaaagataacagtacaatttgatagagatatagagatataatgatacttgataaaatattttaagtatcataaattcgtaatacctcgaggtattgtgctctctcatatccctttttgttttgtcagatctggccaggaatgcaagcattatagaggaatgcaagcattatagaggaccaaattttgtaagaactacactaattcttataaaattcccgtgaacttgaaaaaaaaattcatgtgtgtcaatgagccttaggacttctgtaccatatgagttttagtattttacagataccaattcaattctcaaaatattcctccaaaatacccccgatcaaagcaatcttttaatttgcaactacattaggggtaaatctgcaattaaccaacttgaaaaattcttggctcaaatttgtcgtccaaaagagttcgctatgaaaatgactgaatgttttatttttccgtgactgatgttaacctttgccttggaagtaggggactctctctctttcttgttaacttgaaccagctgctttgaaatggaatcaatcaaatttaaatcgagggttttctttccccaagtcttagggacgaagaatgcacggcaccatcggtggtgttgccctttccacctcaaaagctttttgctttcttcacgcgccggcctgcgatcatagccgctgctatctgtccttcttcgtgactgcactactgctgctgcagtccgtgtagatttgggacagaaagaaaaggaaaagggcagtgaaacctttttcctctttatttatttgaaatttgatgaaattgggacgaatcctttttgtgtttccgtgattagtttaatttagttttccaactatgaacttggtaggtgtgcatgtgttaattgtgtgttcaatttgtagtaagtaattttgcatgccgacagcctgaaaaatgtttttctttttttttcttttgaatggtactagtatgggttcgacagatatatcacatcagttcaggtatggcaaccggtgccaacgctgactactacgaccaaaaattatgctggtgtttagttctagggtgtaaagtttcagagtatcacatcgggtattatatagagtgtcgtataggttgttcgtatagggtgttcgggcactaacaaaaaaactaattacagaatccgttagtaaactgtgagacgaatttattaagcctaattaatccgttattagcagtgtttattgtagcactacattgtctaatcatggagcaattaggcttaaaaaattcatcttgcaaattagccgcaatatgtacaattagttgttttttagcccatatttaatactttatgtaggtgttcaaacgttcgatatgacaggctgtaaagttttgggatgggatctaattaatccataattaattagtgacatgtcttataccctgtttagatgcatagactaaattttagtccctgtcacatcggatgtttggacactaattagaaatattaaacgtagacaaatgacaaaacctattctataaccctggactaattcgcgagacgaatctattgagcctaattaatccatgattagcctatgtgatgctacagtaaacaagtgctaattatagactaattaggcttaaaaaatttatcagacgaattagctcttatttatacaattagttttattattagtctatatttaatacttctaattagtgtccaatcatccgatgtgacagggactaaaatttaaaacctgtattcaaacaccacctaacacaggcctaagttactattagcacactaactacaaactgacaaaacagtgaggtttttcaagtgttgacagagatttcttcctgctaccggttcaaattcaaacaagacaagtgccagctgaagaaagggagaaaaccttggtccttgttgtagcgccgtatcacattcacatctaccaggacaaaaggcagtacatggaaaacgaagatgaagacccgcataggagccatcgaaacgaatacgatggttacagaaaagcaatcaaaatccaaacctgcctactgatcactcggcgtcatttatttttttaaaaaaaatacagagacagtaattgtctgtttggttggcaaccgaatttgacacacctaatcatcattttagtagagaatgtatatggttcccgccacaactctacaggtgtccaaacgggcggcacggcccggcccggcacgggcacgggtctggcacggcccgtttcggcacggcccgttaggcacggctgatgaaacgggccgtgccgtgccggcccacgtgccgagccgccggcccaagcacggcccgtggatggccgggccgtgcccgtgccggcacggcacgcccgcggcccacgggccgttcggggcacggcggcccacgggcctgcagtgcacagtgttttttttttaaaaaaaagcaaaggaaatgtataaggaaaaaaaaattaaaaatggaaataaaatgtttaaaaaaaagtaatgatttactaatgttaaaaaatgaaaaaatggtatttaaaaaatggaaataaaagttttttaaaaaagtaatgatttgctaatgttaaaaaaaagaaaaaatggtatttttttgttgtgttgaaaaatttaaaaatatagattgtgattcattattttgaaataatttgaagataaatccacacttgcgaaaatattgcaaaagaatttgttaaaaatagtaatgacctttattgatgtttatatcattacaggatacaatgatacatgctgcctcgttaaaaactttgtcatgtaaaaactcataggggaaaatgagaaaaccatgacaaagaaaagagtacagctcaaaggtcagaactacttctaaaaaaattctactggggttggtctggatccaggtagagttgctcgaactgggcggccaattcttggttgtccgcagtgtattgggcatgttgtcgagcaagctcccagtctttaacgcttagtagcatttcgacgtggtcgctgcgcagagtcgtcctccggtcttcgatgattcggccgcatagactgaaggccgattcggaggacaccgtcgacacgggcaccgtcaacacatcccgtgctagttttgaaagcacaggatatgttatcttgtggtcattccaccacccgaggacgttgaaatcttgtgcttcgtggtggatggcgtcgctgtccaaataaccggacaactcttcggccacaacatgcgaagaggcgtctccacttgtagccgacgaactgccaccaccttggattgaacttgaagacgatccaccccaaatcctaccccactgtatcttcttcttacctgtagtggggataggagggggtctctgctggcgaacttcctgaaactttacttcatatcttccaaaaacctcatataatttacgtctaacctcagtataaaaagaactataatctacacctatagtatctccaacaagtgataaaatagcagacaatccccttaatttacacctaggatctaaaacaaaagcaagagcatacaacataggtatatttttccaatatttcaaatatttttgttacatgtgaaagacaggttcagttagaacgtcatcattttcgtattctttaaataaagtagcaatttcaagaaggttgtgcaaaattatattagcagttggataataaacttgtgacaaagttagagtacaatcataaaaagtttctagaaattggtaaaatttttggacaattgcccaaacatgctcgttcagtactgaagacccgtcactgtttcttgggccaccacgtgactgaacaaaatcagaaagtaaactactataaggtaaaacaacttttaacattaaatacgttgcattccaccgatgctctgcatcggtggcaaacttacgagctttcacaccggccgcattgcaaaacctcttccatgcagcaatccgcgggttagaagcagttaaccacgcgattgcttgacgaacagcatcgatgtggtcacctaccctcttcatgccagtcttaacaatcaaattaattatatgacatgcacaacgctgatggagtagaaaagattgagcatacacacaaaataaaggttgcaatatttcaatagccctagaattagcagatgcattatctagggtgacagcaaatattttatcagcaagattaaattcattaattacttccctaattctttcagctatgttttctcctgtatgtgagacatctattaacctaagccctaaaactctcttttgtaattgccaatcatcatcaacaaaatgaacaactacgctaagataatcctctctagctctactactccatatatctgaagtaacactaacagagaaagtacatgtactaaacagttccttaagtgcagttgcttccttgtgataaacattctctaaatctctagttgatgtttgcctactcacagctttaaacctagggttatgagattgctgaatgtaatgttcaaaagcaggggactccccaaagttcaggggtaaatcttgcctggcgattaaccggacaagagattcccgagcaaccatgggatcgtactcccaactgcgtaccgtaccgtctgggtttaccataagttgctgctgccggagttgtattccttgcttcttggcacacgactccgcatggcgcttgaggtgacctgtaccaccagaagaacgagcagataaaatttgcctacatattctacaacgggctttcgatacctcccttccgtcggggcatgtttcctttatctcgtcgaagctttgccacacaccggaggttctcgatctcttcgagccggtgtgtgtcgaaacacttccgctcgcggttccggaaaatccttccgaagctgtctccgcctgaaccggtacctcctcaacgacagccgtatgaaccggtacctcctccacagatggtggagttggagccgatccggaggcaccgtcaaaccccgacatgtagttggggtcgaaatcacccaaggtgaacgacggcgactggtatggaaagttcggatccattctgaaaatttaaaccgacataaacaaattttcgaatatttattgaattcacaaacacaatacaaataatacacaaatttgaatattacttacatctttccaaccgcgagctcttcaaacctctgcgatcaaactgttgaactacgaaactaattttgatttttgacaaaatttgagcaaattttgtcaaaataaaaaaaaatgcacacttgagaacaaagagagcacttaaaacacttgagagcacaagatgaggagtgtgggatgaggagaaatggctggggttcatgccctatttatagggcgaaatttgagattttttggaattttttcgaaatttttatgaattttttagcctcccaacggttattttcaaatttgaacggtcaaatagccgttagtgccacgtggcgccttcccattcgaccgctgcccgccctgtcagtgcgccgctcgggccgccggcgtgtcgtgccgcgggccgtgccgtgctggcccgctacagtagccgtgccgtgccgtgccggcccgcgggctcggccagcggcccaggcacggcacggctactcgggccgtgccggcacggcccgttactgtagcaggccgtgccgggccgtgcctgctacaggttcggccgtgccccgggcggcccgtttggcccggcccatttggccacctctacacaactctactaactactacaaatgaacacagccatagtttgccaaaaagaatcacatcatagctaaataaatgttttatgtaatatatatcgagagaaaaaggaaatagggagaactccaattgccccgagagtggtgatctcacttaataggaatagccctatgtcaatatggtataagtgaactcaggataattttaaaccaaaacaaatacttatagaacctacgtggataaaataaaactgaaacgactaaattgaacttttggtgaaacttaaggaattagatctattcaccctaaaaaatcagctaaagaaatattttacgaaataatatatcaaacaataataataataataataataataataataataataatgaagaaaaaataaatatagggaggagaagtccaatccccaagagagcggcgaagaaagaagaaagagaaacacgggtgcacgcgctttcgcacccttcctttttaaaacgccactcccggccaacccggcctctccccatcctctccgtctcctctcctcccttccaccacgacgcgaccgacgcggcggagaaacccgcgaagccgcagtccagccagcgaggggccgccagccgaagctgaagcgagagctagggtttgctccaccccttgaacccgcccgcgcccccgccgccacgaggccgatcgaggtgcgtgccaccgtaatctccgcgcgtgtttgtcgtggggttgggttgggttgggtggggtggggtttggtgtggatcagggaatgcgggatctggtggggtttcgtgcctcgctcgctcggggatttcatttggtggggtggtggtgatcccatcctcccccactggattttgatggatgcgacccccttccgctgaaatcggagggattttggttgccatgcgctgctccttctgtccgtacggttcggtgaatcgggagttgtagattggtggtgatgatgacccagtagttggttctgatgctcaatactcgctgcgatttcgctcccctttatccaagggaagggaagggagaggggcttcctttgcgttcaaatttagcaaagtaggaattgtgtgagattggtggtagcgctcacttttttcagctctagatcgttagttctgcataccatgaagattcttgtatcaggagaagattattatatttattctgtggagaacgatatcagagatgatttgtgggggtgatttttggctgatttctgctctgcagggttctgcttctgaggctgtcaagcctggcggctaattgggatggaccttgtgggatcgctgctggtgaacatgactcacttggttgacacctcggggctccagttcttcggctggctcatcaccgccggctccttcggcctcgccgcgctcatctacgccctcctcaggctgcagagggcggcgtcgctgtactggatcaaggcggctgccagggagaagaaggcggcgtggaagtcgttgcggtgccccagctccggccacacctggaccgaggactacttccgcggcggccagccttcgacgtgctgcgtgtgcctgtcgtccctgaccacagctcagggtgtgggctctcggggtgccgatgccgttgtggtccaccgctgctcggtgtgtggggtggcggcccattctggctgctctcgtggcgccgagaaggactgcaagtgtgtttcacagcatggtgcttccaccttgcttcatcactggtcggagaggtgggtggagctggatgacaacccagagatgtcctctttctgttactactgcgatgagccatgtggtgtgccatttctcggcgtctctccaatatggcgctgcctgtggtgccagcggcagatccatgttgattgtcatgcaaagctgttaaaggagacggggaatacttgtgatctaggccttctcaggaggctcattgttcctcctctgtctgtgaaagaagttgcccaaggaccagcaattactggaatgctcaactcgatcaaggaaggtcttgtcacttcatcagttaggggcaggattaagaggcgaggcaacaagaaacgcatgaacaaccatcctggtggtaagacaagtccagtccccacaaacagctctatccttgattctgtgcttgaagggtttgctagactgcagaacttgaatggaaagtatgcgctggcaaaccataagtctagtggggattctgtcaagcaaacacatggatatgacagccctaatggagggaagaaaaagtatgaaatcattgatttgccacaagattcaaggccactgcttgttttcattaacggcaagagtggaggacgaaatggaccttctcttagaagaaggcttaacatgttgctaaatcctatccaggtaattttccttaattctttacttacgaaaatggtagcagctcattcttatcaactgctgagtcaattaaactgcttgctagtttctctagctttatatgcatgatacatctgctgaaaattgtagccagcagttttccttggttcattctacgatacttgctaattaataggcattttatacctatgtaggttctagattgatctatttgtcttttgatgttgccctcagagtgaagttgtactatttttgtcatttgcacactttattccgccaaccaaaatagtcactgagatctgacatcatcaaatgtttagttaatctactgttaactttagtattagccgtggttgattgtgacatatttgatactctattcttaacctggaaaatctcattcttgtttcagatatttgagcttagtgcttctcagggacctgaagttggattgcaatttttccacaatgtaaaacacttcagaatccttgtttgtggtggggatgggactgttgcatgggttcttgatgctattgaaaagcagaactatgaatctcctcctcctgtttccattcttccattaggaacaggaaatgacctatctcgtgttatgcgctggggtggaggtctgtcttctgttgaaggacaagggggaatatgtgcacttctaaatgatgttgaccacgcagcagttaccgtgcttgatcgctggaatgttgccatcaaagagaagaatggagcagaagatcaatgtaccaagcaagttaaatttatgactaattatataggtacgatgcatctctcaacttccatcatcttactcgatattatgatatatatctcacttcaaccagaagttgctgaatatgttattttatcatgtttggcctgtaggtgttggatgtgatgccaaggttgcatatgacttccacactacgagagagaaaaaccagataaattttgcagccaggtagggattgatttctacatatatttttctgcaaaatgatgtttctccatttggaacaagcaaaatccctgtagaaattgaaccttttatggaaacccctgaaatattgacctcccttagcatttgatcttatgctacctcctcttctatcacttttactagtcaaaataataataataattcaattttctactgagcagtttgtcaacaagctgatatatgctagagaaggcgctaaggatatcatggataggtcatgttctgatttaccatggcatgttagtcttgaagttgatggaaagaacgtcgaaattccagaggtaacatgctacgcatcttttatgtacctccacagtccacactctgatttatcatcggatgagcttcttatatatatgctatttctcatcaggacgcagaaggtgtgattgttctgaacattcctagctacatgggcggtgttgatctttggcaaaacgacaatgaacatgatgatgattttggtttgcaatccatgcatgacaaaatgcttgaggttgtctgtatatctgggacgtggcatctaggaaaactgcaggt

SEQ ID NO: 20667 - DNA, 1875 bp, Oryza sativa
cttgtaacttcctaagaagacatctaactcttaaacagactggctataaagcaaaataatatgttctttgggaaatattccatactttttccaaaataaattttaacgggcttattttgcgtgatggcaacataataaggcatcttatgctgttatgctgttaagctttaaacatgaagggtaacaagagctatctgattttttttttttttggcaagactgatactgaagtagcagaaaataaaattaaagagcatatagtcatataataacatttttcatttaccatcggtggaaactcttttcatcttggtccatatgctgttctccactggtcaattcaacatggaaattgcatgtcaagcatgacaccatgcaatggtggtaatttgcatcgcatctccaagagaagacaaaaatatatacattcagattggagatcgagagttgccaagaagctggcctagaagattttaggttcctgtaaaggcaaagaaaatgcatcattttttgcatggcttgactctgataagaaagcatttgatatggtaccaatgcacatcacacaatgttttatgatggttgtcatctcaatttgagtctaagagatctgtgactctgcactctttttagcgtgctttttttgggtatgatcaggatcataactaaatctaattctactgattccagtaactaaatacaaataattgcttgcatatgtcctctcaattgtaaaaattcaccaattatttattcaaatctaaagcacaactaaaaaccattattaagagtgaagacgcatggtataaagggaaatacatctatataatcaggttcaatcttatattctacaatttaatcctgttaaaacatctacaattcaattctagatcctaagcctgatgatgtatcttctaccaataacatgagaagcaagtggcataaagcaatattgcgttcatttcaaaaggttggcatgacagtttgacttctgcttacattaatttgggttaggaagtgttacaatcagtgaatgattctgactatgcttcaggagtaattttgaagaaaacaataaacgtcagtaacccaatatcattacaaaccttgcacttctgatgccaaatacctttaatataatctacacaacgtttaatataatttagattaacataccttttgtccagaaatctggcaaagattgatcattcatggtatcatctattgtgatatcctcattgatgtttatagcatccctttgtaatcctctgccaggatttctttcataggcaatgatttcttcatatgccttctgtaagatgtcttttgctgctttatacacagcctttgatgcagatcctttgtcagcacatctgatggcatcagcacacaggacattgtaacggcttgtaatggattgacaagtagcatctttgtggttattgctgttgtcttccaacaattcatcatgtctggcattcctcgtccaacgtttcaaaaagtaatcaggtggaagtgtgcgtggatcaactattatgaatactccaagaatatgacggcataaaatacctgagaacttaaagtacttgcaactacactttgccatcttactggaagcattataagtcacacagaatgtgtctgatggatcatcttcatcttttgtgatgctgaatttgtttactctgccttcttcagttttctgaatgatataacccaaggattctgtgaattcttcttgaaacctactgaagactgcttttgtgtaagtgcttgctgcctgtttctctattggcgatgcagtccttgtagttgcctcatttaaccgagtgtctatatctgcttgtgcttcattttcatatcgacttgtcatgg

SEQ ID NO: 20668 - DNA, 13917 bp, Oryza sativa
ataggattaggctgttagggtaggaagctgtgcaaccattgattacttctttctttttctttttgtccaaagatgagttagtagaaggaagcaaaaccagtgtagcctatgtcaatgttgttaatgaattgtaaattgaggtgaaatggttgagatctgtatcgttaaccttgtaaaaggtgtcctgtttcatcatagtttatctgggtatttaccagttcacgtaaccttgtaaaaggtgtcctgtttcatcatagtttatctgagtatttaccagttcacgtattaactttgcactggtgtaaacaaaaatatttacatcggtctaacgacaatgataaacagatttgcgacaaaattattttcatagatcgattgtacaccaaaatgccattccattctgcaagagagatgagctgaacggattacatatggactcgtgcaaatgcatccatatttttctttattcttcctttatttgtgcactaaatttagttatgtgcacatgttgtaacacacagtttataaactagaaatcccatcttttcttgacattgaacattatggctgaattctttacattgtcttgtggaactttaagcgtcaactgaactttagccttcataggcacctccttcgtcttgccccctgcatctccaacctgcatgccaggacgcaatttgcgtcaacttcttacagtgcaaaaatatagcaaggaaaaattatttggcacctaatttaactgaggtttgtagcttatgcagttcatgaaatgctagacatactggaaaaatgctattgctaatctatggtctcggttgttttctgatgaaaatgcgatctctgatgttgacattgaaaatttgaaatataggtgaacgcttacccaaagagatgcccatccaagcctttggtcagactcataaccagctttccacttgacatgcttactggccttgtgtttatagataaaactccagtagtttgtgtcaaactggtaccggtagctgaaaatggtaaataccatataaacatattagcagggtactcaagcttcccatagtgtccagagctaggcattcttataggtgtgcaatctcatccataaagcatgaacagtacataagtgtctagattgagtttatgttacatttccttagttttaaaaatgagttttatgggtcaagtcatcccaactatataaggatggattgtctctcttttcactaagcgataaagatgaattaatctagcatccgcgaaggttcttcatccttgttccacagtctcctcaagctaaaagatctatccccttcagctttgcttagctaggtgaactaaggttcatcacatgtattgtcacatatggtgtttctagcatacacaactatttcaagctgtattggtgacgatgacttgcactagagcagcttaccttaacttgtctgaaggagtgaattggcgcttaaatgcaaaggatagtgaattggatggtaaagagaggcttggaataaatgataactcttcatcctataaaatacaacaaatatccatcatgagtggcacagtaaaataaatgtcaatggaactgttgtggggcaggaggccaaggcccatgacagaaacgaaggccagctgagagatgcttaccttgtaacgatattttatgttcatctcattgtcactgtacaatgcagtgcaaactccattcagaacatgagacctcactatgccgtttactgacaaaatcctgtcaccttcatccaaatatttctgcttaactgaaacttcaccattgggaaagatgaaggttgtcctcggctacatacaaataagatcaatgaactcatgcatggtgttttctagtttcacattatcaataacagcaagggctacagtgcatttccaataactattttttttcacttcatcttagtgacttggttgcataaatactgaccaatccatcaggtggaaccacagatgataactcaatcttgcatggtgaatcacccaaatttgctctcaccgccacttcccctttttgctcctaattaagagaacaaaaaatgatcacatatactatgcggtatcttacatgtatcatgaagacatatttctatagcacaacaaaagctatgctatataatagcaaatagatacaaattaccaacttattgttccatgttaaataattttggcacatacaaaggccttttatagactcatgcctttcgaaaacaagtataacgtatatgccacagatgtgtgacttccaagaactcatttcattcactaatttacaataaagaatagatagatgttcatattaaatgaccatcaccgcatttcatagggtcttccagaaaaaagaatgaaggcgtttctcgatggattcattttgactgaatgagtgactgactattgcaagtataaaactaaaaaaaatgtccatcaaattcaacaagaatcattgaagttcataattaagcaaattgatatcatttgatcaaattgctgctgagtaacaaccaaagagatccccacagaaaaaaaaaaggaacatacattgagaattcgttagtcatatggcaatttataaatgtgtttcagactttcagcagatgtttcttcaagttcagtcccaatgctaattaataatttcaagaatggatgggaaaatgcaagctgataaggaaactgctcaaaaataaaatcactgcaaacaaaacagatgctatcagaatagcttctccatatacataacacacctttctactgtggtacttcaattgaaagtacctatccaagtgaatacaagaaacagttgatttgtcatattcataattgcaagacagagacaaaaggtgggtcgagcagctgatatgaaaatatgattgctctccattctggcagttctgaaacataaggtagtctcaaaatctcacagtactgctttatgaaaaaagaatgagcatcaatagcaacgtaagagtttataaatcacgcatatttactgatggatctttacataggaatcattcaagcagaaaatggctctacaacaatgatttttacgataatgatatatcgaaggacatctgagaaactcaaaaggttacagtaaggacagaatggatgacatcaagttttaaagcactagtacttgatattcataaaatgcaacacatagtgcaatacataggatctcacaatttctagccagtgttccatatgtttcccaactcagctcaagaactccaaatataacaccgattcagttgtaccaaactgttgcacaaacttaaccaatacatcctaaacaaaaccacttgcatctgttggcaatgccaaaagtgctcatattatgcagaaggttcgactatagaaaatagttttcaaattttgaaatttacgcagtcatatcacaagtatgcatgattatgcccagtgatgtatttcggcacctagaatcaatattaactcataaagctaaacccagaaagcaggcctgcaaatgacatgtagactttttattcttcctcccccaacaatgcaagtatatctggtcctttgtgttcttcactcaacagcttacttttagctgcctactaaatctcaagaaaacagaatatttcactgacacccttttgcatatcccgtttctgtcattccggacaaagtaaggtcctggattaaattcctctgttcttcaaaatgagatgaatttatctgttttcccttctctttcataacccatatggctagataaatgtcaagagccagatgcaaacagcagcgaagacgcccaatcacatttcacattagggtcaatcgttcccagcaaagcactaaattaaataaatcaatcaagaggtggcaccttggtgtcgtgcttggcgctgaggcgaagcgatccggcgaggtcggcggcgccccgcagcatggcgcttcgggctacggtgtcgacggcgacggagaagttccgcgcgaggagcgcgacctcgggcggcggcggctccaccgccgccgccccggccccgccgaccccgtggtggacccggacccggagcttggcgaggccgtccatgacgcggcaggagaggcggtgggagaagagccgggcgtcgctgtcgaactccgaggtgacgcggacagccgaccgcctccgccgcggcggcggaggggctccctccggggacggcggaggggcggggcccgggaacgcgtggtgcgcgcccgcgctggcgtcctcgtccatcggagggggcgggggcggggcggagaggagcgccggggccgccattgcgcgcgacggcggcgagatgagggttgggttggggagaagatgagagagaaggtgggggaagtggtgtggagtggagtgaagaagacgcgtggcgagcgtttgcgtcttctgctcacacaaagatatggtatcgtatgcgtatctccaaattttttttcctttttttttcatcacacgaaataacgcatatgcgtacacggattgagatttcaaaacaccgtacctttattattaatagatgggtttatcattcatgacaaaattagatatattaccgaaagttctcgttttttggttttatagcaccgaaagtttctaattcattttattagctttcaacttcccaatccgttactatctagagcacttccatcatttacagctctattgctattagattgattaattctgactgaaccatttgatcctaccttctcattcactcctctttcattcccccgagtcaccgactagcacacgctatttgtgtattatttctgtaattgtgttctattatattctaacctaatcgatctaccccttcccccacccccagtgcgtatcgtcaagctcattccgtgtcgcatatatatctggatatccctctctaggcgcggcggcagcagcggtccgctttacccccaccgcaactgcccaccccttatgtcctgttaccactcaccaacagccacccatccatcctatcactagcagcaacgcgacgctgctgctgccaatcgatcatgttgctgttcattcttcatgtaggagaaagattaaaaaacttgttgctgtgttcagatcggcaacacataaactaaacttttgtcattctgtgtcgcttaacttagcttttgtcatgtatctgaatttccaaacaaattgcaacgacaaaacaaaagtttctgtgattttatcctgcacaaatctgcaaatgctagcactaggaaaatcaataagatgcatgtagcaagaagacatggacaactcatttaaacttcagttggagttcaagcaaaacactctctagctcagtacaaagcatgaatgattcaatcgaaagggggcagactagcataggtggaggccaagcaacaacacaggcttcgacgagcgaatgacgcgttaggagtggtgctcaaaaggtgagggtgcagcatcggcttcacgtcgtgcgccacgcgagggggagcagcgccagtcggggactcaggagagagaaagaggagagaattagaaggtaggatcaggaatgctctaggtaggctgtgtttagttcacatcaaaattgaaagtttggttgaaattggaacgaagtgacagaaaagttggaagtttatgtgtgtgggaaagttttgatgtgatggaaaagttggaagtttgaagaaaaatttgcatctaaacacggccgtagtaacagattggaaagttggatgctaataaaatgaacaagaaaatttcattgctataaaaccaaacacaaaaactttcattgctatatatccaattttgccttgattcattggacctacatgtcagtaacaaagacatgtgacttgtttatgacattggatctacacgtacacatcaccaaatcatatttacgctttcggattgcataaaagatacattgcaaacacaccacccatatccctacactcgcgatattatagacattgctaataaagcatacttttatgtgtatgttttttttattaaagagatgagtagaaacaattatggtgctagtaaggcttaagcccaagctcttagctctataatgttaacaccttaacaaattactccctctttcccaaattgatcatcatataagtttatgcaccaagaccaagaacaatttaaatcacatcaatcaagacactatgcacacatgcattctcccacaatacatgtatcgattaaggctattcccaaccctagacactagacatagtttccataaacttcacatcatcaagaaactagtactagacactactattccaatgcaaacaccactattctatacttaaatttaatgctacttatctcacatgatgtcttggatgttgtgtaaaaaccatatctcgtgcaagacatggtttcctctctttcctcgtttatttacttgtcacatcatttttcgttctaggtggtaacttatttaatgctatgaacaacatcctagtcattgggttgggaatggcctaaaaccttatgccaactacacccacatattctctcatattgcattaattatattctgataaaatccatgtccatgtagttatatgatgatcaatttgagaaattttggattctattacatgatgatcattttgggaatgagagagtactatgcaaattttggagatgtggaagtacacactaactcaagctctcgatgcgattgaattctggttccatgtgctagcaacctaaccattgcagcttagatttaacaaggaggaaatacaaggtcttagagttttatcaataaaacaaaaaaaatgcttcgtaagaatataagtagcacatttggtgggtgtgagccatgcgactcaagcgatcccttgcaccctttccaatccccttcttcatttttctccgatgtccatggtaccgtgatagtggcaatggagaggggatctatctctcgttttagttaagtaagtctatagggtttctttaattgcttttaatacttcctccatttcataatgtaaaactttctagcatttctcacattcatatatatgttaataaatctagacatacatatatatttagattcattaatatctatatgaatatagataatgctagaaagacttacattatgaaacggagggagtagtctttatcatttaaatgtattagatagtccggagtatgccttttattaatggaattatattcacttaggtttatgttctctttctatcatttttcataagtactttatttgtgaggtggctagttcatatatgagattctcgaagaattatactagctaagatcctaaaaaaaaatagaaaggctttatttgttaagcgaacgggtgacccaatctatagcactaacttttggtaccgacttgttatacggttataccggtttattaactttctcaaatagatgaagaaaatgcctcctgcttattcatttgcattttcatttcatggagttggtcaacacttaggctgtgttcgccaatccatgttcccaaccgaaatagtacgcgcggaaaatagaacagtctattagcgcgtgattaattaagtattagctattttttttcaaaaatagattaatttgatttttaagtaactttcgtatagaaaatttttgcaaaaacacactgtttagcagtttaaaaggcatgagtacgatagacgagggagatggatcgggaaaaggggtgccgaacacagctttattgtgctcccatctcatgcaacaatccaaattatgaagtctctttgttctactttataaacttttatatttctcaatagggtaacaatagattataatatattctcttatttaatatagagtaacactaaataaatttggccattttaagaaaaataaacactaagggcatgcacaatggttgtcaatagtggtttcttagtgtagctaattaggaatacttgttgacatagaggaaagagaaaaataagagacaaaacatcattgttatgtataacaacggcttaacaacgactcttaatcactataatatggaaaaatggttgcacgaaggtgaaaaaagggaaagaatattaataaaaaaaatatttttcgagttaataattagagcctttgttatctcaactattataaaaacatggtctctaaataatcatataaaatattatttaagagaccatactctagtattgaacctgcccaaagagcaatatttctgtccttattttgtttagagagagcaagagatattttctgttcctctcctgtccccacacaccaggggtctccctctctcctctcctcttccttccactctcctcgctgggtcgcgcgcttccctgctctctacaccgcgtccataccccagttaaggccatcccgaatctcgaggcagattggacggctcccattcacccccaccgtacaccgggtccacccacccacccccacagtcgccgccccttcccccgccgcgagagtcagcgccctataaatacccgacctcaccggaaccctagatttttgagagctccccttctccgccaccgcaagctctcccctgtacccacccaccgccaccgcggctactaccccgccgccgctatcgccgccgccatcacgagctactagtagctaccgggctatcgccgccgcttgccctgatgccgcagcaggaggtcgccgaccagatcgccgccgcggcggcggagcggggcctgcagaggagcggctcggccagccgcctcaacgcgggggcgccggagttcgtgccgcgggtcgccgcccccgtggtgccgccgccgccgccggtgatccgcgtgttcgccgcggcgcctcccccgccgcgggcggccttcttcgcgccgccgccgccgcatcaccggccgtacgagtactacgcgcctgtgaggggcggtcagttcgccgccgccgccgccgccgaggagcaggaggcggaagtggacccggatgcgacggaggcggcggagccactggtcgacgggttccccgacgaggtggtgcacaagattaccaagcaggtaggcatctatttccccgtagatagatgtatcataaacagtagtagtattcagcaaattatattgtgatgatttaggggaaaaatcgattagaatgtttaggttttgggtttactgatcatgtattgtcttaaacagcgttctgagttggctcaagtactgagtagatgctgtttgtagtggctgattacgctaattttaagaatgcacaaacattttgggatgcaatttatgaaaaattcctagttatgtgtagaaacaatgtatcgctaaattcccttaattggtgaggtgtttggtgctgttcaacttaggttcttcatatgtgatactccttctaaaaaatgatctgtgcctaacaatttctaatattgatcgtcgcattacccatgggcccacccgttgcgtctcgggtgcaggccactcgcccttttcggttcgcacgcagagttactctgccagcacgttttgcatctcaggagtaatgcatttcacggctctatcagatccccaaaaatcgatgttttggttcgccggctaaacaacaatcaactaaaagaaaggaaaacaaagtatgtagctgatctcatgcagaacggatgtgcatggctcctttttttcgtgaatgtagcatggacgatgtgtcccctaagactgattaacatggggagttaatatctccttagtttctcaagatggaacgtgctgatcaaacctggatggagggagtagtctgttgtgctgagcatcgagagcacctgtggttgtggatggttatttgaaacatggttgttgtggcgttgtttgctccgttctgcttggtttgtttctgttctgttcaacgttgcccatgtattctcctccattctgctttaggccctgtttggcatggttccaactcctagtttcttgcagaaatagaatttactatttaaaataaagtgatctaataatctaattttagcctaaagcgtgaacagaatatctcacactaacaacctttgatctagccccagttccaactccagaatttttggagctagtaaaacccagctcaaacaaacttggagtttgatctgtacctaggaaaattcagttccaaaaaacttggaattggagctgtgctaaacagggtcttagttcaccttaccttgcctcagtgacacttaggtgcctgccctggatgccttggcatcctggcgcctttcaagcacatggttgccttgcagccttggtttggaaaacatttaagtgtactaacatagtgaagttctaaattatttggtgaaattttatctaatcagctgtttgtttagtgaatctctatcatgattgagggaaacattcctaataggctagtgttatagcagtgagcatctagtctactttataaaactgcagaatacaacagaaatacttttgtccttcatgactttattattgactttattatttagaatttagtggaggcagctgttgcaatcagatcatacataattgtgactcagctgtgcaaaatatgttcctatgttttatttgtgtattcaattttcattggactgctttttaaatagacacaggcttgtaaataggtagtaggaaagtatggttctgtttggaactgatgtgcagtggtcaagagttaggacatttaagatattttttacacaaatagtaaaacattattgcttatgtaatctgtaataactaatcagttgacaaatatgtaaatctttaaaaagctacattaaatggagttttttcggatggtcataaattcccaaaggatgccaagtcctgtcaaatagcgttagtcgtgttgttttgtagtgtctagtagatcagtcagagagagaaggataatgtgcttattttcgcatagatatagttatttagagttcgtctcatgtttacctaggtgactcctctgtgttaaggctctccagggagttagttagccattgcctatgaggtagatgagaaaagagacgggagaaggggactgtaggtaaaattgccttgatttgataggggatcaatagatctgatgctgggtatacctcttattcattgctgcgggcttgctgccagggagtcgcactgctgtcagatgttagccttatagggctgtaccttgctgtatctgttgctgccactatccttagttccctatagtttttttcatggtgctgggcagcgaacattgttgtcgacttgtagcaactgtggcagtgtggctagttctctacctaaccctgctgtatcgtccctgttctggtggcagcaagccttctggagttctggttgttactagttgtctcttcagagcatagagttttgtttgtgggactttctgggccagttggtgtggattctttgtgccttttctcttttttttttcatctactcttccagttgatgccataatcaagttcatatggtttcatacttgccttgccatcttgataatcatgttgacacctccttatcttttcttttgtgttttctcttgcctgaaactatttgaggacaattttgtaggtggagtactatttcagtgatataaacctagcaacaacagaacacttgatgagatttattaccaaggaccctgagggatatggtgagttgtgtataattatttgaatgaatttaatttttggagaaattgattatttttttacatgattataatgatgtctaaaagtaatacattttttcaaaacaaaatggctgtgggtaaacatttttcttacaatagtttgctaagctttactagtataaacaaactcttttttgctaagctttactagtgaaaaagaactatctcctattatttccaaaagtgggaattttttttggtcctcctagatgttggtacatggatatgcttgatattgccagatgaaagatgattgtttttaggttattaattattttcctaaatatttgggttaagagagggaatattaggttttgtttggaatattatattttataacaagccatgtttggtggtaacatttcttctttttcatgaatgcagtgccaataacagtaattgccggcttcaataaaataaaagctttagtgcataataattcaatgcttgccgccgctcttcgaacctcatcaaaacttgtaagtttcttcattccgtactgtggtatgctcactttatgatggttatctttgaaggacaacatatgtttatttttaggataaaacaccaattttttatctactgatatttctagccaaaaaaaaattcctgttttatctacttattccattcacattgcaggttgtaagtgatgatggaaaaagagtaaagaggctgcagtcatttactgtatctgatatgcaggacctgcaggtattcatgaatctcaatcgcatgctgtttatcttatttttttgtaaatttgtgataatctacactgatttatatggcttcttcatctttgttgtagtcccgaatagttgttgcagaaaatcttcctggtgatccctgttatcagaatcttatgaagatcttttcaactgttggcaggtaggagtttgcaacatgtgagcatcctatttccccttttgaggatcttagaaaaataatatattgcgactttttaatgttctagtgtgaagaccattcgaacctgttatcctcaatcttcaaatggcaatagtcctgctactaatagatctgccaagctagatatgctgtttgccaacaaggtaattcccattcaattgttataaattatgttatcataaattcataatattgttggtaagtgaatactaattattttttattcttatggaattgtatcaattacattagaatcattcccaaactttcatcctctagcagtattgcccgagtgcattctactgcagataaattatattagaacatttatcagtaagaaggcttacggatgtatgcttgagacttgtcccttatttaagaactaagatagacttccccatttagcgttggtttcaacttcagtgacagctagatgtacttatgtttttgataattgctgaaatcaattctgaaagctacaagaagttctattttgccaagctgggtaatagtggctgttcactcgaggtgaacatttctcttggatctatggggcacaatatttgttagtttttgtcatattcttgcttgatttacttgctagtttgaacacattgttagccctcatccatatgcttttctgctgtaagcctgcaattctttttttccttttttgacacctttatcatcatggaagttttttcacttagctataagagatgaggtctcattcatgttgtgtttcaatgtgccaaatcatttattttaaaacatgcgtgaaattttcttgtttattttttacttctttttagaaaatgtgcaacatagttgaagttgtcattatacttttcctgaaaatttgatgttattgttacttttcccaacaaaacaagcaacatggttcaatgttttcaaactggctagttgaacctactcgtatggctaccaactagacgattagtcatgactaatcagtgataggggcagagtagctactgagagtaagaggagcagaatagcttgagaaagaagaataatcattggagggggagctggagtagctcatcttctcctgcttggcaccttcagcagcttgagaaggggaagtgaggcagggccagagtgccactaggtccagggagggggctgtagcctttaggcgctcaagcccaactaacattttcctccccttctagttgccgactattatggatgactagttgctgactggtcagatgactaggtctatagttgag

SEQ ID NO: 20669 - DNA, 23972 bp, Oryza sativa
attttgatgggtgtgtgcctaggccaagtgttttggaaccgtctgttatggtattgtcatgtgttttgaagccaaacattgttgttctggttggtacagacttggtgagttgcatggttaagttggctaccactactaccattttggacccaagttatatatggggaagggtgtaagacattattcatgaaaaatgttacaaaaaaaaaacatagaaaaacatggagatgctcgtcttagttcttgataggtcttcaggaaattgggtcattttgacagaagggtgctcaacagattggattggatgaccgaatatattttcacctgctgcttgcctactcccattctcgttactttgtttggtgtgagagaacgataattacatattattttaaatataatggatgttccattcagtaatgaaaaatatccggccgttgcactactaggatgtaaaaacacacatgttcatgggtgtatatttgtatcacctcgttgctgttgtgatgaatattttcctgaatttcctgaatatctggacgtcatcacaaatagcgtccatcctattttcctgaatttctcagcatttactacttacttaattacaataatatataataattacgataaataaaaaaaaatcggttactctctcaaactgtttaatttaattggatcacttaacccataaattattattttttctcattttactctctaaacttttaaaaataatttatgcttaatagcaattctccttttcattttctctttacacaagtatcattttaagctgaaccttttttcgacccatagatgataccccttcgtcacacttaatgcgcacacattttaccgataaatatttttattataaattaaattttatttgatgaaaaaatttttattggattgtcatttaaaattatttttatgtcattactattttgttgccaacattataatatagaaaaaatttaaagaaaagattagttttacggactgtgccaaatttgatcgcgtcttggcgagtgggacggagggaataccattatcaaaggttcaaaatatttgcagatttcatcatgattgtttgcttataactaagttttgatgcttaaatcaatcttgttttttgtaaacagtgataaaaaaaatttaagtaatgtttgagatgtaagttgtaaagcatataccaatgtacattatataacttatatatagaaagaaataaattattaggggttgagtgctcagacaaaatagtttgagggagtgaagtagacccttttttttaactatatttataagacacagtaccataaaactacctatttctctacttctttacctttttatttacatacttaaaagattcgtattgtttctgccgtcccacctgacaaaaatctaatctaacttagtctaacgagaaatctaatctaacttctgtcctattccctcccaaccccacctgacatacagaccaaatcacaagggaaatcaaaataccaagttcatgtactacctatttatttatattcctatttaaatttctattagtccaattcctgttcctatttcaattcaccaacgcaacaaatatatttggtacagagttgaacatgagacaaatataacatgtaactggtacaaagttaacaagaattcagaaatactcgtacgatacgtctctacagtacagtactccttaagtatattgtttcactatcttcacaattatgtctatcctagataaagctccaatcctgagatgcagtaacgaaaattaccatatgaattcatgcatcatgtttaccatgctcaaagtttacgcagtgaaagaaatcttcatatcgtatatcggatgagtgatttaagagaaaaatttatttaaagtatagaaggtaagaatatattttctatttgctaaggaagaatcgggacagaggtctctcgttagcaacaaaacgagagtccacttagcagcgatcgcccgtgtcacagtcagtaaccaaaaagaaaaaaaaataaaggaaaaaaaccgatcggttggcttcctttccttttctctaattgcgcccttctgttgcacgcctttggcattcacggcgtctcgccgaacaaccagtggtgtcatgctgcgccgagaggcattctgacagggttgattcatcaatcaatcaatttccatcgctgcactgacatgcttcgccgcctcaggcgggcacctagatccaggaccatccaaacccatcacgtagcatctcaccgcactgttagttcttccaccaattactccctgcctaatcactttgaatcttaaatttctgcctaatcacatgggatccgtcgcaatttaactttgcgattttcttaatcaagggccttttaatttgctttgcctaattgttgatgctgtcgaacctatgatattgatttatcgttgcaagaatgttgttatgcgccgcatgcattatgcagtgcagttcgatcgcccattgggtttgttcggctgcaacacagctatatatcaagcatagtaatttgtgtctgtactctgtagcaatggatcaaacagccgaacagagccatctgaaatttgctgtctttcttgtgcacaatgcaccaagaaaaatgctaattggaaataagagttgtacctgtgatgtaaactcgtgcacttggatggatatcatttttgcaaagatacatgtaaatattagatgtacgcaaactatagctctcttcatcaatgaatgttgatgtatttctatggtttactttcatcgtgttttccttccctatcagtgaggataaataaccatttatacaattttagtaagtttttgtagaagaaaaaaaagggggtaaacatgagttattgagtataggtgaaaagtgattgatagattaaaaaaatagttaattggctttctggcacgggcagtttttatagtgataataaattaataaaaacatgatttaagtcttaataatgtaagactataaatctcacaatatttttttgacgaaaactaaacagaatatagatataatctgtcttcgttatggtgattatcaaataatccagaaattatgccattatatgtaaataactgttccatagatactagaccaaagttggtcggtccaatcaacaatgtcatcaagcttaaaccaaaaagtttctaactacattcgaaccataaggtataatagtgaaatatgtaccttctgtgataaaattgatgggacatacataatttataatacaatgtgtcaaatctaaaatttcatgataacttttgtttgaaatatgtagttatacagtacaattgaaatatttcacatagttttatgtcaaaagtacttaattactcacaaaaattacagtatcttttactaggtatgccctgcctaaaagatatttgacaagttttcgtcaaacttataaattatgaatttctgaccatcgatactttctcaaatacttagtgttaaaaattaaataaatattgtacatagaattaccaagtagtatactcccttcgttttaaaataatacattatttttattcgtacaactttgaccatttctattagaatataacaataatatcaaataaaatagtaatattgtaaaagtacctacgaaggagtatttataattaacaaacaaatctacctatatttataatacttttagtcattgatggcaaatcaaaatataatccagtaccatctatagccatgaacgaacacgcggctgcaaaaagccccaaatttttgagggcccacctcggaatgagctaatccatctgttctaaaatataagagattttggataaatgtgacatattctaatactacgaatctggacaagatattatatggctagataggcctgctagggagcaagcgagaaacaaaaaaaaaagacagccctaggcgaacacgtcgcttctctcgcaactcgtggtaatcgcgtgcgtgcgtcgaggctaagacgtcacgactcctcgcaagtccaattcagcaattcccgactattgcacgcttgtgcctgcgtgcgtctagagagagcgaagagacgacgacgatgatgacatgacgccgagctacgaggtcgggagcagctagcgagcggcggtgggacgagccgagtgcctaagccctagcggctgggggatggctgtggctgcctttgccttcttgttttcctcttctcctcgtcctagactcctcaatcctcatcagccctgaattggtatttgaattaaattagtaatttgaccaaaagtatgccatatttatattagacatatgaatttctcaaaactcttttagagtgaaaaaccctctcacgtcgcactccccaggggcggctcgggaggcgacgaccccgccgcccctctcccccacccccacccccttctccgcctcgccgtcgcccgagcggccgccggcgaagccacgcagccacaaggacggcggcggcggggcgctcctcgtctcctcgcgctcgggcagcctggggagccgcccggagtggcgacggcggtgtccgccagatccgcgccgttccggccggatctggcaggatgggctggcggtggggaagccgtcggcggcggggacgggcgacggtggcggtcgaggcgagttgcaccgggtggtgttgtgggtgatggcggcggggatggcgacggcattggggtggcgatggtggaggcctgtcacaccccgaagttctttcccaagcctaaattgaagctataaatggtcttaagaaaatacctgtgtaaagcaagagtaaaccttaataaattaatgcaaataataatcggaattggcaggtggaatttttgttgagttctacatgccgaaatacgctaacaagatttttagtggaattttcagagctctagaaataattttaatcaattaaaattgagcacagacaatatttaaatccttggaaattcatttcttcctttttctttttctttttccttttcccttagtgggccgccggcccattcccctcctctctccccgcgccttgctgggccggccggaggccacggcccagctcagcccgcaccccctcctctctctcagggtcaccgacaggtggggcccacctgtcgggtcctcccccaacctctagccgctcgccgccgcgcctcgcgtccgcgcctcccgggccacgtcgtccacgtcgccctcgcacccgcgcctcccgcgcccacttccccctctctcccgctcgcccgcgctcccgagacggccgggattcgattttcgaatcccgcctctctctcctctcccactcccccacgtcggccggcgattcccgcctctcccggccacgtccggccccctctcaccctatttaagctccgccgccaccccctctctctttttccccatttcgccgaactctcccgagctctctatcgctcccgcaccgtgcatccacccgccgccgcctttcccgccactccggccgccgctagctgccgctaggctcgccgccgcaccgcgccgtcaccgccgtcgggttcgcgtggccgagatccaccccgtccacccctcctccgtcgaggttcgccgccggagcgccattcccaccgtgcgacggtgagagccgccatgtccaccgccttcggccggcgttcccgccttctatggcccctttctccctctctaaccttttccttttcgttctttaggtcgtcctggtccccgtccgccgcttgtcgacctccctctgtcgctccttgtcgccggtcatcgccgccccctccggtgaggactccctcccctttcctttccttccccgattccccatgcgccgccgccacccgcgctcgccgtcgccttcggtcgtcgccgccgccggggcgccgtccgctgccgccgcccgcgccgccgcttgccgtcgccggtggacgcgcgcgcgccgccgcccttgccatggccggccggccggctttgtgccgagccgagccgagccaggccaccgccgcaccgtccgatcggccccgggccgatccgggccgtcgatcccgtggaccggcggtggaccacccgcgtggtcccggtccacggtagaccgaccacccatgcgccgctgccatgtggggcccacttgtcggcgccgcccctctctctccgggatttatttattgcgcaataattcaattaaggatttttccatttatagtaaaaacacagtgaatcttctaaaattcataactaattcatccgtgctccgtttaagcccattcaagtctcagtaaatcaagaaaaatttgtagaatccattaaaaatggttttgttctatgtttcagtagtcttatagcctatttgtattgtttgctttgtatgtcgcttagattccagttcttccgacgctccggtgtacttcgagatagtcgccgaggttcctccagcagcagagcaaggcaagtcatgcttgtcacttgaacatgttgatcctatattgcaaatgctctattgtttttcttcaaatactgcatcgttttataatgttactatgggatgtttacctattgttacagccatgctattttggtaccatgttcctttgttagcttgggttataacatgaatagactttggactaggaattgcttagccatgcttagttcaactagcacacaatgggggaaatcctattaatgtttagactgtaggttctaatggtaatgttggattagtaccaccgctttggtgttgaataattaaaatgaatcacatggtgggctgtgggtgcatggttttgttggtcgcacccatggcagttaaggaccggttcgcgggatgccctggaagaacttatcgtacttaccacaagccagcgtgggcaacggctgggcttgttgtgtagctttcctctagctgacgcatccaggcaacggtgggcgtgatggagcggggcgggccctgcgacggcctctgtcgcttgcggattcacctaggcacgagaggggactgcccgctgccttgcgaggagtgggggtgaaacttgaggtgtggtgtgcttggttagagggggttatgcgaagggtcctgtcacggcctctttccggtatgtcgtggtggcatgtcggcgcacggaaacgtgtcgtggggctgtgtcttgtgggtacagttgtacacctctgatcagagtaaaactattcgaatagccgtgcccgcggttatgggcggtcaaccagattcaccgtgattagtctcaccctagtttggtctaatgaaattggatagtataggtggatggttgggcctatcgcaacgtggtatagcgttggacagtggatgaataatattgattaattattacaactgtttaattctttctacctctgtttataaatgctcgctttatgcaaatgaaccactctagctctcctttgataattccctgcatcatacccctattccggtatgacttgctgagtacagtgggtagtactcagtcttgctctattttccccaaccccagagtacgagtatgtgtcagatggtggtttctccgaggagtagcttcgtccgtgccgtcgagggtgcctgtggagtggtgttcccgctgcagttcaagtcaaggcttagctccagttatctttcgttttttcgttgcatttatgtaagacttttatgatgtttgtaagacgtggatctgaatgtcaacattgtcgtttgtgtaccccggccggtcctagatggggattttaatgcacattctgcttggaattctattcgggaatttctgggcgtgacaaggccgcggatccggcggtggcgcacccggatccggcggcggcgcggcggccggcggtggccagagcacggaggctccccgcggctgccactggcgtcctccggcgcccctctaggcatcagctggcgttggtggagaggaagacggccggatctggctccttgcccagatccggcgcgtcctcaggtgggaacggggtggttggagtccagtcgtcgtgcaggtggtgtgaatatcgcaggtatcctcggtgtgcaggtgccatttggtggctcccgtcgtggatgctatggttgatgggtgctccgaggtgaaagtcttgctccgctctcggtgctagcaacggcgatgcccttgggcgccgttcaccttcttgaaggcgttgctactggagccctcgttcaactccacttcaagagttttctccgggtgaaaacctagattcgttaggatcggacgatgtcgccgttgtcggcgtaatcttcttgaaggcttcgttttaggaggttatctcttgttggacggctgtacttaggttcagtttgtcaatgtcggggtttttgccggttttcctttaattaaccgtgctgttgtaaggtttttaggttcggtttcccttataaactggatcaactctcttcttctatagtgaattgcaggagctccctgcctgtcccctcgaaaaaaaaactcttttagagtctcaatttgtatttcattcgggtgcctccaaaatcctaaagatggccttgatatcatttgacttgttagattttataaacttatttcaatatatataactgaatgatggaaatcctgtttcagatacacaaacatgaaatgacttttgctttttaacaagtacatcttccatttcatattatataagtagttttgattttttttccaagtcaaacatttttaagtctaataaagtttatagaaaaaatataataaaatttccaacacaaaacaaatattttataaaaaatatattcaatgatacattcaatgaaactaatttagtattgtagatgttgctaaacaattttataaatctaatgaaacctaaaatagttttaaaaaatcaaatcgactttaatatggaagagagggagtactgcagttataacacccttaaatactaatgaggaatcatttcttctaaatatggtcacatcaacatcggtgaaaagacaattgtaacacatagagcataattgagaaacgaacagaatgttgtaattgagagatttaattttacctagagaacattgaagatggaaaggtcatttgagattgcaattttacctaatcccattatctttcactttccattgtcaccaaagaagatgttgtcttgtgatgcaccttttggatcaagggaggataacattgactcttctctggtgcatccgctatcaatcacccaacttcttccaccagatttgtattcctacaagagatttctagttttagatacctagattacttgggtcctctcatgttagtaacaagtgtgttaggcacccaaatcactctctttatagaaatatttttgcccctagggccaacatacttggccacaacacaaccattagcctattataactctaaagtgcctcaccttattcaaaacaagggttctttttggtggagagatgttatctgttatgctgatgtctttaggtctattgcccaatgtttggtgtactatggtaactctgttacttactgggaagatctatggaatggaaatattagatgtcaagagtatggttctttatatgctctagccatgaataaaaccgattcagtgaaggatgttgtgtttaaggaatttgaagactgttttcaattacctctacctctttcggctaggggttaccaagattttctgatcttaaaagatgagctaaatgttttaactctaagtcattgggatggggacagctggtcttttatctggaacaattcagtttactcttcacagaagttttattccttgaactttgtaagccttttgttggcaactttttgtgacaagttgacaagtataatcgcagcacccaaagctttgcggtgatcctagagtcgccaaccacctcaatctagcaaaagctaaatcaagatgggttttgataaactaaaccggctagcggagccgatctagatagaacgatggataactacccgtctcgtgggcaaaacgggaggttttgaggacaaacctacaaagaggtgaagcactctcgcagcggcgacggacgatttacagcgcaagtcgacaaagatagacaaactaaactagaattagaagtaaaagtaaaagaacgattcgactgattgatagttggttgagagattacaattgaaccagccatgtcccttatatagaggttggtcttgccctctacaggccctcctccacgtccaactcgggatagaaaggaaacctcgaaacccgataaaacagactcgggctcggactctgccagtcagaccggccacacaccgccggtctgactggcccactgtcggcggtctgaccggccgacaaccagcggtcagaccaacccaatcagaggaaaaccgacaaacttctaaactttgtcaattttccctattttattcctatgtgccaaatttaggtgtaaacacatgcccccctggctttttgacgaacaacgtgaatctaaaagcatagagcatgttttttggtcttagggcgataatccaattaccagccatagaacctcctaagcgtcttgccaaacgctcaggaagtatttcttcgagtatttcccattgattgctcgctgaaaacgccttgaagtgtctccaaaaaatatgcgttccctcgaacaataccgcatactagataaggaccctcccaactaggatcgggtacccaaaggcaaaattgtcttccaaaccaagtctccaacttgaaacaactttgctttcacccttttgttgtatgccttggccaccctcttcttctctttctgtatctcctccaaagccttcaaacgcttgtcgatgacttcatcaaggttgtctcccatcaatgtcttgtaatcttcacttgacaaatcatcttgcctgatataacgaagagaaccaagatttacttcaaccggtaaaacgacttcttgaccataaaccaactcaaaaggagtgactttagtagcaccatgtttagatatcctatgcgcccacaatgctttagaaagcacctcatgccacttctttgggtgttcctcaatcttcttttttactagcttcaacaacgtcttattactcgactcagcttgtccattagcctgagcgtagtaaggagaagaactcaacaatttaacaccataagatttggcaaaactcttcacttccttagacataaaacaagctccttgatccgtagttaatgtttgcggaataccgaatctatggataatatgcttcaaaataaagtcaattacctccgtatgagtcatattcttgagcggcacggcttcggcccacttggtgaagtaacccgttgcaactagcacgaacctacgcccctttgatgacgaaggataaatttgaccaatgaaatcgaaagcccaacctcagaacggccatggtttgatgatagggttcaacacggtggcgggcgccaattgaacattgccgaaccgttgacaagcttcgcatcccctataatatttgaaacaatcttcaatcatccgtggacaatagaatcccgctcttctaagcaaccaattcatcttatgggccgattgatgagttccacaaattccttcatgcacctctcctatagccactttagattgatcatcatctaagcacttcaataaaactccatcaatattccggtaatctaaatcttcaagcaatgtatatttgaacgcttgccgctaaatcttccgatcaaccttaagtgcaagatctttcaaatatctaatcaaaggaattctccaatcctcttttgtttcctgggcacaaacgtccgaatttacaattaatttggcctccgtttcgaatgaatcatgcccctcagccttctgtccagaaccggtcagaccggccgtgcaaggctagtcagaccgcccagggtggccggtcagaccgccggtatacagccggtcagactgcctctggtcaccggtcagaccggccgtgcaacctggtcagatcgcccttggtctgcaattttgccaatttcgctcaaaggtttaaaataagcaccggctcttctaatataaaaaatactcccctcttcacattatagccagatgcttgctgtgcttagtcatttgctctagaattatcatgcctagcaatatgtctaatagcaaaattatcaaaattggcaataatatccgagcattgattaagatgcctatttagtgatctgtccaagaatttgtaagctccggcaacttgttacaccaccaattccgaatcaccaaacgcttccacgtgtttagctccaatcatctccatcacttgtaagacgaataataaagcattgtattcggcttgattatttgtacaataatattccaaacgaaccgatgcctcagaagacatgccattaggtgaaaaataaaactactcctatgccttgactctctttgcaagaagaaccatcaaaataaatcttccaaggtataacttcaaccaagcaaacctcttcctcataagcaatatctacatgatggtctactataaaatcaattacaatttggcctctcatagatttcaatggttcataagccaaatcatattcaatcaaagcatatgcccacttgccaattctcctacttagaattggcctttgcaacatgtgtttaataacatcggcttgacaagcaactatgcatgtactagatactctctccgtcccagaatataagaagttttagagttggacacggttattaagaaagtagatagaaatgagtggtggaaggttgtgattggatgagtagtggaggtaggtgggaaaagtgaatggtggagggttgtgattggttgggaagagaatgttggtggagaagttgttatattttgggacaaatcctgagggctaaaacttgttatattttgggacggagggagtaacaaataatgccgcaatttggtaaagcgtagtatagacataaacaaagtctcactatgaagacatacctcgcttcggtatccaaaagacggcggctcaaatatgtaatgatatattacttgccatcttcctcttgtgtcaaaacggcaccaatgactttgttttcggaggaatatataaccgaaacggcattccggctttaggcactcgcaccacgggtggagtagacaagtacttcttcaacccctcaaacgcttcttgttgttttgcccccaagtaaaattagcttcttttttcaagcgaagtataggaataaaggcatcgattttacccgctaggttagaaataaatctcatcaaataattcacctttcctagcaacttttgaacttctttcttgcatgtcggtgctttgaaatcatgaatattttctatcttcttaggatcaatctcaactcttctctcatgcaccatgaattctaacaacttccccgccgacacaacaaaagcacacttgagtgggttcatcttcaaaccataccggtgcacaatctcaaaagctaacctcaaatcggccatatgtccctccataccatccaatttgataacaatatcatcaatatagatttataagataatacctagcaaatcatggaagatcaaactcattgcccttttatatgttgcaccggcgttcttcaatccaaaagtcataaccacccactcaaataaaccaacaaatcccgggaacctaaaagttgtcttgtacatatcctcttccgccataaagatttgattgtagccggcattaccatccaaaaacctaatcaccttatgacccgatgcatcattaatcatcatgtcggctataggcataggatatttatctttcggagtagctttattcaaatctctaaagtctatacaaactctaatcttaccactccccttcttttccaccgggactatactagacacccactctacatagcgacatggcctaataaaccccgcttttaataaccgatcaatctcctccttgactcggtcatataacaaaggattgaaacgacgagatggttgtttataaggcctaaaacccggtttaattggaagccaatgctcgacaagatcatggttaagacccggcatctcatgaaacttccatgcgaagcaatcaacatactccttaagtagctcgattattttaaccttataatcggctctcatgtttttgtttacaaaagtcggccttggcttagttccatcacctatgtctacttcttccaatggatcagccgatgtaaacccttgaccaagcttttctacttcatcaaaatcttcaatagtttccccaatatcattcttttgcagccactctaaattagcttcttttctcattatacaaagtgatatggcctagccgtgctaaactaaccggctttacagagataggtacaaatttgccattggagatactaataaaatcataactagaaagattcatccccgataagcattgaatattcccatgacgccactcaaatgttgcatcggcccttgcaacttcggccgatgtatccgcttgaacaatttcaataccatcgctgtcccattgaattaaatattgatgcaaggtagaaggcacacaacaattggcatggatccaacaacgacccaaaataacattgtaattatcttgcacatcgacgataaagaaagcggttggcaacgtcttgttctctacggtaagctccaccgaaaagatatcttttgcctccgttggttcaccattgaagtcattgaaaatcatattagttttcttcaactcattatctccacgccccaacttcttgaacaacgagtacggcatcaaattcacggcggcacctccatccaccaacatcctagtgatcggcttcccatcaatatgacctttgagataaagaggcttcatatgacgatttgattcatcgggcttctcaaaaaccgcatctttaggacctagtaaaaattgagcaacctcggcttcatccatagcacaaaactccataggcaacatacacaccatgttgaccttcatatcttcctttggagatgaattatacttagcaatcgattgttctcccttctccttttgcacaacaaccgattcttcagcttctatggatttacgcctccacacctttgtacgcggtggtcgcaactcattgaaccttctatttctttgctcttcagcctccctctcttttaattcttgggcccgaagacgttgcaacctcctcttttgggtagccgtcaaatccttaggcatccaccttggtttcggctctgttccaggaggtaaataatgccctctgttgattttatttgaagacgacgaagccctcgagctaccctttgcaaatctcctatcaaaccggcgctggagtgcagtcaaaccgggcgcagacttttggtcagaccggccagaaacacctgtcagaccggcctgtggctggcggtcagaccggcttgttggcccggtcagccagagggcatggtcagaccggccgactgcgatgaactggtcccagctttggatttgttgcttgaagactctccaacttcatctccaaaaggtattagcacatcatgagaccccactttgatagtaatcacctccgaagtcctcgtctccaccttagcacgctttccttccctctttccttcattgatccgatttttagcataaaaccggctattgtttggtgaaaacaaacgctcacgagctggtctccttggtcttccccatccttggttgtattgcattggaggcatatgattgaacattggtggcgttgcccccatggcatgtagcaaggaaaagaataacccggtggcggcattggataaggcccccatgacatgtcttgagaacgatgatatgtaggtgattccgaccgtcttggtgaataaccaaatcgctccctaggaggtgatcttggtctttttcctttattgcgagctttctcaccagcttgcctctcatacttgtccaaaagcatatcgaatgtcaccttagttttcttaggagctttagaacttaaagcttcactcctattctccttccaaacaccaaccttcggattctttggcaccatcatctttggcctaggctctccaatgaccactccttttcccttagtagattcggcttgctctggcagaatcaacaccttcttatcattgaaattaattgtgttcaccgggaaagaatcatgatcaagcttcatcttgaaaccatcagtgaatttcaatcgtctgtcatctatggccgattgaacctatcgtcgaaacacattgcaatcattagtagattgagaatgagaatcatgccatttacaataagctcgacgcttcaattcttcttgagatggtatgacatggtctttaggtaatctaatttgtttttcttgcaaaagataatcaaaaatcttatcgcatttggccacatcaaagctatatttaatctcactttgccgatctttacgaggagtcggcattaaattagaacaaacaaaaggcttatttttgttagtccatgacaacttagcaacatacatatcatgatcaccctcatcatcagaatcactagtctcaaggtaatcaatcaaattaacattaggttttttctcaaatggtctaacaaatttcttactatctttaacccagcctttttgagccagagccttttgcatgagttgactaacatcaagaaattgttgtccttctaatttttctttaataagagcaattaaaccattaaaagcaaaatcaaccaaatctctatcagttatattcaagctgtaacatcggttcctaacatccctaaatctcttggcataatcaaggacatgttcattgtatttttgtctaaccaatgtcaaatcacttagcctaagttcagtctcaccagtataaaaataatcatgaaatctttgctctaattgaggccaagtatgaatggaatttgctggtaaagaagtaaaccatataaaagcagtaccggacaaagataaagaaaacaagcgcaatttaaaagtatgagaactactagcctcaccacatttgcgctaagaactgacctacatgctcccatgtggtcctactatcctcaccactaaatttggtaaattcgggaactctataaccacgaggatatgggatattgtcatagtaatcaggatacggcttttggtaaaccttagcacgattcctaacttcaatcccgaatttatccctaataataccagcaatcaattcctccatattctcaggcctatgttgatttggtggtgggtttggtggcctaataggttgtggttgtagcgcaatataattatatttgccatatctagtatcgggaggatatcccctagtaggatcattgtaaacattaggaatatgtgggggaacttggggattaacaatagatacaggggaatcatgtactggaatatggtataaaagcccgttatttgtcattgggtctaccccctgaatcaggataattgtgtcggtttgaccggtccagggcccagtctgaccggcgtccagaggcgcggttagaccagtctgaggtccggtctggccgcagggaggaaacccggtttgaccggccagtggccggtcagaccggtggcaaacgcgcggtctgaccggccatctggcccggtcggaccggttgattgcgttgcccatccctcaccggttgtttgcatactcgccccgtcggttttgctatatatttgatctacatggggtttgctagtactagtagaggctttatctttggattgaaaattggctaagaaagaaccgaatttattcctcaaaaaattatcaaaacgagattcgaaagatgcatctatcttactatttaaagcagcaatggatgaatctattgtacttgctacgtgttgttggatagggattgatacctcttcagtacttaccacattaaaattaggtttaagcaatggtccaggcttgagaaccacaccttgacaggtcctggtgcatgatctcatcagtgcctcccgcgtgatcgccttaatgtactcctccatggccttgcatgcttccccatcaagatcctccaatgagattggcatgatattggatggttccacctccgacttggttgatggcggctttgtcatggcggcgtcgaagttgagatgacattgagcaaatttccccagcggagtcgccaaaaattgtgttggcaactttttgtgacaagttcacaagcacgatcgtagcacctaaagctttgcggtgatcctagagtcgccaaaccgctttaatctagcaaaagctaaatcaagatgggttttgataaactaaaccggctagcgtagccgatctaaatagaacgatggataactactcgtctcgtgggcaaaacggaaggttttcaggacaaacctacaaagaggtatcacactctcgcagcggcggcggacgatttacagtgcaaatcgacaaagatggacaaactaaactaaaactagaagcaaaattaaaagaacgattcgattgattgatagttggttgagagattacaattgaaccggccatatcccttatataggggttggtcttgccctctacaggccctcctccacgtccaactcgggatagaatccaaaggaaacccgaaacatgccttcccgagctaggaatcctcgaaacccaacaaaacagactcgggctcggactctgccggtcaagccggccacacaccaccggtctcaccggcccactgtcggcggtttgaccggccgacaaccggcggtcagaccggcccaatcagaggaaaactggcagacttccaaactttggcaattttctctattttattcctaggtgccaaatttgggtgtaaacacctttctcccccaaggtcgttctcctggatttggaaatcagaatgtgttaacaagataagggtcttcatgtggctgttactctgtgatcgcctaaatacaggagatatgcttgacatgagaaagtgtgcaaaatagaatgatgatttaacatgtgctttgtgtggtttagggttaagagaaacgagagagcacctctttttcagctgtccctttactgaagcttgctggcataaattgggttttcattggaattacagccttgaattgaatcaaatgctatctctggcaaggtcagcttttcaaagaaatggattttttagagatcatctccatcgcctgttggcacatttggaatcagaggaatgttcttattttaagaaatattccaccttcggttcagtcttggcttaggtcttttaaggaagatgtactcctgcatttctgtaggatgaatggtccccttttaaattcagtttcttcctggttacaaactttgtaatatctgggactgtggttttctccttgtattttttttttgtatattttgattttgctttaataaattaaactactgggcggtgcctggtagtattttggacaaaaaaaacacaaccattagcattcttcctaagaacataagaagcatcaaatgaatttggagaagcacaatcattaggaatgatacttttggccctaacaaagttgctaaggccttatggcttgttaagcatcacacttttgtccaccattcccttaggtggagggacatacctaagaccttcatgagtgtagttgtccctttgatagcctaagtactccttgagagcctttctacccatgtggcacttaagaaggccattgtggaggagtctcataagcttctcatttttcttagtcaatgcactcaacgatttggagttagtagcacaagcataccctcacaccttgagcatggttcattgcttgagcaatgtaggaacaagatgcctcactagggagagagacactagtatttaaggtttcaaacttttcttcatgggagaggtaggctttgttgaagctacccgctctctcttggagatgtgagtttgccacctcaagatgagcatgagattctttggtttgcttataaagtcgtaccaaagcctcatttctctctctccttagtaagttcaaccttgaattcacgagtctgctctttctcatgaatatgcattagctcttgcttctcaagggttgcatattgttgttcaattttcccaagcaactcgctcaagtgtggcaaatgattccttggttatggacttgaacaagtcctcatccataacatcctcttccccatcactcataatatcaacactgaatgacttgagtggagaaggtaccttaggctcaaccatgagacatataggagcgttgtcatcactcgagtagttgaagagccttagtgtaggagatggtgacggcttgatggtgaaagtggccaattcctcttcatcacttgagcttgaaccggagtaatcggattcaaagatcaagccaatgtgggcatgaactttcctttcatgcttaccgtgcttgtgcctctccttcttctcacctttctaatcttccttagcgttggggcaatcggcgatgaaatgtccaggctcatgatattcatagcactttcttcacgagtgtcttccacttgacttgtcggaagacctcttggaagaactccctttgaagaagctgcttcttctcatgaactttccaaacctcttgacgaagagttccatctactcatcttccttgtccttcatgttcttgtaactttcttcctcttcttcttttgccttcaacgccaagtcttctttcttgatgcttgagattgagctttggtagatgtactgggtgacatcattggactcttgctcaagcatgtctttggcaagaatacgcccgagcatatcatgagtgttggtatttcttacgaccacagataaatccgcaagcgcacggaataccgctgtagcacttcaccttcgggtgaccccaaaaagatatcgaactcagggaacgtgtgtaatctacctaaggctaagactatctaaggacaacaactgatggtaggcaggctagagaggactttctatgcgtcttaattatctaggctaagcaaaggtaatttcctatctattgcttcgggcaccgacgcttgctggtctgccagcgtggttccggctatagctctatgatgtatccgaacgtggaggattactgggacagaattcagggctgtcaccacctgccgcctacctctgacaaatccgtgggatagacaacaaacaaaggtaatctctaacctagacaccacgtctaagttattaattactactctaatactcgtacaggaacttccttctctatccaaagtcctagtactagagcacttagtatgaatactaagcaatgaacccgcaaagatggaaacctatcttacttagacaaagtaattaaataacataagaaaggaacacgaatgcttactttatagaagaagttctccgaacccagagcaaagtgtaccgacaactccggtactcctccagaattccccctatgaagctacactcgttgaggtagaagtcggatgagcgccaaacttccggacactcctacagagcttctcctcactctctaccttattctaatgtacaaatgatacaatagagcctcttgtaattcagctcaaagttgtgtgacttggaaatgagaaggtgacctccttatataggctccaaatgacggttaggggcatgggaaatgaccaaaacaccctgcaaccgtctctaggaaggaatccaaaccgtccacgtggaagcagatggttgcttcggctgaacccaaaaacactcctcccggcctctccttcggccgggaggttgcttaatgggtccccaacaacctaggctatgttttgtcctaattttaaatggtttttattaacttattgggcctccaatccatgtaaacgcgtcctgaatgcgcggaggtgcattttgtgacatgacggatgtgttttctcctcaaattacctacatacacatatttcaccaacactagtggaaatgattagtaataatccctaccactaagttggataccatgttttatttcattatatgtaggtattgactgttaaatattatgatttaaggaccgtcaacaatgaggcgtgagattcttgtagtctggactctcacgtatgattgtcaccaaggtagagttccttggtgtgatggctcggatcattttcttgaccacaacttcatccatcatatctcatctagcatgacaaaacctctcgacttatcccttcaagatctccaccttggactcgcggacactatccatggcttcatgaacattctgaagtgtgtaccatatctctttggtactctctatgccatccactcggttgaactcactaccgctcaaggtgctaaatatggcattagcggcttgagcgttcttgtgttggttcacgtcgtcctctttggtgggatcattgggattctgtaaaatatagtcattttcgactattctccaaatagaaggtcaatagatttcaagtgcatctacatcttatgtttccaagaggcacaatccgtaccattgaagtacggagctttgccactataggtactcacatatgtagatgtagaggagtagtcaaatggaatttcggttccgtttttggaaacctccttttggtccccccttttggcccgacatgatctcttcaagaagttaaccctaataaggagattaggctctaatactaattcaaagggtcacttagcctagagggcgtgaataggctaaataaaatgaaaaccggaagctaaaacttaaaatatgtcggatagtctgatccaaggtcggacagtctagtgcaaatcagattgtttgaagagggatcagactatttgactagcaggggaacgctacaacaacctatagatctaccacacaaacaagagtataagcacaaccagcaactaagttatagcggcacaacaaagcaattagtagaggaagaaggagaatgaatatcatcgggatttcatgctgaagtatttcccggagttcaaattttttagggtattctactctccgttcagaggctcaaaaagagccgagtcttttccaaccctttttctcttgaggttgcacaaatgcacacctccttccactagaggtatctcttttcttgcgggggcgagatccgacctttacaaacttctcttggctgaccacgagtagatcggtggctcgagagcgacgcctagccatctaggagtcatcaacctccaagagtaacaaacacgacacaactcttggacaaaccctagtgctcaagatcgagtgaaatacacactaagcccccacacaccaaatccacaaccaccaagatccaccacacaaagaacgaggagggatttaaaacagggagaaagagctcaaagatccaaagcactttagtaccaagctcaacccaaagtgaatgagttgggtagccctagaatagggttaggtggcaaattactctcaaaattcatcacgcaagaaccaatatgcaaacaaattgagtaaatcatagggcagacatacagcttataggcaggattgtaaaaaacaaacaaacaaacaaacaaacacacacacatccatccatgagagagctagaggggttcatttgcataaagctagcatttaaaagcagtagttgaaagcagtaaaacagttgtagtaattaatcaatattatccaatcactgctcaacgctacaccacgttgagacagacccaatctaccacctgaactaaccagttccattaagctaaactagtaatgatactaatcacggtaaatcaggttgaccgcccataaccgcgggcacggctattcggatagttttagtctgatcagaggtgtacaactgtacccacaagacacaaccccatgccacgtttccgtgcgctgacatgccaccatgacatcgaaaagaggccgtgacaggaccctatgcataaccccctctaac

SEQ ID NO: 20670 - DNA, 1574 bp, Oryza sativa
tatggctgagaacagtaggtaaatatcccatacagtatcattataaaacaatgcataatttaaaggaaacatagggcatttgcaatatgggatcaatatgttcaagtgacaagcatgacttgccttgctctgcagctagagggacctcagcgactatttcaaagtacaccggagcgtcgggagagccgaattctatgcgacatacaaggcaaacaatgcaaacaggctataaggctactgaaacagagaacaaaaccatttttaatgaattctgcatttttgttgatttactgagacttgaatgggcttaaatggagcaaggataaattttctatggaattttagaagattcactgtgttttattactataacagaaaaaccctaaatgaattattgcgcattaaatagccctgaatgatgtcattggagagaaaggaggcggcacccacaggcgggccccacatgtcattggctcagggtgcgccggtccacggtagacaaagtccacgggaccagggaagggtggcgcaccacgtggtgcacacgtggcgctgacatggtggccacatgggctgccacgcgggcggcagatgggcggccgcagctcgcgcccaggcgctcacgggcacagctcaagccggcccggcggccatggcgatgcggcggcgcggcatgaagcagcggcagcgcggggtcggccaccggcggagagcggcggcgatgcggcgacgtggagtggtgctaagagagggagacatcggtcctcatcgaggggttcgccagtgcggaagaaggcgatgacaggcgacgggatgtcgactagggatggcaatttcccctgcggggccgggtcccatgcggggacccgaccctaagggggcggggacgggttcagtttttgacccgcgggagaggcgggactggggccccgcatttttgcggggaggggacggggaggcatttcacccgcggggccctgggggtgtatattaaacctcaaaatgtagcccatagaagatccaaaagagcccaacccaacaaaattcttagatataaaattaaaatcctagcattatctctccatctcccctctcgtcaccctctcggctcaccacataggtagaggcggcggcggcgccatcgcgccaggggcaagggcgcggttgagctggcaaggacgagggcgcggttgagtaggcaagggcagcggcgtcgacggccagggcgtgggcgtgggcggcggcatcgatgaccaggcacgggcggcggcggctgccagggcgcgggcggcggctgcggccagagcgcgggcagcagcatcgacgaccaggcacgggtggcagcggcggccagggcgcgggcggcggtgtcgacggccaagcacggcgacggcggcagtagccatctgcgggccgtggcggcttgcctcgtcgtcttccagctcgccttcctcgtcgccgtacagctcgccgtcctcgtcgccgtcgtccagctcgtccaccggcatagccgggtagtgcggggccccgctcacccgccgggtcccctacagaaacgggggtcggggggagaa

SEQ ID NO: 20671 - DNA, 9504 bp, Oryza sativa
aaggctcgaaaggttgctcttggagaggatgtgaagacactgcaaaagaagaataatgatgcaagcacttggaaagaggaaaataaagaactgttcatgtcactgaatgaacaagatgaaggtcccaaggagtctggctcacagggagttgctttggaggggaaggaagacctattctggcagcaagggctgctaatcattcaaaccatataccatggtgctacaaaagctcttccttcaagcttaaccttgcggaagaaattcttagagatattgagtagtgttgacctagcacattctgacgaactgaaggtagaggtcatggatgacctgaagaaagagttctctgacagtgaggactactgggattggcttgctaggcttcagcttagtgactcaactagttccagtaatttgaatagaatggaagctttatcaaataaactgaataaatcaatacaggtaaaaactcattatttggttatttttatctgtcactcaatcttgcctgctttctttgggagaaaaaaaaggttgttgattaatgcaacctgccctagacttacgaataatcaaactcaatatttaaacatttcaaactacgttttttgtattgtaggtgtatgatgaagctgtcaggaggttgccaacttccagaatgtattccctgtatgcaaaattttggatgggtgttctgtttgctgatacagaagattccatctcattgtttcatggcggtgaatttgatgcttcagggttcacttcatgtatactgaaagtctatcaaaatgccgaatcaagcggttgtcttactgaagatcttgcttgccaatatgtgtctctttatttgagacttggaggtttggaggaggcacctggaagattagaggaagctaggaatcttgccaaaaagctctgcaatggtcctctttcacatgctgcggatttgtggaacctgagagcatctattgagatgaagtcacttgctacttctactggcatttcttcgttcagcaaggagaacttgagttctctatttgatctatttaatgttgcacttccaaagttacccatacctgaggctgaggaattgtggcacacggtatagacccttctcgatctcttttactctcatgtgttatctctgaacttgtttcacaaagttttattctgctcctctattttcactgtgattatggttcatcttttcttttgttgatttgtttcttttacctttaacgatgcaatgtatttatataatagttccatggatgtattaatgtgtttgactgcttgtactaatttctactatctgtaatgggcacaatgcattacttcgttgcatatttgttcaaaagcttgttgtaattcatttcaggccatgaaattgttttctcatgagaaggtttatttcgaaaagctggtgaaatgtgcaatgttatcattaagttctgctggtggaaatgattgtggagcttcggtttcttctgctattgttggatggattttacaaagagatggtatcaagcaagctagaaagatgtataagaggtatgaactttatggtccttgaatgaaatatcactgtaatattgttcattgcatgaattgaatttgctttgctgcaagatttggagtttttgtctattaggcaagtagtgttgtctttgaaactgagcgaagcgtgctatgaattttcattgcacattccatgtttcagattctgccttttgtgtatgaactataagtgcacatagattcttctagaaacatgtgcgggaatcaattcatatgtattgtttgagtaagcatgtttctgacacctctgcatcgatgcagatttctggctttaccacgtccaagcttcaagttcttccagtactgcatagagttggaaacaaaccttgcatcaatcggaaaccaagacagccttgtgaatgctcgtaagctgtatgatgcagcgctcgatctctatccccaggaaagagaactttggaggaactactacaacatggagctgaaggtgagatccatatcgcttgtttcctcatccgattgttcttttaatcgtgattaagttccttatctgtattttatttgctgacattacattgaaaatgcacatgggcagttgggaacatcagaaacagcaaatgctatatactggcgcgctcgtaaggtgctcggtgattccagtgccctggacattccccacagctagcaatgtgtgacttgtgtatcatgcaatatcatttttgatctgatttgattactttgttgtttaagcgtatcaagtcaagtagcgcggtggaagaaaattttggctagtctatctgttggatttgtgttatgagcccctaactagggttaaaatttgcatgctctgtatgattgccgattaaaagcttgtacagatacggcgatagtggccgatccccgaaacatactactagctattggtgtttgtgtcaatttagtttgtgccaagcttgccttgacaaagaatttatcatctactagtccagttgaatggttaagagctgacgtagtgatgatgacggaatgcatactgctgtgttggtctggaaatgctccagcttgtcaggcagaaaagcaaagtatccagctgcacggggcgccgccacgtacgtgggtggcgaagggcacccgtccatgccgccgggggccagacacgacggcgatggcggctcctagtgtgctctgcagccaccccaccatcaccgtgaagctcctccggcgaggacacaacatcggatgagtttgtgcacaagcgtctaccatgcatgtttaaacaataataattctgcacgattatgataattcaccaatcgtaaaatctttctaattattaacacgaggtcagcttctttagttagtagacttgtaggtacataaatgtttacaagttgctaaaactaaaaaagaaatcatacatgtaatgtagagttgttctctcagttaaagtgaaatcttagtaatttggcggtgccgtaataatgtagtgcagttttcaacaaccaaaaaaatcgtctaaccaaatacatgtcatcctcttgtcttctaaagggctatatatattcttggtctttgatgctttcatacgaaaggagcatgattttataagtagtagtgctacactcttaaattcataggaattctaagggccctttaaatcgtaagaatgaaaaaacagaggaataggaaaaacacaagattctgacaggaatacaattgtaaaatagaggattgcaaaacacaggaaaaacacaggaatgactgtttgattggaacacaggaaaaacgcaggaatcagatgagagagagagagactcagaggaaatgttccaagaggttagacctcttgctaacttttctccaaaatgtgcataggattacacattctatatgaattttaaaggattggataggattcaatcctttgtttcaaaggccttcattggatttttttccataggattgaaatcctccaaaattcctacatttttcctacaaatcaaaggggccgttaaaatcagtagctagagatgttatattctacttttgaatggtgtagttcatatagacattaattagttacatactagttcatatagatgtttgtatttgatacggagtactttagttggatatggttaagagggagatagagacttgtcctgtaaccgtgagtctttctctgtttaaatttcaaaacttatcggttgcttgcctattggtagatgttttactattatactccctccgtactttaatatatatatgacgccgttgactttttgacaaacgtttgacctttcgtcttatttaaaaaaaaatttatgtaattataatttattttattgtgatttgatttatcatcaaatgatctttaagcatgacataagtatttttatatttgcataaaaaatttgaataagacgagtggtcaaacgttggttaaaaaatcaacgacgtcatacattaaaatacggagggtagcatttattaacatttttttaaaaaaaaataaaatcgtaatgtactgaatatgtaacttcatctgcttagaatattcatcagaatggaagtagacagaataagagaaaaggcccataaacaaaaggccggccctatcacctatgcgccgagaggtggagctcgccgcaggcggtggctgtcgcgtcgcctgccgccaccgccggacctccctgtgaccccgtgagccgtggcgcctggaggctggagagaggaggggagagagatggagagaggggagatggaaagggaggaggaagaagataagggggggtatgacatgtggggcccacgtggtcccacttttatttttattatttgatgtgtgaaaatgacatgtgggtcccacgtgctttattatttttccggatcgaattgccgcgtaagcgctacgtcagatgaataccgagttaaattagccacgtaggtgccacgtcagccaaaaccgctgagggaccttgtttgcccggttttcgtaagttgggggacgggtcgtatccggttttacggtcaagggacgaaaatcggactgtgcgacaaatagagggacccaaagtgaacttattgctaggctaaaattgggtggcccatgatcgaatagtactagtactaagtagatggagggagggaggcgcgcacgggcaccacaagctcgtcacctgctttctcttccactcaatccaatcctctctctctcttttccaatctcaattactacaatcctctcctctcctctcctctcctctccttcctttgtcgcgagtcacaggcacacagacatggccgccgtgaacacagtgtcgtcgctgccctgtagcaaagctggcgccgccgtagccgggggagctccgaggccgtcgacctgctccgtattctaccctcctcgttgctggtccaagcgaagcagcggtaatggcgtgcgggcgcaggcgtcgacgacggagacgaccgcagcgccggctgcggaggtgactactaaggtggagaaggtgtcgaagaagcaggtggatggcgtggtgacgaacaagtacaggcccaaggagccgtacacggggcggtgcctcctgaacacgaggatcaccggcgacgacgcccccggtgagacgtggcacatggtgttcagcaccgacggcgagatcccctaccgcgaggggcagtccatcggcgtcatccccgacggcatcgacaagaacggcaagccccacaagctccgcctctactccatcgccagcagcgccatcggggacttcgccgactccaagacggtaactagctagtagtgtttttcttgctccatcgatctcaaccacaagacatgagctaactaacatcgacatcgtccctgatcgatcgatcaggtatcgctgtgcgtgaagaggctggtgtacaccaacgatcagggagagatcgtcaaaggagtctgctccaacttcctctgtaagctaggagtctgatcatgtaatagcagttagattgtacttgtgtgctaattaatggagtataatttaggtgacctgaagcctggttcggacgtgaagatcacggggccagtggggaaggagatgctgatgcccaaggaccccaacgccaccatcatcatgctgggcaccggcaccggcatcgcgcccttcaggtccttcctgtggaagatgttcttcgaggagcacgacgactacaagttcaacggcctggcgtggctcttcctcggggtgcccaccagcagcacgctgctgtacagggaggagttcgagcggatgaaggagatcgcgccggagaggttccggctggacttcgcggtgagccgggagcagacgaacgcggcgggggagaagatgtacatccagacgcggatggcggagtacaaggacgagctgtgggagctgctcaagaaggacaacacctacgtctacatgtgcggcctcaagggcatggagaaaggcatcgacgacatcatgatcgacctcgctgcaaaagacggtactgtactagtacttcttttaatctccatctctattcgattcctaattactttctttcttgcattatatactgtatgtaggcatcgactggcttgactacaagaagcagctgaagaagtcggagcaatggaatgtggaagtctactgatggatatatatatgttaataattaattaatccctttttatctcgattttcatgcatgcatgcgcaacctgcatacgccatcttgttgtactcgatctgatctcatctgatgagatgcatgtagatattatactgacgattcgtcgactataaagtggtttcccattttctgctgtattttgacaactttagtgtcccatttatttattatatatgcgcatgtgaattaaaatgactgggctgctgcattacaatctacaagtcgcgagcgtgttgattgggcccatccatcatcattgaacggcccaccagaaagcctaggcccaatatggcaaaaaccctaaggccgtgtgcgtcacccacctatataaagcggaaaacgccactcgtctccttcttccttcttcttccacgccccgcatcgccgccgccgccggagagggagagagagagagagagagagagagagagagagcgagagatgaagacgatcttggcttcggagacgatggagatcccgtcgggggtgacggtgcacgtggcggcgaaggtggtgacggtggagggtccccgtgggaagctgacgcgcaacttcaagcacctgaacctggacttccagctgctggaggtggagggggtgaggaagctgcaggtggacgcgtggttcggcacccgccgcaccatggccgccatccgcaccgccatctcccacgtccagaacctcatcaccggcgtcaccaagggctaccgctacaagatgcgcttcgtctatgcccatttccccatcaacgcctccatcaccaactccaacaccgccatcgagatcaggaacttcctcggcgagaagaaggtcccccccattacccctttccctttctttctattaccatctaccagcacgtacatgatttcatcctacgcgcaatgtattttctccactccacgattacacgcctctattgattcatctcaactagtagctgcaaatatttaatttatgcctcacagattgcctgtttagcctacattcagcttcggatttctgctctagttagtcttgcaacacaaaatgctgattcttctgttaaaaacacattattagggatcacttgcacatacatcatttctgccatgcttcaatatttctcatatttgttctacacaacatagacatgtggtttagactctagaaaagcaaatcattctctggccttcaacattgtttttttcccaatctgctgtcacattcattcagtatatagcttggaaaccacagataataaaaaatgttatgacatccttcgtttccttcaataataggtgaggaaagtggacatgcttgagggtgtgacaattttgcgttctgagaaggtcaaggatgagctggtccttgatggcaatgatatcgagcttgtctcccgttctgcggcactgatcaaccaggttagatttcttgcacccctgtctctcttagctctgtgaatgtgtgctatgatgatcctgtaaatcacaatgcttcgttatgtcagactgttactactttaatttgctgctgtataatggagtaggtgttctgtgtgcatatgctttaagattctgtatatttcttagagtttgttcatgcttcccaaatctatctattatataattaaaggaatagaaaaaggagcttccacgttctctctcatggcttagaaattctcacattaatcagagaaaaagaaaaagcagagtccatatagaaatacaatttagaaatagctgaaattgggaataaaaaaataaggaatattagaagaggagactatagtccatatagaaatacaattaggaaataactgaaattcggaattaaaaaataaggaatattagaagaagagactagagtccatatagaaatacaattagaaaataattgaaattcggaattaaaaataaggaatattataagtagagtatagagtccatatagaaatacaattaggaaataactgaaattcggaattaaaaacaagaaatattagaagtagagtatagagtccatatagaaatacaattaggaaataatagaaatttgaaattaaaaataaggaatattagaagtagaggatagagtccatatagaaatacaattaagaaaaaaaaatagaaattcggaatttaaaaaagaaatactagaagtagagtatagagtccatataggaatttaaaactaactaaaatttggaataaacataataaaattaaaagtagagtctagagtctgtataaaaaatacaatttacaaataactaaaattcgaaattaagaaaaatatgggaagaagagtttaaggtcaatataagaatacaatttattagtaactgaaattcgaaattaaaaattgaagaatattgaaagatgagtttagagtccacatagaaatacaattagaaataataaaaattcagaaataaaaataaataatattgaaaaaaaagcatatagaaatacaatttacaaaaagttcggaatttaaaaaagaaatattaaaagacgagtctagagtccatataggaatatatataatttacaaataactaaaatttgatattaataactaacaagtatataaaatataatatgaaaattcagaaataaaaataaataatattggaagaagagcatagagtctatatagaaatacaatttacagaaaattcggaattaaaaaaaggaaatattaaaagacgagtctagagtccatataggaatatatacaatttacaaataactaaaatttgatattaaaaataattaataactaacatgtatataaaatataatatgaatattacacatattgcaaaatttaaaattatgttgtcattttaatatatttgaataatataatgagaaaacatatatgctattatatgatagaaaatataatgatgctaggcgcgcaatttgcacaggccaccatgctagttggatgtataacaacagtgttaagattctgctcctacttgacttaaatcaccaataggtggggtgatatctttgctactctgtgctgcacgagtctcatcttgttaggtgtctttactacctgatgcttagttgatctctgtcctaaaccatgtctatttcctttttgctcccaacagaaatgccacgtcaagaacaaggatatcaggaagttcctggatggcatctatgtcagtgacaagggcaccatcactgaggaccagtgagctgcgtttccttactagctgtagcaaaacctgtcctagagagagtgcacaaggaacttttactgctctgtttttgagtcaaatta

SEQ ID NO: 20672 - DNA, 721 bp, Oryza sativa
ggccgtgtaatgcttcagcaatggctacaggttagcatctaatgctcatgctctcaaggaacaattcatcgccctttgttcttaccccaacatcagctgaatgacactagaaccagtcagtattcatgcactttgtaccaatattcctcaggtcacgcaatccgatcatgcatatatagcttgcttgttcggttgttccactgttccgtgaggaggcttctgttgctgcatcaacaaagcggtgctctgcttgccaacctattgcattgctacctcatccatgtacaaatgtttgtatatgaactagttacctaatgacctgagaccgaatcaaaatgttccattcaagatagctacatgtgtggcattgccttgttccacctgcagccaaactgtgtaatataagcaagcttgctatagggggactaggcactctaggcttacctaatccaccccttcaggcttcagctgttcagtgcagacacagagaatgaattgggtggagtttctgaagcccgtagtcgcaatgctggtgtttgaccgctcttcgcgctgatgacagcattggtcaagaaggctttggctgatgggttaaaccacgttgtctttatcaccctacgccagtttgtagcggcagtcccgctcgctccgattgcttatttcaaagaaaggtttgtgacaagtaatctgatctcaagtgtcttatcaggttgggctgcag

SEQ ID NO: 20673 - DNA, 12308 bp, Oryza sativa
tgcaggaggaggacatggtgggtcagtgatggtgaagaacaataagcaatggacgctggggacggtgatgctgctggggaactgcctgtgcttctcgctgtggctgctgctgcaggggaagctgaccaagaaatacccggcgatctactcctgcacggccatcatgttcttcatcagcacgctgcagggtggggcgctcacactggccaccgagaggctcacagcctccgcctggactctcaccaacaaagtggagatcgtcactgtcatctactcggtaattaatcaattaattacatatgccttgctaatagtacatctatcaccatgcacatatatacagatgaattaattgtgtgggggcgcatgcatgcagggggtgatggcgtctggagtagggtacctgataatgacatggtgtgtggggaagaggggccctgtgttcacggcagccttcatcccggtcatccagatcatggttgccttcatcgacttcttcttcctccatgagcagctccacctcggcaggtatatatgtatatagtactatgcattgacgacgatatatatatatatatgtatatgcatgcatgatatataattaattgatttcatccttgcatatatgatgatatatggcagcgtgctaggatcagtgttgatgatcctaggtctgtaccttctgctgtgggggaagaagaaggacgctgcagctgcctcctcggtggtggtggtggtttgttgtcctgaacccaagcacctgcctgttgatgatgaagaggcgcccaacaccatcaaagcccaacagcaaccaccttcaccactcaaattataattgaccataaattaatataagtatatagtttgttctaaccaatactattattatattttagcaaagaccaagagcaattagctaaaatatctatagaatgtttccttgttttcttagtgtcacctaaacggttataaaatattttgagaaaaaggcaagataaattagtatgtgatatatcactccgtaaatatgtaattttaaatttaacctatataaattagaaaaagaacaaatatgaccataaatagtacatgtactagttagagtcagatttgttcttttattataacttatagaggttgaattaattgcatgtttatagagtaacggtgatatgcctcatatttatctattttattaattatttttttctatttttttcatagctatttagacaacacgtaacgacatagaagaaatgaggggacatcttttgggacaaaaatctatctccgatcaattagtatatatatagcatcccaatgcatggttcatctgctgtactgtaagtggacaatgaaaagaagataagagtgattatatactatattggtcgtgggatatatcacaaccaaccgatgatggatgctcgcatttgccaaaactgcaactaaagtgaagtgattgagagtaaacatatatagctttattccacgccattatcacgcaattactttttaaactgtaagatagtagtataagacaagaacaataatatttgcactcgctcatgcatgcactgagattcgcttgattagttctcttggcgtcgtcttaatttatactatcgtctatggacgtcaccacgaatctggaccaattgatttgtgcatctggcagcttagcttgcaattatataccttattaatcgctggctccggccattcctactgggcttacctcaaaaccatgttggccctcttctggtcggaccagtggatacatggccgctctatggcctttatggcgccggaccttctccttgtagtgcccccacgtctcagggcatcgcgcaatgtggccttcgccctcgctggcaactcctgggtaagggatatccgtggcgtcctcactgtcccggtcatatcccaattcctgatggtctggaatgcagtgtgtcctatccaactctctccgagcactggagaccgtctggtatggcgttggacgggggaacagtgctactcggcccgctcggcctaccatgccttcttcctagggcaacttccctttccttgcaccgacttaccgtggcaggccaagggccttgccaagtgcaattagttcctttggtttgcactctagcaatgttgttggactgctgagcttttgcaaaagtacgacattgacaaccactcggtctatcccttttgcgcgcaaggagcttgaaatggtgaaccacatcctactcgactgtgtgttcgctcgctaaatctggcacaacatcctgtcccctcctggttggactgggctcgtcccttctcgtggtgacacttttcaggactggtggccgtttgcggtttgctagggccgcttcccagagcaccttcacaaggccttcgactttctggtcctccttgtatcctggcagctttggaaggagcggagtgttagggttttcgagtctttcctctcgccggtcttggaggtgttagtttccatcctccaagagggtcgcctctggtccttagctagtgccgctttgtttggggatcttttgggaggatagggtttttctttcgcttttctccctctgtttaggagcaacaattttagtttaatctccttctcttttaacccctctcttccccgtatctttgcaagggccagtccattccgttgtgctatgtaactaaaactctatttcttctaatatattgacgtgcaattttttgtgcgttcgcgaaaaaaatacaccttattaatgtattcgttccacatatatccataaatgatttttttcaataacatagtcaaggatgaatttttaaagaccaacccttctttaattaaagaaaggaggaaagtaagaaaggatgagtgtgcatgcctagcttgcgtaattgactaatatgaaggatagttttcattacttaggagatattgttttgtttcttgcatgtctaaatagttaaatgattaacataaaatatattactctacaaattaatatacatgttcaaattcaactgctataaattgtaaataaaaacaataaataaatataattatgcaggtatgttaactagttttagttgtagttttatttgatctttttgttacagcctatacaagtcgaattaattaatatgataagatgatatatcttatagtaattaatttatcttgtcaaaattttaaaatgtttttttgtaagtatttagatgatatatatgcagatgtagatgtcaattgagagatgaaaatccatgtatgagtagtaaatctgtacatatatacgtgacggatgcatattaatggatgaacggcaagcaggcatgcagatagagagttgaagtattcaagtcgataagcaattaatggacgtgaagaaatcgcgcgaattgaacgagcgagcgcccgtcccggactcccgttggtccaccgtctccggcagcccgcactctgcgctagctgccgcatgcatctatccatcgatcgatacatgcatcaatgtgtttatatatatatatattccatctagcctaccatagccagctaattacacgatccatccatttgcatcatcgtcgtcgtcttcttcgatcgatcggctgatccagtaattcctcgatcggtggacgtacgccacgctactatcatcatatcaatccccgatcgacaggttaacatcgatcgatcatccaagccagccatcgatccatcagaataagcagctagcttggagaccgatcgatcgatcgatcatatgtcgattcgattcgatccgatggagagcagaagcagcagcagcagcagaagcgtggtgatgatgtgctgcgtgctgatgttgatgattgcggcggcggcgcatgcgggcgagcaggaggcggaggagtgcgctagcccgatgagcatcgaggaggcgtgccggggggcatcggagacgcaccacgcggtggcctacgaccactgcgtggcgtcgctgacggcggacccgcgcagcagcagcagcgaggcccgcagcctgcacgggctcgccatgctcgccacccgtatggccatcgaccacgccaccagcaccgtctgcaagatggacgacctcgcggagctggagcccgaggattcttcgtcgccgtcggacgcgcgcgcacggttcgagcactgccttgagcagtacggcggcgccgccgacctcctccgcgacgccctggacaacctcaaggtccgcatctacgggacggccatggagcagctgtccgccgcgctgggcgccgccgagagctgcgaggacgcgtggaagggcgacgagggcaacatccccatcgccgcccacgacagggagtacggcaggatggcccacatcgccatcggcttcacccacgccgccgcctaatcttcctccatttcttccttacttccatctatcgcctgcctgcctctgcctaattttatttctactactccttattaatttgcattctcatcgatcgatcatccgctggaatttcttcttcttttacttaaattattattattattattattaattgctgattgaattgaatatgtactgtaggatttaattgttcatcagatgaaagacgaatgaataataacacgattaatttactgtgtactttttattttcctcagtcctgttgatttggtacatatgttcacatgtgcatggtttcgatctcaatgatcaaatgtaaaaatattgctcatcgatctaagaaattcagatcaacaagaaaaaggaaatcgaacgatctctatgagccaatgctactactagctagtgcaaggaaattttatagattacaagcatgtcgtcagactaaatgaagtgaataacctgttgtcataatctctggattatcttttttttttctaaagaaaacaatatctggatttgagatatactgcaggagtctgttcgatcggttccaaatgcaatatttatttgccatgcaattaattgagaaactgaacttgtatcaatgtcgacaaaacgctgtctagtactagtactgtacacatcattacaattaactaatgcgagagtataagtgatcacattgatcaaacacaagcggagattatcgtacatccatgtcgaggaatccaaaattttggacccaatatataaatattcaaggaaagcatccttccattttaaaagttaaaggggatgcatttggctaaacaaggacaactaagatatcacaactaagaagctagagctatagatggagtactatttagttgagagcagagcaaagctgttcaggtttcggttgcaacataactgctaaccactcgcagaacgaacggcttgagtagtgtatactaatagtcttagaattaacacatgtgctcatatttacgataaataattttttaatgttaggtgatgtacgcgtcaaaagtgatgcgttaattttttagataatgatcagtgatgcgtcaatgatgattttagcaatatcaagatatatcagtgataggtgacgtccacatcgacagtgatgtgacaatgataactttgtcaatatcaaggtaacatatatatgctcattgacagtgagatatttataatgacttcgtctcaggatatatatatataccggttcaatctatcagagatacttatataataggtgtacatgtgtgttgataagaataagtgtagcatgtgtacggcgtcgctctccccaggagcggctcgggaggcgacgacccggccgcccctctcccccacccccacccccttctccgcctcgccgtcgcccgagcgaccgccggcgaagccgcgcggccgcaaggacggcggcagcggggcgctcctcgtctcctcgcgctcgggcggcctggggagccgcccggaatggcgacggcggtgtccgccagatccgcgccgttccggccggatctggcgggatgggctggcggcggggacgacgacggcagcggggacgggcgacggtggcggtcgaggtgagttgcgccgggtggtgttgtgggtgacggcggcggggatggcgacggcgttggggtggcgatggtggaggctgcggatccggcggtggcgcacccggatccggcggcggcgcggcagccggcggaggcaagagcacgcaggcaccccgcggctgccactggcgtcggccggcattggtggagaggaagacggccggatctggctccttgcccagatccaacgcgtcctcgggtgggaacagggtggttggagtccgatcgtcgtgcaggtggtgtgaatatcgcaggtatcctcggtgtgcaggtgacatttggtggctcccgtcgtggatgctatggttgatgggtgctccaaggcgaaagtcttgctccgctctcggtgctagcaacggcgacgcccttgggcgccgtttaccttcttgaaggcgttgctactggagccctcgttcaactccacttcaagagttttctccgggtgaaaacctagattcgttaggatcggacgatgtcgccgttctgtcggcgtaaccttcttgaaggcttcgttttaggagtttatctcttgttggacggctgtacttaggttcagtttgtcgatgtcgggggttttgccggttttcctttaattaaccgtgctgttgtaaggtttttaggtctgatttcccttataaactggatcaactctcttcttctacggtgaatcgcaggagctccctgcctgtcccctcgaaaaaaaaaagtgtagcatgtgtactattcgtactgtgtactatctagaagacgttgattagtaactaatcccacaagcatgcatatatacactagctagcttgtacgcagtggtagtacgtcgacgttgctaaccataaggtcggtcggtcgatcgacatggccactctctgcggcagcgtctgcttcttgtttgtaataatggtcattgcgtcgtcgccggcggcagtggcggcggcgggcgaggatatagtggaggagacgtgcgggcaatgcagcaggagcaaccccaacgtgaactacaccctgtgcgtgtcgtccctgtcggggtacccaggcgccgacctccatggcctcgccctcttctccaccatgccgctccgctccgccctggccaccatcgcctccgaggccagggtgctccgcgacagggcgccgccggggtcgccgccgaggtcctgcctcgactcgtgcctggaggtgttccgcgacgccgcctacaacctcggcaacgccgtggcggcgatcgagtcgtggaggtacggcgacgccaagacggcgatgagcgccaccaccgacgcgccggtgacctgcgaggacgagttcaaggggcagggcatggccacgccgccggccatcaaggccaggaccaagcccctcttccagcacggcgtcatctccctcgccatcatctccttgctctagccatattgctaccagctactactaccaattaattcgatatccaaatatcactagctagtactatcatgcatgcatgtctgtgtagtgtgtacgatcgatgatccattaatcaatgcatacttactgcatgatgatatatgcagaactaatatctttgcagcaagcctgcacatgcatacataaatgcaaatgatgcctagaatcgggcgcccacgtggggagtaaaatcgggcgccccatgtcgcgccctgcccgccacgtgtatgactaaggctacgttcgttcctaaaggttcccaacccatctccttcattttccgtgtgcatgctttttaaactgctaaatagtatatttttataaaaagtttctatatgaaaattgttttaaaaaatcaaattaatccatttttcaaaaaaaaatagctactacttaattaatcgcgcgctaatggactgctctgttttccgtacggtggagttgggttcccaaccccaagtatcaaacacagcctaagtgtaaaataccttgaacatcctagttttgcacaacaaatgcaaagatgaaactaagtcacaacaaattcatcataatttccgccgcaaatgtcacacatgaatcacaattctcgctaacaacctccgcattcccctgcgtactctggtgatcttggtatcctaggaaatatggtgtgagcgaaatgaataaattttttgaaacactgcatcgccaccggcatccatcctcaccaagataaaagaggaaggtcaggcatgagttaaagtaggagcctctaagcttcaagagttcggaatcttgagagatatcacttaatcatcaccttttgcgggcttagttcttttttagactagccatgtacataattctatcgtcctgtattttccccatctctatcaatatacgaggcaaagcttttgccctcctttcaaaaaaaaacaaacacatgaatcacaatacaattttgaacagaatgattttctcaattgtacatgagagtataaaaaacatgtggttacttgtgataaaaagaaagaacaagatgtgtatctagtggactacatgcggatgctcaaattagctgggcgaatattattagtgttttgacgcatgcatgccgttggtcatcagttaatcagttaattagctaatttgggtgaatccatccatccatccaaaaattagccgggcggccgctcaaaattaggacggtgagcgagctataaaattctatggaaaaagagagagagagattgtgatagtagatgatcaagtgaggagctatagagatcgagatgagcctttcgtcgtacctgacgtgcaacctggtgaccaggcaacggcaacgaggtggcgtggaagaagacgagtacgatgggcggcgtcagccgcagacggccacctgctgcaccgccctgaaacgaggtgtcaccgctgacggactcctcgcgcagccgcgctacgccccggtcaggacgccccaatccgcattgctgctgctcgatccaccaccaccggcgcccatgacgcccacgtcgtcgtccagcaacagcaaccacgacgacgacgacgaaaagaagaagaagcagccgatgctgcagcagcagaagcaggtgcgcaagtgcaaatcgacggtggaggaggcgtcggcgtcgcagctgatggaatgtaaaggcggcggccctcctcctcgtctccgtcgcagcggcggcgtccgccgtgactggagcttcgaggacctccgcgccaacaacaccgccgcctaataataataataattcaatccccccaccctcctgctgccctgcctgtaactaacaacccacttcttgctaaatacatatatatactcctccttaggccctatataaacacgatcactgctaactcgattatcatgtaaataatttatttattattgtaatctgccaatgcccccttaattaattaattatatgtttgtaactcgatctaactagctagtaaaatcatcatctactccaacgacaacacaatcctctcccggttattaccaactacttcagcttgcataattctcaaccttaaaaacattatgttgcactgtttcagctcttctgtaaggtcgagcaacaataaactgtcataatgctggccattcataacctactactcctctcatctgccacattgacgtacgcaacaattacacacaggaaaagaaaaaacgtctcagatgcaactgtgaaattctgcctgcctccagtgtaaaaatggttgccaactgccaaaaagggtactcctcttcttctaaactaaaatccaaaacctgaacaaaaaacaattagcaaactctgttcaagcatacaatatatactactgtttgatcatgatgagcaggtccgtgtacctgatccacccattgggttcccagcagcagctgctttctcaggctccttgatgtccaccacaacagcatctgatgtgatgaatgttttcgccaccgacgcagcatgctccaagcaacatctcaccacctgtttcacacaacgttagctttatggactcaaaatactaatataaaaaatagggtggaaaacatccttgtttgattgcaaggaaagaaaatccatatcccagaggttcatcttcatgcagctgatcacttctatcggttcaacatggtaaatcggttatattaattttacagcacaacacaaaggcacacgtgcatttcaatatatattctaataatgaaagaattacttctgatgtgactacgaataagaaagcgcattgattcggcagaaaattaccttggtgggatcaataataccagcagccatcaaatcctcatattttcctgtagcggcattgtaaccatacctgaagttatcattggcaaggacctgaaatcatacatgttcaaaaattcgttacacacgagctgcagaattgcatattcatcgtacttaagaacaaatgtcagagtacaaaccttctcagtaacaacactgccgttaacaccagcattttttgctattaatttaagtgggtaactcaaggacttccttacgatttcagccccaaccttgaagccaaaaagaaattttaattattgacaatagaaaacaaatgccttgaacctaggatgaaatgaaacaataaccaaagattatttcatttgttttcctaccttctgttcatcattctcaagtgtttctataatggcatcaacttttgatgcaagccgcaaaagcgtacagccacctccaacaacaataccttcctcaacagccgcctgccacagagcaaactattaagtaacaaacaacaaacccatatactctatgtgcatcagaaggctctctgaatgcaatcccaaaattaaattatattaacaaagagaagtattcaccttggttgcattcagtgcatcttcaaccctcagtttcttttccttaagctcagtttctgtctgtgctcctacctacataacaagtagcgtcatttcacaacaattatcttctgcaaatgcagcctagtagtacattaacaagtgcattggttcaattgcagaacatcgagatcacctggatgacagcaacaccaccagagagcttagctattctctcattcagtttttctttctcatattcctgttcagcaacctgaagaaaaaataacttgtataaaaatccacaaaaaaatactgagacatgtgaatccaaaagatctgccctgtaaattcatgtaagcaaagaaacccccaaaaaagagcagggtcaggagaaaatgaatacaggagtggtttgacgagaagtacaggaacacatagaatttttaattttaaataatacagacctcaatctggttcttgatttgtgtcacccttttgtttacttcgtcctgggtagtaccatccccaactattgttgttgaatccttggtaactacaaccttggcggccgttcctagaacatctctatcagctttgtctagggacaagccaacttcttccctgatgacagtacctgaaagaagaacgatatataagcgcacgtgtggcttagagtgtagacaacttatgtcaaaagctgaatatcacctccagtaagagtagcaatatcatcaaggtattgactcttgcgttctccaaaaccaggagctttaatagcagcaatcttcaatgcacccctaagcctgttgaccacaagagttgcaagagcttcctgctcaatatcctccgtaactattaggattgggtacccacccctaatagcatcctccagaattgttataagatctctggcattgttgattttcttgtccacaaggagcaactgggtgatagaatcaacattagcatcaaatgcatagagcccacaaatgagtatctggttaatgcacagtttaagtacaccgaattctagaatgcatcaaaccttgcaattctcatactccactgacattttttcactgtcagttacaaagtagggagaaatatagccgcgatcaaattgcattccctcaacaacatagagattattttcagcactctttccttcttcaagtgtgaccaccccctgtcgtccaaccttgttcatagcttcagctatcatgttgccaatttcgtagttatttccagcacttaccgcagcaacatcagcaagttcgctgtcttcaacctgcaaagttgcatgcaatatgatagattcaaatttcaagcaaaaatagtgctgtagcggatgagtacgattcaaactggcagccaatgctcctgaattcaaatgggtgttacttaaatatcagcacagaagattcccagcactcatgtttagtattactgaaaaagaaacgtgaaacatggcacact

SEQ ID NO: 20674 - DNA, 2523 bp, Oryza sativa
tcgattgttccaagttagttaattaccaagtgaaaagaatagaaggaaactggttgcgattcttcagagaagaatagatgttcgggaacacaccatgtcctgagtagcaataaccatacagtccaattgcgatgggaattcctgggagattcagtgcagtccctttgttctcaaaaccaacatggtcaacaaccccaacccagcataggcagacaactacaaggattgatgcaatgacacccccagctacaaacacaacaacatcatgagacgatgtgcagtacatacataaggcacaacaaataacgtgcatgttatttaaacaactctagacccagtaagatgaacagaagaagcaaggaaatgcaaacctgaaagataactcagacagctaaggtcgcggagccaagtggttggcatgactatgagggtggtcaagattgcgaagaacacatgagagtttagtgtcatgctcccaatggttagatgtgcattggggaataactttgacaaattgtcgctctccaatatcaaatactcaatgcaacaggcctgaaacagtacatcagggtcaattaacatgttgtgaaaatgctttaaatagtattactattcagaaggaaataaaaaaatatattatgtttccgtggcaactcttcacaacctaaactgagctaactcatacgtattgcatggttaagttaggtaaatgtattgcattataatctcaagatctaagtaactaaaggtaggtattattttggttctgttttaaagcatagaaatttcaactgaaataaattattattgaagcatgtgacactattatcaatgagcttgaatacatgagaggtcatatcagagttgcaaataatctaatagtgtggtgggctggtggccttgtacttatcagaggcacgtgtgtgactatgtgttttgtcccggatatgaagttgatgtgtgttaattgtatgaattcattccctggggactagcacgtagcaatttcgattgaaaatggcttattagtaataagtacttacatacagttcgatgtacaggattatctgtagatagtggagccacatacaaggaaaaagggttagcacaagagcagtcatttttgcataacctgaagcatacagttgaaatatcatcatctacaagagattttaccgagattgctatacgtccagtggtgccaaaggcggcatgaccaatatcagggtatgtctcaagaccctccttgctgtccagacaacgtcgaaggagcactccggtgtaccaagcgagcacagcaaataagcaaagtatcaccagtccaagccagcctccctgtttaatggcatatggagtcgataggatccccacaccacacagaacatttattcctgcataataggaaaaaatcccctagactaagtaataatacgtaggtatttggaaaaaaaaaagttaagttatttgtcctgagtaaagcaaacagatcaatttcttgggttaagaagaattagataaaaatagagagattggtacttgtacattttattttggatgaagtatttctgcatataatttgataataattatatgggtttgtcttgaagcaaaagtacagcctgcagatctatctacttgctgtttgtgacaactgtcacatggtggggtgactcaaccatgtgatgtccctattgatgccaagaacaagaagaaaagttgaactggtggacctgtgatgcggcgtatcaacaaagagaatagaccattttcaggacaacatgattgaccatttgatgtacttgatgtttgcacttaaactgataaccgctgggctaatctgggctccagatgtttgctgaactaactaatgttttgcatttcgctaaaaaaaaactaaaggtttgggtcttctatcaatgctggtatatcaaataaaatgaaacagcatgtaaagctagtataactactagttcaaaacagtgtgatctcaaattctcaatccagatccttagaaattcatgctctgattgtttggactggtctgagcatcaatacactgaacttggacatgctggtctgtgggagcgtgtccaggttcaccaaatctgattgtgtattcatcaatgctacgtactccatatgacaaggatattctgtggtgccaataagtgagggggtcctatttctcatgttctacttcacagtagaagcaaaacgacttccagaaagtcatatgcaagcaaattatggttggatctataaattggtttacgagaagcaacatatatatctagtatcaatcattgcaggataaataacattctagtatttcccttccataaaggaaaaaaaagaaatgatatcatcattaattaaaattggtagacatgcgtaccattcatcactgcctgggtgtaggagcattgttgataagccggcacctcatgagccggcaccaatggtttttgatcctccgggatctgttgcaaagacggttttcttgagggaagcaagtactgggaa

SEQ ID NO: 20675 - DNA, 1334 bp, Oryza sativa
agattagagagaatttcaggggttttgccacgaaaagagttggtgaggaatgagttggagagcctgcttagagttggagttcccaaaaagctcaggttgggagactgcacgctactataaatgtcgattgattgcctgttaacatagaagtaagagagaagagttactccatttttatttttagtttagtttagtttgaataagatgagatgagcaagggaggttggcatctagtagtcctatagtatgtggactgtttctcttttagatgaacttatttaaattggaagaatgaggatacagagacagatacagattaattgatgggaggataaaaagagaagaaacaaatctgaattttggcaggaagggaggggaagggacctgtagctttgcggccattggtgggtggcgtaggagcttgggcgcggggtagcgcaggaggagtcgtcggagtcggagtcggagtcggcatccttgaggaggatggaggagtgggggtgggcttcctcgtcctcctcctcctcctcgctctcgatgaggaagctgttgctgccgcgctcctcctctgacgcataacgagaagaagagttgttcatctcgtgggatctcatctcttctcttggaatctcctctcctctcttgggctctgcaagtctgcaactgcagtcctcctcctatacaagattagtagcagtacaagaacaagagctgtgtgtactgatcaatgttagagataatgccaagacctgattaggattaaattagttctcctctctctctctctctctctctcactgtcgcacacacacttttagccccagctgatgcaagggagaaggaaccattggatgactccacacatgcatactatacgattggagtagacaacaagtgcatgattaaggctgtgttcgcacataggtgttcccaacttgcacagtaaacacagaaaacggagcggttcattagcacgtgattaattaagtatttactatttatttttcaaaaatagattaatttgatttttttaagcaacttccgtatagaaactttttttaaaaaacacaccgtttagcagtttgaaaagcgtacgcgcggaaaatgagagagataggttgggaaaaaggggttgcaaacacaccctaaataaattgatgccgtccgtcatcaacgtcatgattccctcacacattactctccttcgcctctatgacgatgattccctttctattattcataaccatattccccttcattctccaattcaactttaaataaacacaagacattactactagtcctagcagcttacatgtcaaattttgctgcat

SEQ ID NO: 20676 - DNA, 3109 bp, Oryza sativa
aaccaaccaattggtaatactcagtgtgattgatatattgaatctaactaagacaacaaagcaatctaagaaagaatcgatagatcacataggcaacacaagtaaaagcttaactagtatatcgcacttaaccaagaaagtactaattccgccaatacaagcgaagttgatgatacttactttctcgctagagatcaaaactaatgcagcccaaacttgaaaacaaaaactcatcgaaactagaaagttgtatattgaaccgttgttaaattaaaaggaccttaggtgtacatatttatacccataggttagatcaagtccaattctactacagttagatcagcttaggactctatcccaaataaggaaactacatgatacaattccgactcagacatgactctgatcggcaaactagctaagtccgaatccaacacgagtccatcagctcataactctgtccatagaaaatagaaaccaaaataaacgttccttataacggaacgagataaatttaccaaccaaatctacgaaaatcatggtgttaattctctattttgattcagtattggctaacgaaaatggccaaatttcaccgttaacaccactgttggctggccgcacctacctctggcttcgacaacatcgacgcgttgaaagttactttcctcagcttcaggggcacgtgtgtgtaacccttttgtatcctcggcctttagctgggacgagatcggatctaagcaacacaattaaatatctcgtgtactggtctactaggcatcgggtgctcctgcttgaagatgctacgacattattgtggtgccgcctttggtgccttgtctacatggtaggaatggacaccaacaatgagaaagaactaaggaaggatggcaaggaagcattgatggccactgcgtacaaaggtttgatatggggagtgggtatcaaacgagtaggtcaagaggaagggcagaaggtcgcccaatattcaacataaggtaaaagatcatagtttaaagtgaaaatattatgtatgacttggttcacgataagattttagttatagtccaaagtacaatttactcaaataacattgactggcattcttggtgtttcgtggtcaggagtacgaaacaacgtgataacattggcaatgaggtattggatgtcaatgccaagatctttctgtgttgaggtatatgtccattttgtttttgttagagtttgtttttatcgagatctatttcgaaaacaactttcttaagaaagaaaagagcagtgtcccctagaaatttgagtgatgtggtcaggtcagagcgcgcaaagcccaaatgaaagcccacaacctggatctggaatgtactccagtattgttttgttgggtcggcggcggcgggtgagagtggagaatgatgatggctctccgccgcgccgtcggaattggctccgccgccgccctccgctctgccgcctacctccgccgcgcctccccctcgccggcgcggccccatcccctcgtccctccaccgcctgccgcccgaaccttcgccgccccgccccaggtatcgtatcaatggatccccttcaccctcgaatcttaactagtctagtctagtgtagtgtactactatactccctaactactaagtatcttgttgttgtattacaaggtgatgaagaggagcaccaaggacgacgacgacgatggccctcggatcaacaacgacatcacctctccctttgttcgactcgtcactgaccaaggtacggtaccccctctcccgtctacccttgtcctcaccgcatgctctctcactttttgctcatttttgcaggccatagtgttgtccccaggcacgaagctcttcagcttgcggccaggatggacttggacttggtcgaggtacttactgccctctatctgctttcttcttgtaaccaaaccaacctaaacatactagtatttcaattgccatcaccatgtcaaatccatttctttgtttatctatctgtgactctttcatcattcctttttacacgatttaagatgttcatggatgatactgacagtggatataaacaaccaaaccgattcacttgtatttccctctacaacatatctgaccatttgccacatttcttgagatttgcccaatgttcattaccgtttctcttttattcaggtccgcagaaaatcagaccctcctgtctgtaaaatcatggattttcacaaagagaagtataagaaagacgttaaggagaaagaacgcctaaaaactaaggtatacttacttcctggctcagttttcttaactatccattgatcactcattcgaccaaggcgatcaacgtacaaggtttgccttcttgtgagaaggtgatggtggtttaaaagacctgtgttatgttatgtagctgtatggatcaaatgcccaacatactgctcaatattgatgctcctggttaatttaatcatcctaccattgggaaagactgttaaccatatcgtccctgcttgtgtttggatctgacaggctataacatatatctccttgtgttgttctggttttgtgcagtctgctattgtcttacgcggtggggagaacaaagaagtgcggtttaagggtaaaacagtaagtggttttttcttgctttagtttgtttattgcagcctatcatcttggctgcaatagattgctgatctggtaactggtatgatatggtcgtatggagtatctagttggcctatcatacttggttttgtccaaggcatttttttttcagtttgtttggatccatatgaacggtgcctagtttgtttggacttctctagtctttctgtttaaattattgaacctttctatggaagtatcaaagagtccaaattatttcaaagtttcttttgcagttacgtttgagaaattgttggtatgaaggcctaacttggaaggttgctgatgaacataaattgttacatgtaggaactaaaagacttgaaggtgaaagcagatggaatcaccagattaatggagcgaggttacagggtgaaggtcagcttacattccatttccctttcttgcttgtaccactgtagaaaaggtcactttgt

SEQ ID NO: 20677 - DNA, 3870 bp, Oryza sativa
  unsure (1)..(3870): unsure at all n locations
cagctcaaattgtgcctccacatcatgtgagatgtcaaaatgagtggcacttaacgcttttgatttccctttggcttttgtcacgacattctcacttgcagaatttaactttgcacagagtgttctcagtttaagaagatcgtcagtaactccaagatctcttgattcatggtcagaagggaagtatttatctttgaacgactttgcacgatcactaactgcaaatcgaagactggtgttttgaacttctgtagagcatggtgttgagctggcaatcccaggattggaagtgtttgattcatctaatgagctgttttctgttggtgcagcagcaccacgccggcgctggcgtctagaatgcgagggcatcacagattcattgtctttatcatgtggcaatacctgagaaggcaccatatcggaggattctggacatataagcgactccacagcatgaacgacaccttccctcacaaacaacttagagaatgtctcaggaagtttttccatcataatttctgctatttaagagcaggaatcaacacttgcggatctttccacgcaanngaatgcccntgctaaggaagctgcaaaaatggaaattatgtagcttagcaaggatcagaaatgaaggtgtgtctacttgcacaatacaagaaataaaagcttccaatatacatatgccagtaaatcattaggttgtgccaaggagtgactggatcatttcagcagggctgtagcacattattttccagttttccagtgattgataagcattagttttcagcagtcttattcttccaacataaatatgcttatcaataaaaacttccaacataaatacaagaaaagaataagactgagcagaatcttgtattagcacctggatatgtttgttgtgccaaggagggactggatcatttcagcagagctgtagtacattagttttccaatgattgataagcatttgtggcgtatcggtgcatttacacttgagccatacacctgtccaagaacagatgccattaagtacagaaaccctgacatattcccaaaagtagtagtactccatctgccccaaaatatagcaacatctggctatgcacctggacaaagttgctctattttggaaggtagtagttatgttcactgacaagaaagaggatctgggcacaaacctgcgtcattatgggtaataagtccataccgaactgctttagaagctcanggtgctcacgtaatagtctctcatgtcctgacctttcattttctgttgaacttgtgccatcttgtttggtggaagctgatttctttgaagaagagcctttaacaagcacatggaagtatgctggtaaagaaatgattcccgaaggcaaatgtggaagcaaatcatcagcaaggctcactatctcaaacatctgcagaggtaagagtaaatatgtaaacatcacacataaagaaattaacaagcatgtatcaccccctcaatcaaacataggtgccaacaatcaacataagggtgcgtaagtgagataacaagcagcagctgctgataacatcatgcgttaacaatgctcacaaatgtcagatattttgaatctcagcaaatatgtttattggcatatgtatgatataagaaataagaccaaaaaaatgtaactcagcaattagttactactggtaagcgttggtagctttggatcaatcacacttcaaattagatactgagtattgtgttcctttatgtctccttaaaacactatcccaaagaaattaacttaatgcaggacgcgttatttgagaatagtgtctcaaggactgttgtacagcatttgaaacaatggcactgaacatgaacagagatccaccgataacatgttccctttctgcgtggttcattaaaacgtcaacagactagtttttgtttactaaataacagtcctaccttcaatcctcaagaatattaccatagggaactgcccactggtatggaaaattgtacatgtggcataggcgcatagccttaacttttaggaagttgtggtaagccatggagataggcgcagaagacacaagtttagaaaacatggtctgctaaagcaagtttcagaaatacataagaactgagtctcagctacccgcatgtcacttcatctgagatagatgataaaaatgccataaagcttcagattaagtaaattcagtgacacaggcaatcacctgttcagcaggccttgacaaagctggggagactgatgctccagcaaccaaaccagaacctgaaagaatatctttaagagtaccactgattccaagaagaagaagtgttttggctgctaaaagcgacccactcgcacatgttgagagaagacgaattaatccctgaaaaaagttccagtctatccttagcaagagtacagaaaagataggaaacaactcgaaagaatgacagaacatatttgcgtgtaccgtatatgttgatgtactcaacgaggcctggcctgcggagttgctgattgataccaggctagcagactgagcaaccaacccatgattgcacaaatcatccaatttctctggataagaagcaaaagcctgtgcaacgcgtgtcaaacaaacagaagcatgttcgagcacctggaatgagcataaacagaaagttaaaaccgcatgttataaaggtgaagccggatcaccaatgcgatgtttggaaatgaaaaataccttagaatcatggtggttcaagagattcgtgagcaacggaacagcttccatgacaaactcggacgcatcagatggcagcttcctgcatatattagcagcagtagacaacgcaactctctagaagcatgtccaagaggaaacagatagtaagttaatagagcatgcagaaccagaggaaattaaatttaagtgggtttgaagatttgagatatccggagtggtgaattaattaatagcatacctgaacaccagtagagaagaagtccagatatgacaggacagccattagcgcaccagctcgtaaacaggcagttggatgctcctgggagatcttcttgagggcttgtagcgactaagaacatcaagaagtggatgttagcatctcggtaaacacatgcttgaaggggcaaagaacaggtgttccgagtgaatctagctagcctacctcatgacggcaaatggttagattcatcatttatttatgacaccacagcttatagttatgcactttaaactaatcatatgaataattttatttattcatcagtggtgtagttattcagttgggtatggaatataacgagacgacctaataaccacatgagtagagttcatgcatcaatggtactagagcgtatagctatactggacctatcaaagacaatggctactgagtcgtcgttgtggtggcataacaacagcagagcaagatgagagtattcaggtaaaaatattcaactaggtcatatgaacaattttattaattcagtggtgtacatacacgagtagatgaatgaatcgatggtagcagaaaagcataacaaagcaataataataatatgaagaatgagatgagagtaatgagtaatgagacaaggggcggggtgagtatacctgctcggcgaggtccatgtactcgatggtgagcaggcgagcacagaaacagggtatagccccatagtgcacgacggcagagcaagaggaggggaggacgtcgacgagattggcgagggcacgggcggcgagcagcatgacatcggggctggcgccgcctgcaccatcctccccggggccgagaaggccaacgaggatgggcacgaaggcatcgacggggaaggcagcgagcgactcctcggtgccgatgga

SEQ ID NO: 20678 - DNA, 32243 bp, Oryza sativa
gaggaagcagagtgtcttggtctattttgcgtacatgtacattcaatagtattacacttagggataaaatcttaaccactaatttattatattttagccgtaaaaaaaaatctgatagttttaagattgtaattatgtcagaattttatcttctttttactctatgtataatgaattttaaaatgcaactttgcacgtaaatgtaatactattggaagtacatgtgtgatttttttaagaattttttatgataatttttagttggtgtacacggtgggtacacacgagggtctgtgtgcataggatacgctcccgtaaactgcggacatcacttatgtgtgtgtgtgtttgtgtgacctggcctttgtatgaatggaagtgatatccgcagtttataatttgtatgtatatatagcactggtattatggctgaagatcgagtagagaagaagaaaaaaaagctagtagaggttaatactagtagtagtatatagttaaaaggaggacatgcaaaggccattttggtgttaaataatggagtgtaagtaaataaaaaggaagggggggcggcaggcttcacacaaagctggcgcgcacacagacgcatagcatatataggatgatgcgtgtgttgtattccatcatcatcaggtagcgcgcgcggatagatcatatctagcgtggacgatggcgaggcatcggtggtatgtgcaggcggtggcgctgctggtggtgctgaaggcggcggcagggtctgcggcgccgccgacgacgacgaggagcaggagcagcagcacggtggtggccgggatggtgttctgcgaccagtgcaaggacggcgccagaggcctcttcgactacccgctctacggttggattgcttttgcatttgcatataaagatactacaatttgattgcaataatccatgatgatcgatgatcatgggggcggcggcgtgcttgaggcttgagcaagctacctgtccgtcatctactctactgtgtgcagtgcatgctattctccttgcctacctaacctgatcaattagtactttacttcctttattattctttccttcagaaatttgtggttaatttggatatgctgtaaaatggaaggaatgcatttgtggtgggtgcaggtgcgcgggtggcgatcgagtgcggcggaggggagagcccggtgacggtgcgggagtgcaacaccaactggttcgggggattctccgtccgcatggagggcacgcccgagatgaaccgctgcacagcgcgcgtcgtccaggccaccggccactgcggcgccgccatccccaccgcccctcgcgacctcaccctcgccttccgcatgctcggcctcgccctctacaccgtccccccactcctctcccagccgctccgtcccatggacttctgcccatctccattaacatctccatctcctcccgccctcgcgctcgccccctctccgattccgactccaatcatcgcgccgccccccgtgtcctcgccggctccccctctcccgcccctctggcgccgcaggcctcgccgcctgccgcccatctggcgcccgaccccaccctcgctacccgttgacaccatgccgccgccgccgccgccaccgccaccgcagccgcagggctccgcctgcaccttcgagtacgtatctatctactagtccttccttaataatttgaacaacatatagatgattaatgaaatgaaatggatcgtcagcaagtgggcggacgttggattgcacgggtgcaactggaaggtggtgacgcccaacacgacggtggccatggcgttcggccccgccgcggcgcagaggtacggccccgacatgacgctgcgggaggcgctggacgggaggggagacatgtaccggacgctgctgcgggaggccacggcggcgctcctcaatgcctactacaaccccagtggctccggcttcctgtaccccaccaccgccagcgtcatcgaccacatcaacgccgccctcctcacccccacgctccacaagcttctcctcgagggtgcgcgcttccgccgcgccaactccgactccaacctgccctgccacctcaccccctgcaactaattactactcctgcttgcttactcgatcgctaatgcactcgtttttcattttattactcgctacgctaatgtattactagtgtctcgactcaatacttaattggtggatggattttaatactacactactactactggagtactatagtacaatcgattcaattttattattacttaattaactaatagtagcagaacatgcataccgtatgtactggaagcatcatcccttgaccagccaatttattatactccactcgcgcggtcaaaccaagtcaatacgacaaaagcagagcagagcagaggaaacgtttgctgttcaaactaatttaaacagggagctactactacagactactcctccactagaagtagaggaattaccactagtagtagagtagtacattccaattccaattacttgagtagatccttggattattcattccatcaagggttggattcaaaaactagacatccaaattcattcattaattagaggtaggtggagtagtaagtaaaagaagaaaaaaaacgaaaataaaagaaagaattaggagcagattgggcaaagcacgaggccgttctcgttacactcgccgcagcgcaccaccaccaccgcccgcgtcttgttgctccttgcagccgccgccgccggcaccggcgtggggagggagaagcagagcttgcggctgccgttgcagtcgaagcagggcaggaatcgcatgccgccgcatccgtcgcagcagccaccacctgggcgcgccctcggcaggccctccagcagcgccgcaagcttgccctcctcctccaggcgcgccacctccgcggcgccgccgacgtggttgccccggacgaacagccgtggcaccaggggcgcgcggtcgtggtggtcgagggagatgcggtggcgcaactcctcccggaagccgcggtccatggagatgtcgcgctcccggaaggcgacgccgtgcgagtggagcgcggcgcggacggcgttgcaggcctcgaaggtggcgcgcacgccgcgaagcgtggtggtgtagagcagaaccccagcaggaggagcaggaggaggagagtggtgcgtgggcctccgtggtttctgtggggtggcggggtcgaggagaccggccatgagctcccacgagttgatgacctccgcctcgccctgcttcttcagatgcttctccggcggggctgcacatggtgggttggtggtggtggtgggtcggggaggcggcgtgggcggaggaggaatcctagtaggggattgggattgggattgggattgagctgatgatactagaatgttgtcgaggatgccgtaggtggaggaggtgagggagacgatgtgggaggcggagacgccgatgatgcgccggcggcggtcatcgtcgtcgtcgtcgtccacgaacgcggaggcagcgcaacccatggtattggtattggtatggtaggaaggaaggattcgattcgaggatgattaaggagaaaggagagtgaagaagaaaggaatgcattcaaatttcaaaacttgaaaccgccatgccattggatggcactgtactgtactactcctacattactctattgggcctgcctctctggtcgttgggcttggcctactcctgcatcaccatgtatgggcctaacttaccatgctttaagatggtaccaccagttaccagaagtaatcatttagatcctctttattttaggcttttaaccgatcttttagcttactagacaaaaaaaaaaaccgtgcgttacaacggaaataaaacacgagaacattaagaaaaagttgagaaagatttacattatgtaattaattaaaatacaaatttcaccatccttcatataaagaagatatatttatattcctatttttatttcattcccattacatatgaaatcgcaattatacatgtatacgatgttgaagaaaataaagtatcatgaaaatcaaggtaaatatgggtaataaaattttccaaatattggaactaatttttattaaattctccatgattaattacattatctgattttatttttcggaattttctgagctccattactaattttaaccatacagacatcatttcagtttttatttaaatgaaaatctaaatgaaaaccatactttctctctgggccattttcagcccatttatttcctcagcctgtagccgagccggccctttttccttcggaaaaagtacatccaagatccctcaacttgtcatcaagatacaaaatcgtcccccaattgcaaaaccagataccgggcatccctcgagtaacaaaatcgttcgctttaggtccctcgtagttttaaccccagttttgtccgacatggtggccgagtctgcgtgggacccacgtgagccccacatgttaggatgccacgtcatctatcccttcctcttctatcagttttctcctcatctggtaggcaggctagccggcggttggggaggaagtcgacggggcgagccgggagaagaggaggttcggcggcggtggccagcgatcttcgatgcagcagcggcgacgaccacgcaggagcaggccggtcggcggagcgggaaggcgacgggcggagcggcggcggcagctgcgcctgccgcaccggcgtgccggaggaccgggcaagcagggggcagagctggcgacggcgcgggccggagcgaccgaccggcggagcagcccgcgccgtcgccggcgggcggtgggcaggcgtgctgcaggagaggaaggggctgcggcggcaggtagacgccgtcgtcgccacgttcaagctcggcagccgccgttgtactgctcgacggcggtggccagcaactacaccaccgacagccagtactcgctcaacctcaaccagctcctcgcactgaaaaatggtcaatgtgtggttaacgtgtggctttaactttgcagtccctatagatgaaaactgaatgtgatttggttttgtgttggccatctgaacttgtgaattgattctgacattggcaccatgtatgcaaatgcacaatactcggaggctgagagcaacgatggcttctacaaagcttcgctcggcacggcgcccgacgaggccttcgccctcgccatgtgctacgccgaccggaattgaacggaatgcgagagctgcctacgcgcggtggccatcgggatggcctccctctgcccgcggagccgtaatctaatacggactagtagtctcttgcctcattacacgtaaggggaaaaaagaactggtccaagctagtttttttacttaacagtgtaaaagtgtcttatgacttttcaaaaaacaacaaaaaaatcagcttattttgtttacttaatagtgtaaaaatgtcttatgacttttaaaaaaccaaaaaaaagcaacttatttgagtccaataaagagggtcccaaatccagctattcaattgctaggggtcaaactggactttttcctatcaatttattcacgatccatccatccatccggcccattaatttccttcccattaaggcaaagtgatgattactactccccatctcaaaataaatcgatttaatacttagatatgattaatattttctagtataaaaaatttagatataagcatatctaaatacgttgtatattagaaaatatgtcatctaatattagattggtttatttaagacagagagataagaagaagtaaagtactccatccgtattttaatgtatgacgttgttgactttttgatcaacgtttgaccattcgtattattcaaaaactttatgtaattattgtgacttaatttatcatcaaatgttctttaagcatgacataatattttcatatttgcaaaaaaaattgaataagacgaatggttaaacgttactccctccgtcccataatataagagattttgagttgttgctttcactgtttgacaactcgtcttattaaaaaatttgtgcaaatataaaaaacgaaaagttgtgtttaaagtactttagataataaagtaagtaaaaaaaataaataataattccaaaattttttgaataagacgagtggttaaatagtataagtaaaaactcaaaggagtagtaaaaatatcaacggcgccattcagagggagtagcagatattattgatacgatgaaacgatggatggatggatgcatgcctgccttacctttaatttttgcatcatcccattgattgattcgctgattggctcacccggccttccatgatcgagtagtaaattgatccatgattgcagcccaagaaagcgatctatccacagtacgcaccaaacccaacccccaccaggaggttatgactccgttcaggttcaggtgtgctacctatctgacgagaagcgcaccatgcaggcagctactcctactacttttccttgttcacatcatccatccatccatgttcaacctaagtggagtaataactatacttgcattaacacaaatgaactgctatagcttcatcgtgtaacacatatcacactccaaccaatcatacatgcaacttaaaaaaaaaatcgatattctaatgcccatgaatattacttatacgcaagtgggttttcaatggaaatttagtgagataagtgatgtgccgctaatttttgtctcttttaaacatgtgttagagggtatattcgtgggtgtgtgaatgtggtattgtgtgtatggtggtgtgtgcgcacgtccgccatgtaattgaaaaaaagaagatatatgcaactcccataaaaatatcgatatatcaatggaacacttcacattttttagattatttgttagttaactgatattcccgtaaaaacaatcattttttaacagatatgcagggcgatatcttactttgggctagagggaggctcattgccttcctcctcctccggtccctggcctattcttctttctctacctcatcttcctcttccctctctccttgttctctatatatggtgatattcagcgtgggtatgcatcggaccctggatctgccccggactacagtcaatgcacatgttggatacgacgatatagccatcatatccaacttaaagtttattttgcttttctctttaattaatttggtgcgacaacgacattacactaagtctgaaattggtggattttgccggtctcactacctttctccctaccggtatgtatgtgtgcactactattaccacacaatataatgtacgatcattaattatttgtaactatatatgcaacagatagatgctgatgagatgcaggtctctttcgtgcatgtcgtctaaagtgattacaagtaaagaaagaatctctaagtggatactatgaaatgtctatatagtagggtgaaatggatcaaattaatcccccggcctctagctactaaggctacaggtgcagtgtttcagagcaaggttaatagtatagcccactactaacttcaattcatctatagctaatttatacaatagttgattactatactataaatatatggtcccacctgtcatacacacactgcgttttggagttcgtgctgcaactggctacaaatctgtagcctgctgctcttctctctcatcttttatcttattaaaatatgtttatagctggctaatagtctgctattgtacctgctctcacaggttccattaatagccaattgcaaggtaattatcattagtctagatgagctgcataactagcctacgaccaggcctggacatgcatgatcgatgcatggcacaacgttgcaaatatgagtagtatttggtatttcaggttataaaatatttttgattttggtcaaagtcaaactgctttaagtttaacaagtttgtagaatagtaacatttacaaccgaagacaaatttattatgaaaatatattcaattactgatttgatgaaactaatttagtattataaatattattaatttgtttataaacttagtcaaacttaaaacagtttgactttgaccaaagtcaaaatgtcttacaacttgaaacagggggatattattttcaggggtgggggtggggggaggaagaagggattgccgcatgtggggtctaacaccatgttgtccattttgttttcatgtatgtgccacttcagaccgaaaccgccatgtacttattaagagttaagatatgagagtagttcatacggtttcaaaaattcacaagtgttaaatgtctggtgttaatgtagtagttgaggagtaaatcatgcttttttaggatcacaattaactgtacatgtacaatcttccctactactgcaaatgttctatatatcctccctccgtttctaaatatttgatgctttcaaaattttaaaatatgtttgaccgttcgtcttattcaaaaaattaagtaattattaattcttctcatatcatttgatttaagtaattattaattcttctcctatcatttgatttaagtaattattaattcttctcctatcatttcattcattgttaaatatacttatatgtatacatatagttttatatatttcacaaaagtttttgaataagacgaacgatcaaacatgtgctaaaaagtaaatggtgtcaaatatttagaaacggagggagtatatatgaccgcaaaaatgtatatgtgtgtttgtattatttgtaagatttttttaaaaaaataactactgcatagagtatatgcatatacatggtgaatggttagatatgtaagtggtaagttcaataattacatcctcaaaatattttatgtttttactgtaagatttggttaaaaattatccttaaccgtcaataaattatcaaatgtctaatttaaaaataaacaagataaacttgtgttaaatttgtataatagtaatatacaaatttgttagttggaattaattataaatttttgacagaatcttgtgttagacgttaaatatttataaaccagccaaatgaggtaatagcgaataattatatctaaggcatatatgagatatttagttgagtccattacaaagaatttaaggaacatagtgagaaaaagtaaaaacggtactatatatataatattgtgtttatatttgggacggagggagcaagtagctagcctcttaaataagtatcatcctagtgggggagtaccatctatctatcgatcttcttccacacgcgcgtacgtgtgtgttggtcgtctcaaggttagttattgaaacgtatgtcttatattactaatttgtttcatccccgttgtatatgctatatatgtttttcttatcttatgtagtatatgtaattaaaataaataggagaagaattaagctggttaattattttttctggctggtatatgcataatagtaatatatagaagagattgtgttgcagggtatatatagcaaattaataatagatagatcgatcgatcgagtggagacgatgttgccgagaagccgaacgctcccgccaaggattcatgatggcgtcgtggtggtaagcaagcacagatgttgcagtgttggtaatggagcatattgatagatgctagctgcatgcgcgcgcgcgcggggtgatcgatatatgatatgatggatgctgcaggtagaacgcgatgtgaggaggtaccagcagctgccgcagcaggtggagatggagatgacgacgaccaagaggcagcaggatcatcaggtggagacgatgacgacgaagaagattgatgaagaagatgaagaggtggacgacgacggtcgggcgaagcggagggggacggtgtggacggcggcgtcgcacatcatcacggcggtgatcgggtcaggtgtgctgtcgctggcgtgggcgatcgcgcagctgggctgggtggtgggccccaccgtcatgctcctctttgctgccgtcatctacttcacctccaacctcctcgccgactgctaccgcaccggcgaccccgccaccggcagaaggaactacacctacatggacgccgtcaaggccaacctcggtcggtcgatctagctccttggatcttgcatagtactagtatatacactacacagatcgagatatctgatccatcaatatatcgatgtgcaggcggtgccaaggtgaaggtttgcggatgcattcagtacctcaaccttttgggagtggccatcggttacaccatcgccgcctccattagcatgatgtatgtgcgtagttgttatattttgggagaaagagagagagagagagagagtaataataattaatggaagaaatgcatggtataaatatgcagggcgatccagcgttccaactgcttccacgcgagaggagagcaggatccatgccacgcctccagcaacgtgtacatgatcatgttcggcatcgtccaggtgttcttctcccagatccccgacttcgaccaagtctggtggctctccatcctcgccgccgtcatgtccttcacctactccgccgtcggcctcgccctcggcgccgcccaggtcgcccagaaccgcacgttcgccggcagcgccatgggcgtcgccgtgggcttcgtcaccaagaccggcgacgtcgtcacccccgcgcagaaggtgtggcgcaacctgcaggcgctgggggacatcgccttcgcctactcctactccatcatcctcatcgagatccaggacacgctgcggtcgccgccggcggaggcgaggacgatgcggaaggcgacggggatcagcgtggtggtgacgagcgtgttctacctgctgtgcggatgcatggggtacgcggcgttcggcgacgacgcgccggggaacctcctcaccggcttcggcttctacaagccctactggctgctggacgtggccaacatggcgatcgtggtacacctggtgggggcgtaccaggtgtactgccagccgctcttcgccttcgtggagaggagggcggagcggcggtggcccaacggcctccccggcggcgactacgacctggggtggataaaggtgagcgtgttcaggttggcgtggcggacgtgcttcgtggcggtgacgacggtggtggcgatgctgctgcccttcttcaacgacgtggtgggcatcctgggggcgctcggcttctggccgctcaccgtctacttccccgtcgagatgtacatcgcccaccgccgcatccggaggtggacaaccacctgggtcggcctgcaggcgctcagcctcgcctgccttctcgtctcgctcgccgccgccgtcggctccatcgccggcgtcctgctcgacctcaagtcctaccgtccattccgctccacctactaattaacgatcgatgattgtgctactagaaaggaaataggtatccgatgtatcatgagcttgggctggccataacgatgcaatattaataaggcctcaacccacaagatgcaacgatggtttcaattataaggttgggctagacacggttcatccacatatactagctttcaattactaagtattcttattttcttattgaaagtcgcttgctttttttacacgacaatgcatcacatcaacaaaacatactactagttgaaacctcatgttttactgcggaatttgaggtgaacactcgtcttatgggaagatttatagaacaaacctacaaagggattcacaataaggacatacgatttacatcacattaaaccactaaataagtagaaactaggataaaatgtagaattggacaacatgaaaagtcaaaaacagatcgatcaagtgtttgactcggaaagatcgatgggttcgtggggcgcggcatatattagtctatggcttcatgccagtagtttgcacacatcccgtacgttcgagatcaggccatggcccacgggagtgcgtgggacatggagtacataatgaaaggtacggtggcccaaactcgatcggagaaggcacgtacgcttccggctacacgatcgagcggcgggacgcgggatgatgcaatgcacgacgcgaaacatatatatatatatatatatatatatatatatatatatatatatatatatatgtatatatatatcggtggatgaaaaaaaggtcaacggcgtcatacattaaaatatggaggtaatagtagctagagatagaaattttgacataaataaataaatttgtcctattgccaattctaattgtcaacaatatgttgtcaaatatcttccgaaatgccatggatatgcaagaaaagtatgctgtacgtaatacaccaggactagatcaggttctttaattttacaattaattaaatgcgtggaattctccgttattagaaaataaaagacgatgaacttcctgcctgccatgatatgagataatgaagtcacatctctcaacagagatgatcgatcgatcgagtgctcctagcttgcccgcagccagcacagaaaatcagcgctagcttaattagctagctatacgtggatgatatcatccattgcatcatgcattcatcttcaatcacacttaattagtgccttcatctctttctttctagagacgcaattttaaattaaaaatcggtctccgtacgtacgtcgtccgtcgatcgatgcctaattgagcacgccttaaggtaagacaagcaccaataaggaaaatattatcccttgtgtgtcaactactaacagagaacaaaacgttctctgttgatgtgtcaatcgatccatgcatgttgcttaagccaattaagacaaattgccaaaaaagaaaattaagactttgcttgtccccctcatgacaacccttaattaaggtgcactttgatatagtttatacatgatactggaaggacagacaaaagtaatgttccttgcaatcaaaggttatttcctgatacatttacaacataaattatcctttcaactacataatccaggaaacaagtttgattaaattgtctaacattatacataatattttcgagcattgctccggtccagcatattgtacctcgaggtaccaatttaaatctggccgttcattcacggagggtaagatagaaaatatcacacgctaagcagctcgtgatgctccttctctctgactgagtgactgtgtcaacgaagactccaagagcaactgagcaagtccaaaccaagagcaagggcgtggtgggagcgggacgaggggtggtcggcgccggtggtgccggaggcgttggcggcggggtgttggacggcggcgcgttgggcgccggcggtgtctgcacggcggcgaggtaacgaggagcaggaggggtggtcggcgccggtggtgttggacagcggcgcctgcgtcggaggctgctacgcggcggcggaggcgacgaggacctgcgtcagttgtcgatgtgctcgaatccggtagcgataggggaagggccgcggtaggcgtatgtcaccggcgagcttgggggaagtgatgcacggaggctcgtcggccccctccacctccactccggttagcctgtccatccctggtgagagccatcgatcaatgcaggcatgcagcatcttttggagagagaaaagacaggaggaagatgaagaagatacatgcgaaattacttaactacccttgcttctttagtacctctctatgctctgtaaaatcacgtggacaatactactaggtacaactctttctcacccgttggatcaaacgaaatcgatggctcaaattgcatgtaccggtaggtaccaaggtacctgctggacagtaaaaattatcaatattttcatgtgttccaactcttaatgtatgatgctatcacataaacaacatgtcttttataccggtttgggtggcgtagtacctacgtaatttatgctaaaatctatgtgattttagaaatgacatttcaattcatctatttattagcgggagttggggatatgcccccatcaccttttttttatgtctttcttcttactttaagatttttttttactatgtacccattggtagaactagagatgtaatccatttctattaaactttaattaaattagagtgacttcttcaataaaggatctttatcaggaggggacgatctcaagtagctgccttttttttttctttttaagagaacgctataaaattgatcatatattgaaggacgaaacaaataatccacgataatataatcagataattaaaaggatcagatggacagagggagagagccaaacatagaggggcgggttaatcaggaggtaagaacaagtggagaagacaaggataagagatgagaagagcaatgagctatgtatcaataaaataattgatgacctggcagcttagcttaattagtgcagctggaactgataggcgcgcgattgatagcttataaatcgaaggagggggaaggcctcatctccgtgcatctcgctacctaacctagctaacctcctctcttcttcttcttcttcttcttcttcttcttcttcttcttcttcttcttcttcttcttcttctaggctagcactgcacgtgcccaactaacacatacattcatcatatatacacctcctcctccttcttcctctaagttgtgtgtgcatatataatctactagtagagagcagggctaggctagcaattgcaatggcgcctccctatgaaaccaggtcagtcagatcagaattatatatatttatgtactaattcatgacctgctagcaactagatagtaaaagagttataatctatatatatgaagaaattgaaatctcggtatatatgtatctgccttaatgcatgcagcgccgccggctctgaatcgccggtgccggtggtaacggtggatgtggcggcggcgagcgaccttatcacctcggccggccaccgttacgtcgacgtcaggtactactacctatctgtctgtctgtctttgcatcctcccctagctatatctatcgatatcatgtaggagtatatgaatatcaggatatatatgatccatccttaattaatttcttcatgcatgagcaacgagagcatatatatatacctcctaattaatttgttggagaaatgaaattacagcacatgcatgactatgtgtgctggtatcttcgtctgattgatagagcaattaaacatgattatgcaggacagaggaggaaatgaacaagggccatctacacaactccctcaacgtgcccttcatgttcgtcacgccgcaaggcaagtcagccagccgattaattcactttaatctgtccagatttttacaccatttttcatcgtcgtccaaataactagcgtaatcaatatatatactcttatgattcaatactagtactttaagaatttggaacaagaaattctgtctacacatatcgatctcgttctcgctcaaacatatccatccactcctatcattttcatgaatagtaatttcccactacaaaacgatatactactatatgcatgatgcttctggttgttgggttgtgtctgtacctgggcatgttgagcatctgatttatgaacgtggacgtgtgctcgtccaggtacatacggggggagtaattaacaagcatgattatatttatgagcgttattatcatccatgttgcagggagggaaaagaatcctctgtttgtggagcagttctcgtcgctggtgagcaaagaggagcatgtggttgtggtacgatacgaattaaaattaaaattccccaaaaaaatatttatttgacaagaaataatatatgtgctcgatctaattgacgaaccttgtaataaaaataaacaatccaactattaggggtgccaaagcgggaagaggtcggagctagcatgcgttgatctccttgaagcagtaagtttgatgtttttaatcaaacacgtactagttgcacttgtacttgatcgaccatcatctctctctacgtttctcattgccttgttgatggctctgtctcttgttccctgtttacttcccacacacaaaaaaaaaattacaccatatcacatagaacatttgaacacatacatacatgattaaatataggctaaaaaaacaactaattacgcagattgtgactaatttgcgagacaaatcttttaaacttaatttctccatgatttcacaatgtgggctacaataaacatttgctaatgatgggttaaataggctaaattcgtctcacggtttactgacgtattctataattagtttttttattagtgcccaaacacccatgcgataccttttataatacccgatgtgacacgccaaaactttacacatttgaatctaaacactcccttaatatacatacagtgaaacaaataaagtaaaggaagacgggacaggtcatgattcatactcctcgtctaaaaaaatgaatatataactggatgtaacatattgtagtataacgaatctgaacaacgatatattcagattcataatattaaaatgtttcacatccagttttagattgattttttatagaatagattggttttttatggaacggagggagagtacgagtgagttgtaacatgactgacatacagtatatatgtatctgcaacaggggttcaagaacgtgaagaacatgggaggaggctacgcagcgtggctcgacaatggattccccataaacactcctcctcatacaatgtattaacgctttgcagcaccgatgagatgagcgagtgataaacacggactctactgtatctactgtatctcattccaacccctcttctcatctgcctgctagccgctgcttcgtgtgccctgccatgtatatgtatgtgcgtcctgttttcctgtttgttactactggtattatggaggcagccaattgaataaaattgatcatcatgcatgcaatgcacgatgcgtctgcaaatctccgggatgacatcaatcaaccaagtagctacacatgttcaaggactttattatctctaaatcagcatattgtggccggtttgccaatccaccataacagtaggcgtgaggcagagcctctggttacaaatccaaacgaacgactcataccaaaggggcaggccaccttatgcaagaatcatcaatcaaacgtttgcttctcttgccatctgctatgtgctgcgccgttggcactaaagcattgattgatcgatcacctcaaaaattacagtctcacatctcagactgccggttgcagggcaaagtgtagagaaaccaacatccaaacaaatgaagaccacacatcacacggttagatgtgcaattagctctttctttggacgtccatcgccacagccagatggcgagctccacaggacaaacaaattgatgactacaataagtatgactcaaccacggtccgcccaaacttctgctcaacatcctttggcgtttcaatctgcaaacaaagcaacatgacaaatcatttctctacttgaaaaaaaaaaataaaggaagaaataaatattgcccaaatgttgcaatgagaagctaaatatatttcgagtaacgggcactcacggcgtttaatgctatgaagagagctttgataacattcagggggttccttgaaccaataatctgcaagtaaaagacagaaaattactactatctttcaagcacggatggagtgataactggttgcctatctagaagaagtgcacctttgacttgacgttgctgaaaccagctaaatacagtactgtttcaaccgtcctaccagcagcagacattccacttctcattggtccaggccagaggtatatcttaacatacacaagcagcaaccatgtccacataagttgcagcaaaaccacagataaataagaagagcgctaagatacacagatgtgtttttacctttgtcttctcatatttggcctgaattgcatgagcaattgtgtggtcctcatatcgctccatgtaatggaggtcctggaagcatttctcataagcctgcaaacgaaaaaaaaaatcaataaaggtattggatgccagcaagaggcataaattagctcaggtattagtctaatcagatgtccaaacccgcaattgaggatcctcgacgacaatatataagaggaagctactggtatagggccataagaaaaaaaaaactctactgcatctagtaataaatcctgcattaacaaggatataaatgaaaaaggttctgaaatgagaaaaaaggcatatgcagtgcacataggttagcaccacaatcactgcacaaacatcccaaaagaaaaggtgaacaagccaacaatgaaatggataacacatcagcgactattctttgcgcgctgaatgagaaggcaatcataaagtcgcaccgactacaagaaaaggctctaccaaacaagttgtagacgtggcactgaaacgtaagttgaataagaaagatccataccctttgaattgcaatcttggctgtcggacctctagcttttgcaaatcctacaacaccatggtagtttccagtcgctaacaatgctgtgaattttgctatttggcctccctgagacgtgaaatgcataattgggtaatgggtcagacaaaagggtattactagtaggcgtgatcatttgaattcgaactaagagaattcacctttgtgactttacacgtccgattaacatcaatgaccttgacgtcaaaaccctgtaaagtgcacaagatttgtaactaggtaataccaataacaacaagtgaaagcaatgtaaccacaggatagggtgctggccaatccaatgaaagctcggagatgaacatcacttactttcctgtacataggtctcctcttatgctccgtgagggagttgcgctcttcaacaagatccttaatttcctcctctagaactctgcccttcttaccaaacgtatgatctaactcagctaatttctcctcgatcttcttttcgatagaattcaacttctctatgagcagatcatccttctccttgtcttcattgaattcctcgtcgtcgtcgtcgtcaccagccccttggatcatctgcttctccctgtcaaagccagcattgagcacaagatcctccggagagccgacctgctggtgttggatgaccccgaaattggaggggttgctgggatcgtatgcttccctgcattccatgattctaacagctcggttaagcttctggaggagaagaaagcggtccttgccggtggcatctttgaggcggttcatcatgtcgccgatgactctgtactccagtggaagcttcaaatggcgctcctcgaatctgtcgatcttggtcatccatttgtgggcatcgtcaagggtttctggcaacagcgggaggtgtttgaagtgggcattggcgaaggaaggaaggaaggaaggaagaggggaatgggctttaccggcttcggcgaaggagcgtaggagttcggagtggcggttgcacttgcgctcgaactcgtcgacgcggcgcttgatggcgtcaggggtgtagcgctcgtcctcctcgtcactgtcggagtcggtgggctcccagaaggaatcgtccggcgcggcctcctccttggccctgcggcgctcgagcttctcgatgagcggcttgacgcccaggtagtcctcatcctcaccctcatcctcatcctcctcctggcggtcccgctggcgctctcgctggagctcggcgaagaggtcgtggatgacccgctcgctctggatctgcttgagcctagagctgccggaggaggcgttggcggagaaggcgaagtggcggcgaggggaggcgatccgcagggttagatggtgggtggaggatacgggagggctggggcgcagggagaggaggcgcgcccacgcggcggaggcggcggcgcgggaccgggcggcggcggaggaggccatgaacctcccggcggcggaggaggagaagggttttggtagccaagtgactactggaccttccggactatactgacttgtgtgtcggcctgcccccatctacatttcttagtggcccatctatctatctatctatctatctacgaataagttcatttaaggtcctttaacttgacagcgcgttcgattttatccttgaacaaaaaaaaaatcagatacaacgggtccctcaattatcaaaatcggtacaatataggtcccacgacagtatatcgggtggttttgtccgccgttgcaatctaagtcagcgtgcgcccaacatgtcagggctcccctcacccgttattctctctttctctctaccctttcccccttccttttcctagtctaatactccaataccatcaatgatgaagcagggttaaggatacctgttgggagggtgggggatgaacatcggcattggcacagcccctcttccctatctttcgtttccaacggctgtaggatagaggtagctagcggtggtagaggcgggacacgacgaggtggtagtagtgatagccgatgaggagcaaagggagaccaaggcccgcgacagtggtgtcgacatcttccttgcaactgacattgtcgtcgttggctcgtcttgtcaccatctccctccgacgcaatggtgcaaccccatattcgcatcgccgttacatcagccacacgaaggaggaggatgaagggagctcaccagcgatgaggagcagcgagaatgaggacgggcgaaggaggagctgctggaggcctggagcgaggtgacctagtaggcaagcagtggtggcagcgggcgtcgggacagggcgcaacggtccatggatgtcaattgtcgtcctcctcaccattggtcttctctagtgacgctttcaccacctccaccgatgctaaccctaacgctggtgctgccatccccacctctaccgatgaacatgccaccccctctgcccatcacatgtgagcctaccaccaccacccttgacgtcatagtcggcctcctccagctccaagtccccccaacaactggaccgtgctggccaatgagatgtgaacaaggggaggaagagagagagagaggtgaagagagccctgaatacgggtcccacactaactcacacgctgttgactcaggttaaattgtcacgtcggacaaaaccatcaattatactgtcgtgggatgtatatttgttaacagtgaaatttggtaagcccggagtaatcatcggcttagagtcagcatcgtcttcgaagtcctgagattagccgatgagagttgccaagtcgtcagttgtcgaattcttgctatattcagttaaggaaattgatctactaaaggaagcttatccagaagagaccgagttcaaagagaatacggcacgacaagttatctattaattaggaatagtttattagtttccttttatctttaggaaagtgtgtttagtgttctataaggactttatcttttccttttatctttaggaaagtttctttcttgtccgacaaggatttgtatcaatccatgggtataaatatgtacacccggggtctatgtaatttatcttcacgatcaatacaattcggcgcatcgccaccttttaccttttctactttattttatcgtccggcgggacttggcacctgacgcggggctgcatcggtgttcgatctccagagaaggggtaagtccaatgttccgtcggcccaggcaattgtctcatctacatcggcgtcgttcaaggctgcattagtacattcgacctcttggattgctctggtttggatgatatatttgcttacctatttatcatatgtctctgttaatctagtcttagcatatcaatttagctctatcggctgcttctcgttttagggtttctgccggtatcggctaaatcttcatgctagattagattagcttagacatctaccaccctgaaaattcagtcgacggcttgattgtctagatattgtgtttcttttcatacttagtgctgcatcagttaagtttgatctactaagtcgtgcttagaaccataatctctagcctgcctttgactgccaataagggtttcatcggggtttcagccgatgagttatctaggcgttgcatcgactcataaggattgcatatacatataagttggatttagccgatgacaacaaatgtttcactgtttaatctaatattgtggatttcatgacatcggacctccagccgatgtgtgctttaaccttcggatcaatgcctatttatcatatcattatttaccgattggtttatactagattatattgttattttattacatcatcatcagccgattgcctttatatcatcatctacattggacatatagccgattgcttaaaccctatctctatcggctggtataggcatcggctattatcgtctatcggctggaactactccatcggcttgtcatccgatcgactgttttgatctactatttgcatatcttgtcagttgcaggatcaaactgactggcacgcccgcatctcaccaatctttggacctgcacaagagctaagcagatctcctaggccggtgtgttcgattttttcgtcaacaatattacaccggttatgacggttgagtgatccgttatatctgtttttttttttctgttaaaggatgacatcagactcgttgtcaagttaagggacctataatgaacttatttcatctatgtatcacatatagaatatgattggggtccagcccaagagagtccgacagatagcgaggaggaggaggagattagtgtctacaaaagagaaggaaggaaggagaggcggagaggaaagagaaagaggatcgtctcggctcgtcgtcttctagctagggttcgtaagttctagggtttgcgatgatccccaactcctcctccctctagtatttcgagcgaattctccaacactttcacccaaccgcgcgcgagaggagaaggaagatagatagatagatcgctccgcacatactatggtgctcaccccatcgccgtctacaccgccgatgctccccaagaagctccgcgcgctcggtcaaggcttgaatccctttgctcccttcggcatgggtaactactattcctcctctcgctaatatatttctcctcgctcgatccatcttcccccacctccccccttctcaaacaattaatccccttcccgattcgattcgattcggttcggttcgctttcggactcggtttcaatttcgattctccctccgtcgtcgcggccctattctagccgccccctcccctccgctcgattgcctgcctccggatggtgcaattccgcagctctctcagcatgagccgggcacggacccgccacggcgatggcgacgaccgcggctggaaccagctccacgtcgcctcccgcaagggcgacctcaaccaggtaatcctcacgttgtcatctcttacgttttactaactgctctattataattatattatgcattggcttattttctccacgcagcaccaccaccatcgtaatgcttctttaaagataacgcatactcttctactacatagattataacagtactgaatgattatagaggagggttaacaacaactcataatttgaatcaaacaacaaggaatgtaaccatctctgcaaatagtaataaaggataaatactacgagtagtaaattatcattagtcgccaaataaattagccttcatgtcatcaccattgaaacaataaatttgatttttcttttttttcttcctaaggtgaggcgtctcctggatgatggcatggatgtcaatgcacctgcatgggggccaaaatcacctggcgctacccccctgcatttggctgctcagggtggacatgttaaaatcatggacgagctactggagcggggtgcaaatattgatgctcgcacaaaaggagcttgtggatgtaagctcaaatgtttcttcccagtcattgcatgcattttcatgcttctagagcttgcctattctcttttatttacgattggtctgagagcagtttctatttattattattacatataaagaaggtttcatgcccccccttgttttcagtcctctgttgagcagattacttctatattcactactgctgcttgattgcacaccccatctagtttagtggattgacttgtttttattcaatcattataggagaccatatccttgaatgaaagctactccatgtttcatatactcagaagtttctgatgtcttgctcattagatcgaaacgtacaagtaactttctcatgaatggtgtatgtcttcatttaatacctgcaatgttgtactatgcaaattgcaaataccgtaatgttctggatgaaattatttatttgctcagttttctgttcccaacttctccagtggttttaaatttattaaaacaccttgtacactcaaagaggaggtcactttacctccggaatcttacattttcctcgtttggtggaatcagggacccctctacatattgctgctaaggaaaggaacaaaagagctgtcaggtttctgattgagaatggtgcattcttgccacctgacatgaatgaccacaggttcaatcctcctctccattactgctctggattggaatgggcatatgagatgaagcgcatgcaagacgaaagtgattcgaccggtgaaacttctctgggctcggagagctagaggaaagcaatctcctcagtctggcaaagaggtcaatcttggatcaacagagtttgtaaacatcaagggtcacgtttactttgtgaaattggaacgaattaccatgtgaatcttacatgcgacatggtactagcatgcattgcgatgttgttgtggggttacttgtgttttcgataattgcattgtgttcttactacactggtagcatgtattctactacacattcttaatatcagaatcaatatccggtttgcgtcctatgacagtatgcaatgtgtttcttttttgatgttgttgctcttactaagaaataggatgtgttgacgcttatcaccggaggttctactactttggctgcaaggtcgatggagccacatacgatacgaatttacgctcatcgtcaattcatcatcattaaaaagaaaaaaaatcagcaatagcacagtagcagcaatattcattcatatcaacgggcagcagggtacagtggattaataacgaaacaagtcaagagtcactagtctacatacatgaaaacgctgccccacctatgaaaacttgagccgagctactaaagttcgctgcaatacatcatgcttacgagttaacaccaccggcatgcatccatccattctgcacacaggcaaactaaactggatggaggtacataagcttagctcacatgcactctggctgctgaaccaacgttttggatgatgaacacaaagactccctggacttcctccatatcataacagcatacaatgagctgcccgtaaatctaccgcctcacaggaggtgcaccaccccgtccaactggaccaccaccacgaccagcagcagcctgcatcaattggaggtcaaaagattaaatgttgcgacaaacagagcacacatcaaaaaacagccttgaaggccagttagtacatgtgcataaccttacgctaaatacttaaaggtttgtgtaatttaaatatagatgcttcaaggtgatagatgaagggaaagtattaacagagagaagattaactttgtacttgttaacagttgacataatatttgtcagcttaatttcagaatcacggcataacgcaatttatattgtctttagtaggtttgaaactcaatgcatgaaatcaatggatttgcaagcactgattatataatagtagtagttaagattcaccagcctatatcatttcagaatcactgcacgatgggatactgtccttgttccttaatggagttaaaacagagtgcataaagttaatggtccttgagttgatagcaatatgatggaccatcacatggttgtaaacacattcacaattaaatattctgcattatatgttgggcaaatgttactgaaagaatgaaaagcagagtatggttataggaaaaggtaaatggattcattcagtcatggagtcacccatctagtaggttatatggtctaactgggcactggacagccaaccacgtgagcaaacaggcaattcaccaaaatatagggacacccacttcatgtatatgaggcaagcatgatatagtagaaccattttttggaacactgagacatgagcaattttgaatatggcactagggaattgtggcaaaataagaaaagtaaccacataataccaagcatactaatgactggatagaaacttcctttccttaaaggtaacatgactcctgcctacaatggttatttcttagagcagctgcagattgtcatgcaaaaagatgaggcaaagactccattgatgaattgataggtgtggctcagtttcggtttgcattatggtgctagggcaagatttagttgcacaaacactagctcataactctcctatctgaagatttatctgtctatgtcatggttagccatcagccggcaacgtgattttgaaaaaaaaaagaaaaagaaaaaaaagagagagatgtttttcatcagaacaacaaacaaggaccataacagttttaaatgcaaaggcttaaaattatttgcatgtactacactgaccagcatgagctccctgaaaatagaaatccagtgctatttgctttctctaatcgaattttggccaagcaatactgatgaatcaagcagtaggaggttagatgtgaaatcttcatgttgaaagcaagcagttgattacccaatggttatttctaagaggacctgctgattgtcatgcaaaaagatgaggtaaagaccccattgacaaattgatatgcgtggctcagtttcaatttgccttatggtgctagtgcaagattagttgcacgaaaactaggtccaaactgtcctatctgaagatttatctgtctatgacatggtcagacggcaatatgatgattttgaaaaaggatgattttcatcagaacaaaggatcaggaccattatcaatttttgcatgaactccctgaaaatgccagtgctatttgttttctctaatcgaatttagagcaagcagtagtaatgaatcgaacgctagaaggttagaagtgaaactatcatggagaaagcaagcagagcagatgattacccgagcacgcatagcaacggcacggccacggccaacaccaatagctgagcctttaccctgcaggaggcgagaggcatgtcacaatccaattccaagaggaggaggagaaaagagagtgggtgaaaagaaataccctaatcctagcctcgaggcgcttgaacatgggggcgttcttgagcatgtcgggtatgatcatgaacctgaccctgcttcctctgatgaagacgtgctccagctgggagaccttgccgtcctatacatatatatatgtgcacagaaagaatcaagaatctaagaagaagaggcgcatgattcgaaggaaggaaggaagggtaccttggcggtgaaggtgatgttgtcgagctggcagttccagttgtcctcgcactcgaccatggagccgcggtacacctcgccggtcttgagctccacggtcaccacgtgccccgccgcctcgtgcagcagcttcactgggataccaaggctgcggctcatcttcctcctagggttgggtagagaagggaaaccctagctaggcagacgcgacgacgagttgttgttggtggtggtggtggtctggtggaggaggaagatggcggcggcggcggcggaggggagtcgagtcgagtcgaggagggcagatgagagagatggaggcgagggggcgacttcgatgggcccaagcccaataccatcaatatgaaaggcccaaacttgtctctgccaaaccttcagaatttgggcctaaacacaacagagcttctccacgtttcaataaaaaaaatcgtatttaacgttgtaatatggcttatttatgccttttgttaacaatgtagaatgtattaaataacatacaagattaaacccccttgttaaaaggaatagaaatgacaaatctccgagacttcgtatcttaaagtgtcatataagatatacaagcaaacaagcctagttaactccaaaagcatgtgaaagagtatcggtcaccatatttgttcctcatatatatatactgttgagattatgggcatataatgatttaatttattccataaataagtcatgacattacagatgaaaactagcatgaacgcatcattagatctacacatgtaaactacgcagaataacatgaacagatcaaatatgcgcaacatattgaacacgtaccgaggtgacgaaaagaccggctgcttggtcgaaacttttcgcaggtgtctacgaaggcacgaaacacgcgagcgaagaggaaggcgagccgtcgcgaacgaacagggagcagtcgcgcgaagcgcttcccaaaaaccttattgccgccttctcccggtgcaggacgtcaaaggcagaggttccggagacctgctctcccgatcgctggtgcacgccgggtctacgagcgacggcgcagtacagagtaggaggcaaaccctagattgattttcgcatatattgcgtgaagacggcgggtcggtttatatagagaaaggtcgcttgatcagggcgcccgcacgatctctactgcgcgtaaccgaaccggataagtcgcgcgtaacttatccggactccacgccgtttgcacgcatcggatttttcggaacgtttccaaaacaaaaacgaatccgaatttgcagcaaaacaaaactgcaaaaagaggctgcatctgcgcaagggtgaggagccaatttttcggaccattcgacgcgtacgtcgtgcacgcgcgccgcctgccctgccctgccctgcccaggccaggccaggccaggcgaggcgaggcgaggcgagcgagcgcgcgcgtgtgtttcccctcttctctccaccacacatgcttcaagtggctaggagggcatcctcccttttaaggaggtccccctctcctagaataagcaaggtggtactaaactccacatgcatgccatcccatgaggtgggcttttgtgattttccaaagaattaatcttcgagtgggctaagacccattcattaattccaacaatcccccaccaaatctcaaaatcccactgagatttgccttttccaatgtactgtttatataccagcggttcgatggagaccaattaaggttgaacatccacctagaactccaagctacacttactcacaacttgaacaatggactacgccttgaattgcaagtcttgtgcaagcaagtttcactcaaagtcttatctggtactagaccgtctgtagactacccctcgggtggagcgtataagtcatactcctaggtctttagtaagcttcctagaagattcacccaaaatcttcatggactgcgaccaacagtcaagctcacaaaggtgagttccttcaagaatgctctgcaggacaacatctttgctaattaaagccaacagaactcattaaggcatagccaacctgccttgcagctcacgagagtatatgcatcttcacttagagagggtatatatattggtactctcctctagtttattaatggtttgttcttcccaggatctaattcacgggatctccgatcacatagactgggttaccaccatagtataactcacatgggtctcaaacccatctccttcgatgcattgtctatcacatttcgtgatagtcccttcgtgaagggatctgccaggtttctcgctgtttggatgtaatccaacgctataactccggagtttcttaatttcctgacagacttcaatggtcttttcacatgtctagacgatttcatattatccttagaactattcactttgacaattaccgtttgattgtcacagttcataaggatagccggcaccggtttttcaacaacaggcagatccattaatagatcacgcaaccattctgcctcaacagtagcagtatccagtgccgttagctctgcttccatggttgacctcgtcaaaattgtctgtttgcaagacctccatgaaacagcaccaccacccagtgtgaaaacatatccactagtggctttgatctcatccacatcagagatccagttagaatcactataaccctccagtaccgcaggatacccagtatagtgaagccccaattccacagtacctttcagatagcgcattactcgctcaagcgcacgccagtgatcatctcccggattagaggtaaatcggctcaacttgctcacagcaaagaagatatcaggcctagttgcactagccaggtacatcaacgagccaatgatttgggagtattccagttgattcctagcaattctcttgttcttgcgaagcgacaagctaggatcataaggtgttggagaaggcttactatcaatgtagccaaagcgattcaaaatcttctccacataatgagactgcaagagtgtaatcccattctcacctctaattagcttaatgtttaaaataacatcagctactcccaaatctttcatatcaaaattttgagacaagaatgatttaacctcatttatcacctcaatgtttgtcccaaatatcagtatgtcgtcaacatacaagcacaaaataactccctcacccccaccatggcgatagtacacacatttatctgcctcattgactgcaaagcctgcagatgtcaatgttttgtcaaatttctcatgccattgcttaggagcttgtttcagaccatacaaagacttcaacaattgcacactttgccttcttgaccttcaagtacaaacccatcaggttgatccatatagatctcctcatccagctctccattaagaaaagctgtcttaacgtccatttgatgaacgagaagaccatgtgaggctgctagggaaagtagcacacgaattgtggtcaatctagcaacaggtgagtaagtgtcaaagaaatcttcgccttctctctgagtatagcccttagcaacaagccgagccttgtacttttcaatagtaccgtcaggcctaagcttcttcttgaacacccacttgcaccccacaggtttacacccatagggtcgctctgtcacctcccaagtcccgttagcgataatggaatccatttcactacggacagcctccttccagtagtctgcatcaggagatgcatatgcttctgaaattgacttaggagtgtcatccacgaggtacacagtgaaatcatcaccaaaagacttagccgtcctttgtctcttactccttcgaggagcttcactgacatcctcctcagagacaagttcatgtgtatgttcagtttgttctggtggtgtgattgaactgggaattatttcagagggttggttcgaaccactatgtgtatccttcattgggaaaaagctctcaaagaaggtagcatcacgagactccataattgtaccaacatgcatgtccggtacctcggatttaactattaaaaatctataggcaatgctatgatgagcatatcccagaaaaacacagtccacagtcttaggtccaagtttgcgcttcttcgttattggtacattgactttcgccaagcacccccatgtgcgcaaataagaaagtgatggttttctaccaatccatatctcatatggtgttttgtccttatttctgttaggaactctgtttaacacatgatttgaggtcaacaatgcctccccccaccatgccttaggcagtcccgcggtgtccaacatggcattcaccaagtcagtcagtgtgcggttcttcctttcagcaatcccattagactcgggagaatagggaggcgtcctctcatgtatgatgccatgttcctcacagaataagtcaaactcgttcgagaaaaactctccaccacgatcagacctaagcctttttatctttctgtcaagttgattttcaacctctgccttataaattttaaaatagtctagagcctcgtctttcgttttcaacaagtacacatagcaaaatctagtagcatcatcaatcaatgtcatgaaatatcgttttccacccttcgtcaacaccc

SEQ ID NO: 20679 - DNA, 5924 bp, Oryza sativa
tcctgcagcccgccaaacattagcctcatcatccacactgccacaaatatggttcacagacttattgcagaaatcagaaagggaaaagcggaacaggcctccgcactcataacctttaccaataaaatatccatgtttagacacgactactttattagactcaaaaaccaacttaaatccgtctctagtcagacgggagccactaacaagattcctgtcgatagaagggacatgctgcacgttcttcagctgcacgatctttcccgaagtaaacttcagatctaccgtgccaacaccatgaacagaagcatgtgacccattccccattaggacggtggaaccccgtgcgacctgataagaagaaaacaatgagatgtcagcacaaacatgtacattggccccagtatcaacccaccaattagtagattgattaactgaaaaaacagtaggtaaattaccatacccgcttccatctccagtgttgccaatggtcacattagcagacttagaagtctgccctgcaggtgccttcatccccttgcgttgtggacacttcctagccagatgaccaacttggccacacacaaagcaagtcctctcatcctgattaggattgttgttgttcttcttctgcttcttgaagttggtggtctgctgagctttgtatttccccttgctcttgttctgggccttgtgcacaacattggcactggactgcccaccatcgcccttagacgcggcatctttttcccgagctttctcctcaacatcaagagacgcaatcaacccctcaacggagtattcctgtctcttgtgtttgagtgcagtaccgaaactcctccaagatggaggtagttttgcaataatgcacccggccacaaatttgtcgggtaagacacacttaaggagttcgagttccttagccatggtttgtatctcatgagcctgttcgactacagaacggttgtcagccattttgtagtcatgaaactgctccatgatatacagatcattgctagcatcagtagcaccgaatttagtattcagtgcatcccacaactccttagcgtcggtcatatgcatatacacctcgaccagacgatcgccaagaacgctaagaatgcatcccacaaagagagtagtggcttcctcgaattgcttctgctgttcagcagtaagaactccttcaggtttgccagtactcacccagaagcatttcatagctgtcagccacagagtgaccctgatctgccatctcttaaaatgcacaccggtgaatttatccggcctcagtgcatcggcaaaaccagccatagtaaaatcacagtgcctataataaggtttttggattgttgagattatgggcatataatgatttaatttattccataaataagtcatgacattacagatgaaaactagcatgaacgcatcattagatctacacatgtaaactacgcagaataacatgaacagatcaaatatgcgcaacatattgaacacgtaccgaggtgacgaaaagaccggctgcttggtcgaaacttttcgcaggtgtctacgaaggcacgaaacacgcgagcgaagaggaaggcgagccgtcgcgaacgaacagggagcagtcgcgcgaagcgcttcccaaaaaccttattgccgccttctcccggtgcaggacgtcaaaggcagaggttccggagacctgctctcccgatcgctggtgcacgccggcgagcgggatggagtagtctacgagcgacggcgcagtacagagtaggaggcaaaccctagattgattttcgcatatattgcgtgaagacggcgggtcggtttatatagagaaaggtcgcttgatcagggcgcccgcacgatctctactgcgcgtaaccgaaccggataagtcgcgcgtaacttatccggactccacgccgtttgcacgcatcggatttttcggaacgtttccaaaacaaaaacgaatccgaatttgcagcaaaacaaaactgcaaaaagaggctgcatctgcgcaagggtgaggagccaatttttcggaccattcgacgcgtacgtcgtgcacgcgcgccgcctgccctgccctgcccaggccaggcgaggcgagcgagcgcgcgcgtgtgtttcccctcttctctccaccacacatgcttcaagtggctaggagggcatcctcccttttaaggaggtccccctctcctagaataagcaaggtggtactaaactccacatgcatgccatcccatgaggtgggcttttgtgattttccaaagaattaatcttcgagtgggctaagacccattcattaattccaacatatacaacaataaactgtgaacaagcctgtcacttgcactctaaagtaggtactgccgatatgataattgataacccgacaactgtaacttcacaattcttcgtcgagaacttctcgaaccaagaagccacccataacgaaatagaaaaagcaaaagactctagacaaatctaactccttaattgttatggaaagacaaaaccctatacaacaatctaaacttctaaagacttttttagaaaagccctttaaatacctaatgtaaaccaatgagaaacgggtcccctttctgctcacctctggtgaatacagtagagatagaggaggaggactgtacattgtaagggcttcgcgaaaagaacgagtggcttatttacactctagacttgtttggctaatgggatggtaaaatgatttcccacccaccaaaagacattttaaatcctaaccattcattctctctttcatttaatcataatccttcatctatttctcaatcccaatcccacccccattttccattatccaaacacacactctggagatgatgcataattttttttcttataatttaacatataaaatggactatgctcatttctttctaatatcaaatccaaataaaaaaaaatgtcttggttcatagttcatataagctgagcagcaaatatctatactttgggaatgttttctctaaagtttgacttttgtcatgtccagaagataaaactacaaagtcgaaatttccttaaaaaaatgccttctttctaatctccactccagataaaaaatatatattggtttgtagttcacatatgtaaaaacaatggagtattgtttatttggacaaataagttttgtacaatttgagaatttcacaaatgttgaaaataaggcgagatgaaaaatacaacctcaaaataaaaaaaaagacacaacaactagagaatagtactgtgttaacttttctgaaaaggctacgagtaaaaaaaatacttcttccatccacaaaagttagacatatttcacatttgagtttttccaaataagttgtttctatttgtagtctttatgcatttaagacttaaataaatagataaattaaatatttgattagaacccaaagagtcatctaataaatactcattggttgcatgcttatattcactccttaattttgtagcatctaagataatttaatttctccttagtcttggtgacaaaagtaatattggtaacttttatgtatagagtgagtgtttgcaaaactagatttataacttccatatagttagactgaatgaattagtgtcgtttctgtctttcatgtaagtataataataaaaaaggaatgtttttcctttcataattaattgcgtgggaaattatttatttagcaaatagagcaaaaggaacaatataatgaaggaaattaagaagagaaggggaaaaagaaattaagagttaaatatataatgaatagtttgtaggtgtggcaattaagcgtgagtttcggtccgccaaccgcgcgctcttggtcgaccacaacgcatgctactctcagcctcagccaaccaattctgcaaaatgcattgatcgatcgatgttctctcctccctagctgcggacggacttggatccatccatctcccattcattcattcattcattcatgtggccatccatccaccatcttgcatgctagctagctaccctgcaggcccataacgacattattcaattcgaattaattccatcatcatataataatatatatgatgctgagctcgtcggcgtcgaggcgggaggtcggcggcggcggcgccgcctccagcaccaagagcggcgagctgtccctgtccaaggtggccagcgtggccatacgggagtcgtcgggctcgggctcgggcgggatttccaagagcagcgaattgctgtcgagggcaggaaccatggcggcggcgagggaggcggcggcggcggcggtacaccacgaaggatggatggtgcgctacggccggaggaagatcggcaggtccttcttccacacccgctacttcgtcctcgacagcaggctcctcgcctactacaagaagaaacccaaagacaacatggtacccgccctaactccatcatcattcattaatcaatcaattattactactcgtactaatttcaaacactcttactatcactgccttgttttaattttccttcccctggcacacgcttgtctggccaattacattgtgtaacaaaaaaactcttttcattctaatatattgatgcgttcgcgaaaaaaaaacactcttactattacacatttgcactactactcatagtaaattcaaacacacacacacacactatatatatatatatatatatatatatatatatatatatatatatttggcaccaaaaattaaatatgcattaattcagtcacatcatctagaatatagtagcctttggatccttcttatgctttgatctcaaccatccatttacatatgcatttacaacccactaaatacatagttattagtataaaattcaatgtgcattaaaccataacatctacaaaactaatagtcattggatctctctctcatatttgatactccctccatccctaaatatttgacgccgttgacttttctttttatacatatctgaccgttcgtcttattcaaaatcttttgtgaaatatgtaaaactctatatatacataaaagtatatttaacaataaattaaatgataggaaaagaattaataattacttaatttttttaaataagacgaacgatcaaacatatttaaaaaagtcaacattgtcaaatatttagatatggagggagtatataactatcccagctgtcatgtaaaattgaaatttataatcaactactattgagcaaatattctctatttacatattataagtacttgatttacatattgctttcttttaattttctataaagtatttttaaatttcctgctgcaatgcgcgggatatgcactagttatatgtaataatgttgtacatgcatatatccatgcaggtgccactaaaatcgctgctgatagacgggaattgcagggtggaggatagaggactcaaaacacatcatggacaagtatccattatttcttctaatttatctcctttccgtaccatccttcttctcatgatatactgtatcaaccagctggcttttacacctgacattgcccccgtccttctcaattgacgatgtatcataatgatccttaattttcagatggtctatgtcctgtgcgtttataataagaaagaaaaggagcatcagatcacggtttgttctaactaaacctgactgcatgttctcgatctctttcattcagcgttatatcagtatatatatgactagatttaattcgcagatgggcgcgtatgatattgaggatgctctggcctggaaaaagaatatagaactcattatcgatcaggtgcagtaatttttcttcatcttacagttttgactttgcatatgtaaacacaacaagtaattttggagtactggataattctcaaatttcaatgaaaatccattttca

SEQ ID NO: 20680 - DNA, 7487 bp, Oryza sativa
aatggactttgatacggaactaggagggcagtttatattctcagaccatgacagcgcgtaagtgacatcccatcttctctcttagattatcttacaaacgacaaccaaacaagatctgaaataagctgaaatataatttcactacgaatatatgcagagctgaagatgaagaggaacgacctatgttgattcgcaggacaactatagggaatggtaacaagttatctgcaagttttgttcttaatttccgtttgtggatcgatatgctacagaaattcaccacctcatttctggtgtgctaggtccccctgaatcaatacatgactggaccaaagagcatgatatcggtccacccaatcagattgaccccattcaagttagctccaagaagaattggcgcctacttagatgccaaaatggcaagcacacaagactcctcctcctcctccttaggttatcagtcaatacttgtctacttgttgcttacttccttgtcattcgcaggactacgcatctttgaagaacttctggaattcgattatcttgtatgtccagtctactcactctcgactactgctagacagttaattgattagatactatgcatcttctgaaattcttgatgatttttcacttgtcctgtgtaggcaagaagctgtagcagagctatgcgagctgttggtgttgtggaagccacatgcgaagccatttttgggctggtgatgagcatggatgtaacaagatatgagtaagcatatttactactatcacctatatatattcctactacagttacatattaatcttgagattacgtactgatgtttaattattgatcatcacgtataggtgggactgcagctttcgctatggtagtttagttgaagaggttgacggccacaccgctatactgtatcataagttgcagttgcactggtgcccaatgtaactagtcttctttcttgtccgtagcattttcaaacatcctcctcctcttcttcttcttcttttttttggagaaatttcctcttatttttgagtgcacaactaaatggtagtactaatatttcggattatctatcagattgaaacttacacattcttccattctacatgaacatgcaggttagtatggcctcgagacctatgttatgttcgctattggcggcgtaatgacgatggaagttacggtaaaaatattcaaatcttttccatggaatttgctgttttgtagagcaattaatttctgattgtttgtttggacgcagttgtgctgtttcgatctacagagcatccaaactgtggacgtcaaaaaggatatgtgagggcttttattgaaagtaagcttctctctgagcatctgaaatcctgcattaatttacctgctgagatcgatcaggacaggaggaggagagacagtatactagttccatagaaaacagacagaaataaatgtcaaatgaagttccttttcttttctgaaattcctactagttcaggtggaggtttcaagatttctcctctcaagtgtcgcaacggaagaccccgcactcaagttcaacacctaatgcagattgatctcaggggatggctcctcaactactctccttcctttcagtatcattctttgctgcagatacaaaactgtgtagccggtactaactactgccactgctcgaaacttagtttgctcaaatgaattagtgccatcatcttactacttcactgttatcctaattaactctacttacttcaaggcctacgagaatacttctcccaaacagacgaaacacatataactccaaggattcctgtgatggaaaacatggttgacacatctgcagtacagaaagatgacaagaagagtaccgaagaagtagactccaagactaaaacaccagatcgaggacaagcggacagtaaaaacatgggaatcattgatgaagaaacagacgaggatgaggactatcaggttcctgaagctaacatagaggtgcttcatggccaatatataacattacatatgaacagtgaatgagttttttgtgtttcctcattctaactaaactgtgatcaaaattaattaatgtgcaggaagatcctaacaaagatgctaagcgtgcaggtatgattcctttttttttctgcaatttattttggtattaatctggtaagttccataggcaatcatatattcttcccctgtaacaatgacacggtttgccttgtgattatggcagacgaaccaccagaaaagattgatctatcatgcttttcgggcattcttcgttgcgatgcggatgagaaaagccgaaactgttggacagtacctgacagcaagctgtttaaagtccgtagcaagaacttcccgcatgataaatcaaaggtccaagcttttattgcttaatttgtttctttggaattgaatccagtgagtgagattatatgaagaagctgagcacactgctcacattgaaattacagatacctgcagcgagttacctgatggagcttgcggccattgactggtttaaggacagcaagcgtatggataacgtaggcaggcagaaaggctgtgtagcccaggtaaacataataaatcttgtgatcgatgatggcttatcctatctgaagttatcaagtagtatcatcacagaacttggcggcttggtcgatgtttgttttgtaggtagctgctgagaaagggatgcatacatttgttgccaacatacaggtaagtatgtttgcagattcagagctagctagctagctaggaggaaacattggcaatcaaagttatagttatgggtgtgtatatatatattgtgttgtagatccctggatcaactcattacagcttggtgatgtacttcgtgacaaagtcgctgaagaagggatcactgctgcagcgattcttcgatggggatgatgagttccgcaatagcaggctgaagctgataccctctgtacccaaggtaggtagtccagctgttggtctcaggtagtgaactgaactgaactgttggtctcaggtggtggggtggggtgtgcccgcagggatcatggatagtgcggcagagtgtagggagcacgccgtgcttgctggggaaggcggtggattgcagctacgtgcgtggagccggatacctggaggtggacgtcgacattgggtcgtcggcggtggccaacggggtgctgggtttggtgtttggtgtggtgacgacgctggtggtggacatggcgttcctaatacaggccaacacctacgaggagctccccgagcaggtcatcggcgccgcccgtctcgctcacgtcgaacccgccgccgctatcgtcccccaggaccttactccccctcctcctgcccttgccgacgacgacaacgccgctgcttcttcctccgaggatgatcatttgtccaagaaaaccaactaagctagcacctctctcaacgcacgcactgcaacttatcaatcatttatcttcttgtaatttctaattatttccgaggctcatagcaagctttgttttttttcttttcatctttttttttatctcgttaagttgtttgcaaagtacagctggttttcttctacgtaggaacaaagataaatctagctagtgacagtatttcgttggaacctaatattatagactgagatattttgtttaggcttagatttgctgtctttggctttaagtcagacttttaattaacttacactccctccatttttttaattgacgacgccattgacttttgaacacatgtttgaccattcgctttatttaaaaattttatacaaactatagaaaagcccgtgcgttgcaatgggtgataactattttaatcttattattgttatatggtttagttacgatgaaattcactgtgagaattcgcttggatttatatctctactgttttaaaattctgtagtggtgacggtgactccaaccctgacagacacgcgacttattaaccgtgggattggcagatcggacggtgctgaggatcccatcgcacgcgctcgctatccaaccgtcgacgccgctcccctcatccttcgccgcgcccccaccacgccttcaccgaccgccactcctgctcgcccgaatcgacgccgccgccgtcgcgggtcgacatcgccgctcctcctatcgcgctcctccccgccggcactgcctccatccatccgccgcgtctcgccgccggtcgcaccaccgatccattcctcctccgccgcctgctctcccggtccctcccgccccatcgccccaacacccccccccccccccggcaccgcctccatccatccgccgcgtctcgccgccggccgcacccccgcttccatccatccactgcagatcgccatcgcacgcctccgcctctcaaggtcgcacgctcatcgccgccgctcgtcgcccgacaccccgccgattggggaccggacgctgaccctgcatcgacgccacaacagccgacagatgggagatgttgaagacctcactccaacgacggctgcgcgcggtgacactaccaggcgttgagggagagaatgcagtgcgaggtgcgacggggttgttcgtccttgcccagatcaacgccgccgccgatccctcactcgcccctcgcccaggtcggtgccaagggcgaggttcgccaatctgcttcccagccgcctcgcccgctccatgggagaggtgacacctgtgcccgcctccagcgctccatgcccccggataccatccgagcacgatccctccggcagaacttctgccggagaagggacgcatggttaattggttcgttctctttacgttgcaatccattcatttgtcaagaatcatcattgtgagtgccgagggttattacagattacaggatcactaatgctcttttttgcccaaaaggtgttcaacgaaatgctgcttagccaatgtattaccagaaattgatttctctgtaagtgagaatgtcatattgccatgtcccctatgttgttatttatactaatgattgcaggattctctctgttgttatttatgctaatgtaatgaaatatccaattactatgtatagactctagagctatgaactgctgggaagttgagagtgttgctaccaagcagaaagattcaaattatatgttggagcaaactaatttggatcttgcagtctcaaaactaatctggtccttgattgtttcagagcggacgaaaataaaaaatggaacgatgcagtgaagattatgtaagcaatgttcgtgatatatcgatcctgaaattctcatagatggccattgcacaaatacaaaaatttgcaggttattaatagtgaactacatctctgtaaatctgcataacatatgttaaagctagcccaagaattaatatgttgtaaatctgctctacagttgacactgcttacattttctactattaataaccctcagttgtgatagatctgataccttcttaaaaatttgaactgagttttcatacctagcagtaggactaacattttatggttgtattgttcagctcaagatgaacaaccacaccaaccccaagatcaccaactaagcctatcctgcttcatgattgttgttgcaaactccaacatgcttgctgctggtgcaatctgagccggctggtggcagatgggagcctgccctatgttgttagcagcttttttcactccaagtcatgcttgctgcctgtggtcttggtagtttcttttttgtgttgtcaatttaattattaggatttcccatgtgctcggctattggtgttcttgtatctgttttgtttcagggtgtcattactatggagtagatcataatttttttcttatttttttccaatgccttgtaaaataaccaactagcagggatgttcataaatttcccccttttgtttggtttttttcagacatatatataatgaaggcatatatacacaaaaggaggagctgtttgagggtctaaaggacaatagctcaattgactgggaagttgttgtcatatgtcgagagcaatctgctaaatgttaaagaggtgcatctaacttttgtacccagtgaactgcaaatctgcaccttctcttttgattaatagtttctttggattcagatcaaaatagctcaacatgggaatttttctagcagaggatgggcaattcttggaaaatactatatatttcttgtcgttgaatgtgatcatgtcccattattctggcacttgctgccttgattttgttgcctgtgccagccctttagctagctctctatcacacacgaatgcgtgacccttgatggttgtatgcagttgggatattttggtgagttcatcccccttccccaccccaccctctctctctctctctctaaaccatcatttatcttcactattgacttacaatttcacttctagctgatgatgatcaatcaaagctagctcatacgtattagtgagtttatgaaaaaaaaaaggatcagatattcaataacagagttagctccttcagaacgatggcaaaatggtacctttataattttacttctcaacacgcacacatttttttatgacgagtttgaacttttgttctccttgtcagattttatctgaagcaagtatcatatacttctgtattagaatatggacgcaatcatatatctcctaaggtttagtacatactctcatatttggaagtgaataccaaacgtgtctgaaatagtgcatgcgatttaatctattctctcttaggcatttattcgcaaatgcaaagatttctgtaatttggtcgtagcttagattatggcaaccttggctttgtggtttgccatgtcatgtactgatatatgaatgtgatgctttaattaacgttgaaaagccatgaattatgtattcgaacaaattgattggatgtgtcctgaaatcggttcagactttcgttctttggttactggcgtgagacgtgggagaaagacgctgaagacatcaagcataacatggagttgataaaacatcgtcgactgaatcatggaccttgtcctggatgtagtttctttggctgctggtttattacactatagtaaaactaaggaccttgtaataggctctttgtgctggtctgacgtgaagtgaaaaccttcttaatgtaacttcgctaaaattagcgttttgtctgtttaagcagtatttatggtataaagaattgcatattgcattatattgtgacaaagagtattttctgaaattttgacaatttgaccattttgaaatttttatttgaagaatagatcgtgctaaaatcttattgcaaaaatggaccgaaacttattgcaataagtttagcgtggtctattctttaaaagaattgcgtattatattatattttgacaaagagcttctgtactcagctcattaaacctgcctgcttgaactatctgatacttaagttttaattaatgtcttgaatctata

SEQ ID NO: 20681 - DNA, 562 bp, Oryza sativa
tattggtttttgcagtgaaatcaagttccatatatgtggcgtgggcagcctcgcgagcaccgagaagaggagctctatcctttgccgtacatgtaaataaagaaaaaaaaagaaggggcaatagtagtttacatatttgtcgaaagaaggattgattcgttggtgaaaccctttgctgtgtatctggaatgttattactttgctattattatgttgttaaccatcatgtgtacatgtgtgatcgataatatcgtactgtttttgtactaataaatgtggtgtagtgctagtacatagacggtattgtcttgccccccccccccccccccccaaggagcgaaaagcaaagattttgcttaaagacgacatcagctagctccgaatcatttatatagctccgaatcatttagctccaaatcatttatatagctccgaatcatttatagtaaagctaatacgaattcatatgtataatagttaacttatgtactacatcattaataattagttctattaaacacatataatgggcttgataggtttaataccaccttattgcctt

SEQ ID NO: 20682 - DNA, 937 bp, Oryza sativa
ggtccaaaaactgcaaagtgctttgtgttcattggagcgcttccctgttgtgctcagccagtccagcagaataggtattggaggctcccgtttgacttcaggtttgagtgctctagctcagcccttcaagttgcgcctttgtcgaggtcagggtgaaaaatcacttcgggattattcgtcaaatattgtgcttattgatccctttgcgagtctagcagctgttgaagagtttctttggcccagagttcagcgtagtgaggctgcttcgaagcctacagttccatcaggaaataattctgaatctggcatacctggcaccgcagctggtgcgtcatccacagctgcaccagctccatctggcaggcgtccaacaacaagatcaaaatcatctgctgcaagtagtggtgcatctaagaaggattctcaggaggaaagcacaaacactgccaagggaaaggggaaggctgttgcaaaaccaaactcagaagaaccaaaaggacctaatacacggaatgctactcgcagaaaagctgcttcagagaaagatctggaaatgaagcgagcacatggtgacagcagctctgaggtatttctttcatttctctgaatgaacatgaaaaattctaatagagattacgaatgcagttgtcagttttatttagctctatacaagattctagtgcatgttaattctatgttgagaggcatatagacataataattgtccaacaagtattaaattaaagataatgtacaatctcctttttgtataccaagatttgacctcagcgccttataaactacttcctccgtttcacaatgtaagactttctagcattgcccacattcatatagatgttaataaatctagacatatctatatgaatgtgaacaatgctagaaagtcttacaatatgaaacggagggagtacatttt

SEQ ID NO: 20683 - DNA, 1950 bp, Oryza sativa
ttctctccttgatagcatcttacaggcagaactcccatgtgatctagagagaacaaactcaacttacaacattttagcactattgcgtgtattagaggggctcaatcagttgtcccctcgtttaagagtacatgctgcttctgatgattttgctgagggaaaaatcaccacactggatgagctatatagaactggagccaaggtaccgtcagaagagtttgttaatagtaagttgacaccaaagcttgctcggcaaatgcaggatgttcttgccctctgtagtggcagtttaccttcttggtgttaccagatgaccaaagcctgccctttcttgtttccctttgaaacaaggagacagtacttttactccacagcatttgggttgtcccgtgctttgaatcgacttcagcaacaacggggtgacaaccaaaatgctggtggcgaaagggagatccgatttggaaggctacaacgtcaaaaagttcgtgtttcccgtaaccgtattctggattctgctgctaaagttatggagatgttctccagtcagagagctgttcttgaggtagaatactttggtgaagttggaacagggcttgggcccactttggagttctatactctcttaagccatgaactccagagtgttcgccttggattatggagatctagttctccatctgatacgggaatgcaaattgataggagcgcaagtcccgacgatgacttggcagccaaagaactcagctcagatttacctgacaatggcagccacttgatacaagctccctttggattgtttcctcggccttggccacttaccgttgatgcttcagaaggcagtagattttctaaggtcatcgaacatttccgcttggttgggcgagtgatggcaaaagttttgcaagatggaagacttttagatttgcctctatcaacagcactttataagcttatacttggacaagtaagtgatatactcttactggattaatatcagtttttccttttgttacatttgttttattgaagttagtctgaacaaatgaactgtatgtgccaggagctggacttatttgacataatctcatttgatgctgaattcggaaagacattgcaagaactgcaaattcttgttgaacggaagaggttccttgaatccacttatggcatgaatcagctagaagtcacggacttgcgtttccgtggcactcctatcgaagatttgtgtttagattttactcttccaggttatcctgattatattcttaaagaaggcgaggaaaacacaattgtaagtgatgaaacccatcttagttttgtgtttgtcccagtgactagtgtctgcatttgctcctttttgtggtaataaatagtattactctgttttgcaggtaaatatttacaacttggaagagtatgttactttggtagtggatgctacagttaaatcagggataatgaggcaagtcgaagcatttagatcaggatttaaccaggtgcaacgtcattttctctctcttgtaatcattttattagctgtttttttttgtttactgtaattgttcatgtttacctttctgttttaggtctttgacatctcatccctgaaaatattttcacctgaagagcttgactatctaatatgtggtcgccgagaaatttgggaggtaatgctctctctctctctctcacacacacacacacacacacgcacacagttttagtttgttacatttcactgaataaacctgtgctgcagcctgattcattggtggataatataaaatttgatcatgggtatactgctaaaagtcctgcaattgtaaatgtaagtgcgctatatgcatttcaatatctgaattggccttctgtaagtttagttacttaattgctctacatgtttgtagctactcgagatcatggctgaattcaccccagagcaacaacatg

SEQ ID NO: 20684 - DNA, 13018 bp, Oryza sativa
gtaaaacctcatggaaactttcctttaaatctttctctcttctgtaattcttgtatttttttatacggtcgaaacaaacggtcgttcctatgtttcgtaatcctacgatttaaagaggtcctaaaaagaaagttatctaaaaaaaaggttaaaaagcaagtcatgttggtgtgtgtgagagagagagagaagccaaccaaatgtaagcccaccatccagatagagggaagaccaaccaaagagaataataataaataaataaatagtctcggtccaccgtcgtcgtcgtctagggtttcctcctccttcccagcggagatcaagaatcagaagcaacagctatggcggcggcggcggagggtgaaaagaagatgataacgctgaagagctcggatggagaggaattcgaggtggaggcggtgggcatggagtctcagaccatccggcacatgatcgaggataaatgcgccgacaatgggatccccctccccaacgtgaattccaagatcctctccaaggttatcgagtactgcaacaagcacgttcacgcctccgccgacgactcaacctcctccgctgacctcaagaactggacgccgacttcgtcaaggtcgaccaggccaccctcttcgacctcatcttggtaacccattccctctccactccccgctctcctctcctctcctctccgattattttttttatttacatacagcgcagagttcgtccagatctatctaggttgcactcttctccctaccctaggtcttggctttaccaatatactccagtagtagtatatttctatattggtactactccactacgtcttaaataagtaactactccctccgtcccaaaataagtgcagccatggttttccgcgccgaactttgactgttcgtcttatttgatttttttttaaaaaaattaaaaacataagtcacgagtaaagtactattcatgttttatcatctcatagcaataaaaatgctaattataaaaaaaatttaaataaaacggacgaccaaagttgggcgtggaaactcatgactgtgcttattttgggacggaggtagtagatgatttattatgcctatgtgaatctggttgcgtgttgttagcacagcttatctgatgattattgcgtgtccttgttttatctcccaaatcaaacccattgtgtacaactctaggggctgccatgctttttatttccatttatttcaactagtgctcttcttttcttgtgcttggggacaatgttgatgggtggtgggtttattactcttctaccagtaacgctgtcagtttgtgtcaattgatactgtcttcacttttaacatccataaatgcattggcttgctaagccttaggttgtgtttagttccttccaaagttggaagtttaggttaaaattggtacgatgtgactgaaaagttgtgtgtatgacaggttgatgtgatgaaaaaagttggaagttcggatctactgtctttgtggctcaaatctattgtatgcttccttgtctccccccctcccaaaatggacccttctaggttttcctaatgcattatatgtttttgttactgttgcaacatacttggcagtacaattgatgctcggacttatatttattgtgctagcctttaaatttataatcatggtaccctttttaaacatgtggatatattgatgttcaattcatttaggcaatgtggttaagtgatccttctgtcattaattgtctacttgtctgttgtgacagcttagtgcttttttagaaaccaacaattaactgtgactagtgggctaacgttacctaataattggttccatacttgttactttcctcttacctcctaattacctgtattttctctagggatagtgcacatgtatccatgtttaattggaggatttgctgctctttaaaaggacaatagatgtttgatagtatttaactaccaagtcccttgacatgttagtggcttcctgtattagtctgtctcaatggattttccacatatatacataataaatagtggaaaaatatgttgcccttgaagaagcaaagagctgtttggtatgtaattgtgaagcatgtgttgataaaatgtttagttttattgttgttaacctgagatatatagatctgacttgtgaagtacttgcctaacacacggatgaattggtccacctgatttgctctttggaaacataatgtatgcctgcttacctgcctttgttattctgttccagttttaactcaagtgtgcctagatgtgttgattattttctgtatgtagaaaggaagaaagaaattgattgtccacctcttgcaggctgcaaactatctcaacatcaagggatgggattgctggatctgagttgcgcagaccgttgcagacatgatcaagggcaagactccggaggaaatccgcaagaccttcaacatcaagaaggacttggcccctgaggaggaagaggagatccgcagggagaaccagtgggcgtttgagtagagatgcagcagctgctacatgtggccggtcggttgcaatggttgtaattattttggagtgagaatgaatggtggggtggggggggggggtgtggttagtgaaggaaggatgaaatgaaatgggggttaggttaactagctggtttatgaagtatgggtatggaagggaaaacaaaaactgaagattgttactataaggatgttatgtgcggctgcctagactgcagttgatatcgtctggtggatggatgatttattactgggattataaagtcatctgattgtcgtccattgtctcagtgtctgtctgtctatctatctaatctgtgccgcagtagtgttggaggaagtgccaggtggtgaggcagcagcgagtccaggccaagccttggcctggaggaaagaaagaaagaaagatgataaggcggctgggtgtgtctggtctctcctggtgttggttgccacacgtatatttgggccccttatccatccatgattttgttttgttttgcgaataattttggcgcctcaagttagccgataaagttgggagtagtacactagtagtatactagtagtagagtgagctcaagacaagaagcagtagcgagtccaaggcaaggcaaggcaggcgaaagcaaaacaagaaatggcgaagccgatatcgatcgaggtgtggaatccgagcggaaagtatcgcgtggtgagcaccaagtccatgcccggcacccgctggatccgcctcctcgccgacaacgactgccgcctcgaggtaatcctttcctttccttcttaggcagcgattacttattgcattacaattacactagtagtggagagtcaattcattccttgcttcagatctgcacggagacgaagaccatcctctctgtcgacgacatcctcgccctcattggcgatcgctgcgatggtgtcatcggccaggcaagcaaagcaattgcaatccaataattttgattgatttcttcttgttgataacaaattaagtgcagctgacggaggagtggggagaggtgctgttctcggcgctgaagcgcgccggcggaacagccttcagcaacatggccgtcgggtacaacaacgtcgacgtggaggccgccaataggaacggcatcgccgtcggcaacacgcctgtcagttctgccgccctctgcttcttgatttctagactatcttactggatggtaatttacttacatacgtacacatgtacagggcgttctgacggagacgacggcggagctggccgcgtctctgtcgctggcggcggcgcggaggatcgtggaggcagatcagttcatgagggctggcctctacgacggatggctcccgcacctgtctctctctctctctctctctctttacttttactactgctgctagttgatagatactcatatatgtatatatgtatatatgtgcatgcaggttcgtggggaacttgctcaagggtcagactgtgggagtcatcggagctggtcgaatcggctcagcttacgcaagaatgatggttagttcagttggtaccttactagctaggactattattattatagtaggagtaattatttgttcaatttcgcaattgcaccacaaaattactcatgtaaacatttccttttaccacagatcgagggcttcaagatgaacttgatctactacgacctgtatcagtccacgcgccttgagaaattcgtcacaggtatgcatccaattttatagtactggctagttaatttgtactccctccgttctaaattgatctacatatttcataggtacaccaagatcaataaaaactaataactctctcatactatatttactctagcaacaaattcaatgcatgcaccatccctaatattttctagccaatagcaaatcaaaatattgcatgtgggttataaatacttgtgtgcatggatgcatgcatcaatgtccatttactccaatgcacaaataacgaatagactctaataaatgaacacaaatgtgtagatcatttagaaataatctaaaaaactatatgtagatcaatttggaatggagggagtacgacattaagatagatagattagattagattaattaatgacctgcacattgatttgaatgcatatgcatgtagcttacgggcagttcctgaaagcaaacggagagcagcctgtgacatggaagagagccgccaccatggaggatgtcctcagggaggccgacgtggtcagccatctctctcatcgtctcttctttctttcttcattctaattattaagatgttgattaattatgcaaataaatgcttgtgcatatatatatatatgtatgtggcagattagtctgcaccctgtgttggacaagaccacttaccatctgataaacccggaaaggctggccatcatgaagaaggtgcctgcctctctgcctctgttaatttcttctctcggtcctcttgatactgtagtactatgcagtgggtaattaacagagcatgtatacaaataatctaaatataaaaatacaggaagcggttcttgtgaatgcaagtcgaggaccggtgattgatgaggtagcactggtggagcacctcaaggccaaccccatgttccgcgtcggtcttgatgtgtttgaggatgagccttacatgaagcccggcctcgctgacatgaagaatgccgtcgtcgtacctcacatcgcatctgcctccaaggtccactacctgcctgctgcatctgcttatatatatatatatgcctagctagcttgttttattttctttctttctttctttcttcccataaaaatatccatccatctttacgtactactactcctacaactactagtaatatgaatcaaaaaggtactgactaatatagtatataatttgcatcattctccaattctccagtggacgcgcgaaggaatggcaacacttgctgctctaaacgttcttgtaagtactccttccatatgcatgcttaattagcctcagcccaaatattatactattgatgatgaatggaacacacactgtgtgagtgggtctgtctgtctgtgcatgtttgtatttgcactagatcgattatataaacctgctgatacggtaataataataataatgcagggcaagatcaagggttatccggtttgggggaacccgaatctagtggagccatttctcaaggaggatgcaacgccgccagctgcttgccccagcattgttaatgccaaacaactcggtcggtactactacgtaccgttagttaattcctattcattgcctagttaaaattaactttaactgcatgcgaatatatatgcgatgcaggcctgccatcgtcaaagctctaagaactggagctcggtccatcatattatatctgtcggttcaagatcatactccactacatgaagtctagatcgaggtgcatatgcttgctgttctagcggagcgggcaacaagctgtcagccagacttttgatatctaatttcacacacacacacacacacacacacacacatatatatatatatatataatatactagctagcttcaattccttgttattataccactagtacgactgtaattttgtgagtcttaaaacatgcgagctacatgtatgttattacacccgtactagctactactgtagattaattactgttacgaaatgaagataccctagctgcctgtttgggaaacgtacgattaatcatcaatgacaaagatttacagggctctagctagctagcactagcagcctgcggagagagagaggaattaattgatattagtaataactagcacatacatatgcatccttgcgtatagtaagtggagtaagtttataagggaagaaataattaagggaaaacctggcttagctgaagaagagcaagcaatactattatattatataatccaataaaagttgaaacaaaaaagagggagcaaattaaagcaaaagctagatatatataatataataatgatggacagagatatatagttagtcgaggaggagtttcttgacgtaattatcgtagacgaagtcggtgaggatgctgtaagctttctcggtggggtggtagctgtcccagaagagatagtcggagacgggggtgcagacggaggaggtgagggcgttgcagaggacggaaacctccaggaggccagtgccgcagcaacccatggtggagtcgctgaagccgtacgcccgtggacgcatcatcatgtccatcaggaagccgtagatgtccatgaaaacaagcttggtcttggtgctcttcttcttggcctgcatctcctccatcctcctcttcatcccggcgttgtacgccaccgcgatctggttgtgcccctccgagcagcgcctctccatgccccccgacatggtcctctgcgacggcacgcacccgatgggcggcatcccgatgatggccaccttcctcgccccggccttcaccagctcgtccacgaacgccgccgcgtggtgcaccagcagcgccgcgtacgaggcgtggtcgtagccgggcctcgcccgcatggtgaagtaggtgttggccacgtcgtcgctgccggcgcagatggcgaagatgcccctggtcatcatgtccgccacccgcgcgtccccggcggcgccgcgcacccgctccttgtactgctggaacagcagcagctggtcgggcatggagatgacggaggccaggcgaggcgtcagcgggtcgaagccggtgccccccgacgcgaagctgacgccggtgaggagctcctcagtcgacagctccggcgacaggtacggcgggagaagctccttcagaccaagacgggaagctgcatatgcattccgatcgatccgttgttagttgttgttgtgcatgcatgtactcctatgagaaatgagaattgacaagagaaagaaaagcatgttgctagttaccgatgaagtcggttggtatgcgtccgttgcagaatctgccggtgggggtgtggttgtggaagtcatggccgtagggagggaagttggccttgatgatggtgttgatgccgttgttgttccccgggtccacgatcgagtccccaaacacgatcagcgccggcgatgacgctgcctgcaccaccaccaccggcaccgccgcccacaacaccatcaccaccaatgccgccgccgcgctactgcctcctcccattctcattctatctctacacgctctacgtactgccagcgaattgaatctaagcacagcaccgcgcactctcagtaaaattaaagtagcaccaggcagctagctatgtttgtctagtatttatagacgaccaaattcaagcatgatttatcgttggcgtgcactgcacttaacaccgccgctcgcaacatatattttcaatttgcatcaacctagctactattattacgtaccccgtactagatagagttggcaacctacgtacgtactgtaccagtacaacccatactagatactccatccgtttcaaaatatttgacaccgttaactttttagcacatgtttgaccgttcgtcttattcaaaaaatttgtgaaatatgtaaaactatatatgtacatgaaagtatattttacaatgaatcaaatgatataaaaagaataaataattacttaaatttttttaataagacgaatggtcaaatacgtactaaaaagttaacggcgtcaaacattttgaaacgaagagagtatatagtactatgatcactaggagttgttttcttgcacatcatctaaatagttattattttttatatacacgacttcagatataattgtaaacgtgcgttgactagtttcagttgaccattcgttggcaccgcaacattacgcactgactttctagccttggaatcgaacacggcttgcatatatagataccggccggtgattagctcaaaccaaccaggcaacagaaagtcaatatttaggaaaacatataatataacactatacgagattatgtttaaaacgtcaataattttaaactggagggaggattactgacagaatatcacaaattgctactacgattaacgagctaattagtggatacttagtacccctggtatctagattcgacaacacatagtagcggatagggaatgaattctaatgagaatgttctgttatgtatttttttaaaaaaaactcaataataatacaaatagttgttaaaagttccaaaaaaataatgtagagtacggtgacatctatcagtaaaaaaaaaattagtccaatctacacatctctactattataaaaattgaagatgtttttttgccgatactttggtacgtcacctatgtatgagtcggttttttacgttcgttcacttttggaaatacaaatctgtatgtgagtcggtttttaaattcgttcgcttttggaaatatagaagaaatcgtataagaaataatgatcgggctcctaattgcagcttataattttctaacaatatatatattcaagtgaatttcaccttaactaacccatataacaataataaataaaatagctttcaccagttgcaactcacgggtatttataaaaattgaagatgtttttgccggtagtttggtacgtcatccatgtatgagtcagtttttaagttcgttcgcttttggaaatacaaaatgaattgtatatgaaatctgtttaaaaaaattggcatgctcacttgagacgatcggactcctaattatagctcatgattttctaataaaatatatatccgagcaaatttaacagtgaatttcatcttaaataaaccatataacaataataagattaaaatagccttcacccgttgcaacacacgggcattttttctagttgaaataaaaattcagatacgaacaatacgctattattcatacatttcgatgtgtgagttgactttggatctaagattttataatgtggtatacgtgtgtatgtcatggagtgttatcaagtgttatgagattttttttccataactatttaaataaattttaaacaaacaaggagacatcctctcctggataaaaatagttgccctagtacatactacttgatggatagaaacctgcaaataaacagtgcacatgggcgagtaaatggctgcctgtctgcctttgatccagtaccgcattcaattcaatcgtctgctctcctcttctcccattggcattcaattcatcttcactagtgggtgggtatgtgtgtgttgggggcagtacaatttcttttggaccaggccagcatgagcatgcagcatcgaagagcaagtttaaatagtatagctaactatgcgctccaattcttctatagccaatttaatagctcatttatacaataagaatactatactactaatatatggtcctacctttcatacacacacaatgtattagagtctgtgctacagctgactataaatctgtagctcgctttacttctctcttcttttctctcctccacatgtgtatacagctgacttgtagcctgctactgtactcgctctaaagtaaactgtgactgagccagtatgccattgatagatctgccatagatttgcatgcatatttgagcaaatactcgtagaaatcactgggtctgggtgactgggcctgtgggctcccacaccagctatccaagcattccaagtactagtgttactgtactactcctacatactacgccagcgtccggacggacagtatagctgtgtttagatggaggaaaaggtgaaaaattaggagaaagttaatagtttagagaaaaagttgttagtttatatgtgtagaaaagttttcgatgtgatgtgatatgataaaaagttgagaatacgtaccaactcgatcgatcaatcgatagacgtgtattaagtactacgaacaatacgtacctccaacacagggtgggtctgcataaagtactacgtacctctccatcacattttagtgtaactttggatttctgtgttcaatatttgaccatttatcttatttaaaaattaataatttttttaaaataataatcacacataaaatagtattcatgtttttatcatctaataataaaaaaatagtaatcatagaacttttttaaataagacgaacgattaaatatttgacataaacaatgtaaaaccatgatgtttctgctacggagatagtagtactacggtatgcattgacacacagaccccatcgaccaccacgaatggtattgatagtagatgcaccaatgtagcaaacacggcagctaattcaccttgggatactgtcctggtgattggagtagtcgttggtttgacccatcgttgctgcatatgcctgcgtaattgggtccacaacaactgctcgcttctacgtacttctacgtactccctctgtcaaaaaaaaaaaatttaaagggttttagatagatgtgatatatcatatactcccttcgtctcataaaaagtcaacctaatatttgatgagatgttttttagtccaatgaatattctgaatatgagtctgtctagattcgttagactagaaaacatcacatccaatactaggttggctttttatgggatggagggagtacgtttatcgaaatttattgtactaagatatgtcacatccacctaaaatctcttatatcataggacggagggagtagtagggcctgctgctgtgatattcagcttagtggccgagggatctagttggtagagaagatgaacaggagagacagaaaaaaaggaagaaggataatttggtgtaaaaattctagaaattatattgaagaggtaagtagtggcatatttcaaataacagtaaaattgtaatggtattacttcagataaatgaatagtaatgatatattttaaaaccgtaaaagttacactgacatactccctccgtaaaaaaaaagccaatcctaacatcccaagacaaaaataatggagatgaagaatgactaaaatgtcaggtaaatggtattgaagtgataaaatttaaactctagaagttaaagtttttggatggagggaggagatctaattaagcctataatatactggtcattgttgttaatcttccgaccataataacaatataaaaggtcgttccagctagctagccagccagcgatcagtcagatcgactccagagcagagccattggacgatatcgatggacctgacctgcaggctgcagcatctgcgtgcatgtgttgcatctatctacatctgcacgcatcacataaattgatcataaattccatctatggaccttaattgctttcaccctcaccaagcttctgtatgatatgactactgagctatactccctccgtaagggcatctccaactggatggccaaatagctattcaagtcaaaatttagctaacttagaaaaaaaaaatgctccaacagacttactaattggatggctaagttatttggctggctaaattcctcaccacacttgccaaagttggccagccagagggcttgccatcggtgtgggtcccacaccctctctcctttctctctccctctttccccatcccgtctgctgctccctccctgctcgcggcgccatccgcccggtgccgccgtcgccgtccacccggcgccgcagtcgtcgtcctcccggcgccgccgccgtcatcctccggcgctgccgtcgtccatggagccgagtgagaggcggcgcagggagaagatgcccgtggggtcgagctgcacggtttggtggaccatgatgtagcgcagctcctcatcgagaagcaccatggcgagctgcacggcgaccccggtggaggaggaggactccgcgccgccgccgccgccgccgccgccgctgccgcgcgcgaggagctcgacggccggtgctttctctgagctaagccatggcaagaaaggcacgagaggaagaggaagaagaagaagaagaggaaggagaagagcagtcagggcacggggatcagtggcaagccaatgggggcagcttcttcttcgatgcagcatctgttcttgctctgccgcctcctcggcttctgctttgcgttcacggcgagccagcagcagcagtcggactcgtgtagcagcgccggcgtcgcggtcgcgcatctcgccttctgctgcctgaccgtctggaagcaggaggacttcgtcctgcgggtgtgtatgctactgaattttgcagtcctaccagttattggaattttactgcgtaccaatttcatctcggtgatttttttttattttggatgtcattgccaatgcacgcctgcagagtgcaaattaacaggcttggtagttaaattgattagagttgagtaattaacaggctcgcgcgaggtaccgcgccgtcgactcgcgcgggagaaagaggaagtaggggagaggaggaagaagaagaagcaattgacgtgtggggaccagcgccatagaatta

SEQ ID NO: 20685 - DNA, 8406 bp, Oryza sativa
agagcgagtaactagtttgactagtcaaattagatgaagaattggttatataggtgtttgagttggctatatagttgtttggagagtccgatttagataggctgttggtgatgctctaaaaaaagaaaaaaccaatctaaagaaagatgtgacccttccttacaacgaatctgaacagattccttctagtacagcgtgttcatatttgttttagtaggagaggtcacatcctctcttagattgattttttttaacgaagggagtactccgcattagtattaacccaagtgaagtgtagctaacaaaagaaaaaagtacattaaattaatcagaaaagctgttgaaagttgtcattatgtactactgtcgaacgattttttttctgagattacccagcaaacacacatccacacaccactatacacgtaacaccaatcactgttaatgaaaagacacgacgacttgagagatctgcttagctccagtgcagatccaaaatactgacaagatacacacattctagttagtttaatcttgtaactgacaagatgtacaaattagagatcaatgagtcgattgtccaataagccgatatagcatgctagctgatgcttataccaggcgatgtcaatagagttttgaacaatcggctatatttccaatgtaaattctgacacttgagtaaataatctatcgatgaaacaatttaactgacaccaataaaaccctagaaaagatctagtcgatacatgtaaattgagacttcgacttagattaactaagatatatgataaataggtgtttacatcaacaatattagagtgtcgaggccctagcccttccgatacaaatagctataacaagccttacccctcgttggagatcgaagccgatgcagcccaactcgaaacaagacctcgtcgagaaagacgaaaataaaaaggatggcgatgcgccgaagttgtattgaccgatagatagattacaaggatctcgggtgtacatatttatacccatgagtggatactaatcctgagcggatactaaacaaacttttctaaagataaaagaaaaaacataaaatcctcatcggacatgaatcatactttcctaaatacaaaacttgcttaactaatagataaactaaactgctatgacgtggtttccatggttccttcttaaactcgaactcttttagataagctttccataggctcattgtgctctttccttaaccgaatccattaaaaaatcttaccaaattttggcgttaacacacacttacacccccgcgaatgcgcccctaacaccaattgcatattcctgatctcactaaagtcatgttgaaatttcatttgcttgtgcataatatttataggcaccaggatttgaacccagtaaagtcatgcacccacaacttcaccatcacaccacttgtatttccagaacgagcgatttggtatcacagcacagcgataatattttgtgtgcgagtgtgtgtactccctccgtgaaaaaaaaagctcaaccttggtgaggatgagataacctaagacaacaaatcttgatagttctctgtccagattcgttgtactaggtgatgtccaaccttaatatcatccttacttaaagttggacggagggagtaagatccatcgggctggtctgttgtcttacgtggcgttggcgatcaatcatggccatggaatgaaatggcacagatggcgtctcgagctcgtgccgtaggcgtagggtatacacctacaagatatatatcactatcatattttatcacacataaagtactattcatattttatcatctaataacaataaaaatactaattacaaaaatatttaaataatacgaacggttaaacgttggatacaatcaatgcaaaactacccttattttaagatggatagaaagttatgtatatgggactgcctatatatcatctgacagattttttagcatcttatcatacagatttcttactctttggatgaacatctaacagatgatgacagattttttagcctcttatcatacagatttcttactctttggatgaacatctaacagatgacattaatatacacaaacaaaatataaaacaacaaacaaacaggccacatggacaatctgaagctcacgtggactcaaatgggctcaagttgatttcagacttacatcataaatacactaaaattacatatgtaattttcagacttacatcgtaaatacactaaaattacatatgtaattaatatataattacagtgtaagtacggtgtaattagtacgtgtgggatcataaacaaattagcattagaaaacatagctcaaatcgataatgatggagtcggcaaaaatgcaccacgaatcttgacaccatccaacgcacataaatctgcaagatatgtgactcaaaaatctgtcaccaaacagatagcaattccgtatatcggaattcctgagtcagaactgtatatgatgatgatgatcagtcagcggtcatatatcatatttctattattcatatatacatattattaatcatgtatatattattatatttaaagacggcgtcgttgaattattatgggttaatttgatctataccactacaaattttgctattcagaaaaataatattacaattcgtttattcgtaaccataccactgccgttaggtttccatccattttcttccttctccatcttcttccttctctcttccgtcttcttcccggtgatggtggcggcgaggccttgtcccggtggcgagccgtctcccacgcgggagagacggtgcggcggcgcccgcgcgccacgaggtgaagcaacacggcagtgctcgcgcgagtctgtcgtggcggcatggtggttctggcgcggaggcggcgaggcggctgctcccaaatgagacagatcgtgagcgcattataacaaagaccaagcgtccatgctgcatcctactgtactgtatcactccctccattttgattgaatgggacctattatattaccaatctaaggaggtgtttattagggggtgtaaaattttagtgtgtcacatcaggtattatatagggtgttgtatggagtgtttatgcactaataaaaaaaataagtatccgacagtaaatatgagacgaatttattaagccaaattaatatgtcattagctcatgtttactgtagcaccacattgccaaatcatggagcaattagacttaaaagattcgtctcgcaaagtagtcacaatctgtgcaattagtatttttttaagcatatatttaatacttcatgcatgtgctcaaacgttccatgtgacatggtgtaacatttttaggtgggatctaaacaggccctaaacaaaaaaaaactaggatacattgtatttaaccaaaatctattatattttaaaacggaagatatagaggctagccaaaataaatcttactagcgtccaaattttgataaactgacaatattatcgtttatcaaaatttttataagatttcttatctatttacctcaatttgacgagaaactaaatacatacacatctttgataattttagtaaaaagtaatatggtttaaattttaaaataatatcaatctgaatagcccatagtattcactgttgagggtacgagctgaattgaatggctccatagtactagtactgaaacgactgatccagtagtcattgtagcaacagtactgtagaaggtaggactgacggactgtggtggaagtgtggatggatatacggccggccatcatccattcattcgtcgtttcctgtatccaaatattccataaaaacgaatctacgatcggatgtgacatattctaatacgataaatacgaatctacaatcgaatgtgacatattctaatacgataaatctgaatagatgtatatccagatttgtagtactatgatgtatcacatccggtactaggttgttttttatgggacggagggagtacacctttaccttttgtcctaaaataaatttatttttcacaaatcctacatatatcaataaaaagttttaaaaaatatttctacaatatcaaatcctaatgtaactatttctcattttatctactctcaatattatttttttcacttttataaactttaatgtaataattactttaaaaataaaataagaattcattttgagacaataaaaatggctaaaaataaatttattatggaacaaaggaagtcctttgacaatgcatatgcgctaaaaatctgggactattaggccatccccaataaaaaaactatcaaactatcaattagctttcatacatgttattcatgtagatactgtataaaaactatatattcaatggatgatgtcgtcaaattaaattctcatccaatcatctctcttctctctttttatccacctatttcctatttttcattatttgttcttgcgtagagatggttttttgcgagagaaatgatttcttcatttttttacctccgtcattaactctattaactctcttgtcacatcagattttttattatgtgacaaatatttaatgctacctagctgcacccgggctgccttcaatccgttctgtaaccccaaccccagatgcgttgtgcaatgcattctgacacactcaggtggtgtttggatccagagacttaactttagtttctatatttagacactaatttagagtattaaatatagactacttacaaaactaattatataaatgaaagctaatttgagagacaaattttttaagcctaattaatctataattagagaatgtttactgtagcatcacatagactaatcatggattaattatgctcaatagaatcgtcttgcgaattagtccaagattatggatgtgttttattaatagtctacgtttaatatttataattagtatctaaacatctgatgtgataagagcttaaaagttttagttccatctaaataaggtatcaggtgtcgttgtttccaatttttaagtttataggagtaataattaaaacttaattaatcatatattgataatacttctattttatgtgtccttgcttctttatcggatgaaaagaacacctcctgtataacttatccgtttaattgcttcttgcatgagcacaatttatacacagcaccaagctggtgcatgggcccatcaatcaatggttcgactcacaaccagggttgatgttaccaccgtaaccagggcttaccgcggagtatggtaatataaataccgcggtaacctccttaaattcaaataaatttaaaaaataatttgaatttttgataaattttgcacggtttttcatggttaccgcggcgccggggtgcggtaaccccggccccggcggtttgagaaaccctactcacaacacataggcctcacgtacatcacgtgacatatgcctccatcataacagcctcagacgccgcagccacctttcgtagtccttttggctgccctggggcgtcattgtttttctttatgttttagctctttaaaaatttattttacaaatatacctttataaaaaacttacttagaaataaactatttttctcgacgtcaagattattagaaccgagtttcaatgtcttgacgtcaatcacactggcaccaatagcctcaatcagacccgttgatgcccaagagccaaatagacgaccgcatagggtctatgattttttttgggcccatgtgaagatgaaggactatagtctattgcccacaactatagcatgcaaggcaaatcgccaagcccaggtggccacgcgtacgacactgcaacatcatcgcatcgatcctaattctgtgattgcgtgcgttgtggctgctacgagaatgagacgagattgtcgatcccaattccatgccgcggtgaccagcgaggcgacgatacaacttgcgactctgagtggcagcgcgatggccgtagattctagtctccgagcagctctgcagtgtgcagctgcctcctgggctcctggctcctgccttccttacctcttcgctcttttagtatgattatcataatatattttaaaatagtgtacattatagcacatattgcatctacataattgagcgaaaatatgttttgtttatattagacatgctttttttaaaaaaattatagggcctcaatttgtatttcaacctggtgccccaaagtactggagacggccctggcctcaataggtgaagggagtctatagttgaagtaggaatgagggttccattccatcagctgctcagagcactgtagggaccacgatagtcaaagaacggaccgagaaagagacttgagtactaccaccattgaccagaagagactaagcctgtgttctttagcgttggttggaaactaatcctccacgcaccgaaaataaagcggtaaattagcatgtgattaattaagtattagcttaaaaaaacttaataaataggattacctaaaccccaatatgattttttaaaaaacaattttcgtacattctttttttattaaaaaaacactgtttagcaatttaggaagcatgcacatgagaaataaggttgtgttcttaactcaaggttcctaacctccactccctcgtttcccacgcgcactcctccgaactattaaaggtgtgtgtttttgaaaaaaaaatctacagaaaaattgctttaaaaatcatattaatttatttttcaattttttaagctaatacctagtaattaataatgttaatccatcgttttgttttgcatgaagagtggaggggtttccaaccccaccaaatgaacacagcttaagagtggagaggtgaaaagagaaagaagaggatggagagtgataagtgggtcccattgtattttctatttttctttccaaatgtaataccattgaagagccacatcagatgaaaactaggttaacttgccacgtaggataaatctatatatcatccaaaccgtttgaagagaaaaaaagagtgttttttttatagttgggggataaaataagacttaggtactagctcagctcatttaaactcgttatcttagagagccagcttgtctcgactcgtaatcttattgagtttaaaaggtcaaggtcgattttgcttacgaccgagctcgctctatctcgtctatatcacctttataattttaagtttgatattttattgatatatattaacataataataacatgtactaaactcgctagtttggatatagttaaaagaataagcattagtatcagttaagaagtagtagagctgaagccacgaggttatctccggccgctatccacgaggcatcatcgccgggggaggtggagctccggccagctagcggtgcggggagtcaaagtgtcaccgccgatgccgatcgagatcaccaccaattaattaagctcgctgtcgctgctaccgaccgaccgtgactgagaacaatgcaaggccgcctcgctctagctagctgtgtttagttcatactaacattaaaagtttggttaaaattaaaacgatgtgacggaaaagttaaaagtttacgtatgtagaaaagttttgatgtgatgaaaaagttaaaagtttgaagaaatattttgtaactaaacacggctgctcatgctcggcacctgtgctggagtggagctgctcaccgtttctattcacagcccaaaaggtcaatttcatccgttcacattgagaaaagaacaaaattaagcaagtcaattagaaactgaccaagtgccatttaggcaccatttgatgatgagccaaccccatttacggaatcacattttggccattttagcatgacaccatcacatatatttctcctaaattacaaaccaaaacaatcatctaacaactatattactctattcttcttcttatcattgtttattttggaactgtaaaatataggagcaaatctatattacctcatgagtttgtttaaaatggagtacttccccgttttaaaatataaagtgtattttgttatattggaataaggttttgatcaacaattgatctattaagatcaagtttattaggcggtatggcgagctaaggcgctgcacacccgcctcaacactattgcggtatggcggtaagacggacggtcaaacgttaggcacggatatccacggctgcacttattttgggatggatgtagtaaaaaatgctatcacaatcaaatggatccgaccactcatgacattatttttcactattcgatcaacctgacaagtaaaagggctattctagtctaaacaggtgtgattcttccaatcaaatgataacaatacaagtggacccaaaagctacttaacaaataggagtagggctgcaggaatt

SEQ ID NO: 20686 - DNA, 1431 bp, Oryza sativa
ttcggttgcaaagaaacctggaaatgcaagtgatgtgtcaaccaagcgcaaccacacggatccttctgcaagagcaggcaaggcagcactcactgattcctcgtttgcattgaaacagatgtacaggtcgcctctgaccgaatctgccgccatttcatctacctctgcatttatgtgcatgcaaagaaagttgctggtaggatcatcccaacctggctcacatagatcgctcccataccaatgtatattctcaagttttaggaattcccttctctgaaagatatcgcctcgccgactcctgagtgcagttagaaatgaaatgaatccggtcacttccttaacaaatgttgtcttcatgcctctccagttcagaggccctctatccttgtatgatactgaaccagcagcagagtgcccacattcatctcccatgttcagaacaggaacaccaagtgatacaaatagaataaataagaagttgcgtatctgccttagccttgtctgaaggacagcactgttctctgatggaccttcttcaccacaattccagctcgactcagaaagaagatcatcattgctgaaactcaccagatcaacaagagaaagccctgaattcctggatacatgattgaatgaaaatgcaggccctctggttgagaacaggtccccactgccgcacaggcgtgtagcaagatcactaataagtgcttctctcttcaaaaatttgcgcacatcaatagagaatcttgtgttcacctcagcccatcttttccaatgagggaatgggaattgcacgttagatatgtcaagtggagaccaaggatctgcaatgatctttgtcatggaaagaaccgggtcaaaagttatcgcctcaagaaggggaggtcgagataaatattcaccaccaggacctctcacaaggaaaggggcattgatgaagcaaaacccatcaacatggaagtcaagcacccaatggcggaggctgtccaaaatcagcttctgagtcaccggatggttgcaattcagtatgctcgctttgcatcctgcgatcccattggcaatgtaatacgaggaattatcaatgccacgcattgatatcgtctgacactctgattctccctcagcagtatgtgtaaaaaccacctccaagaggacctctattccatttctatgcattaccctgaccatatccttcatggacttgatggctgaaacactcaaacctttgctgctatacaagttcatcggtgaaaagaaatggtacgggaaataaggtcctttcacctgatgaaatgggaacactggttccagcaaaattgcattgacaccaaggctcctgaagtgctctaccttagcagaaagcccggtgaaagtgccggcagcgtcatccgggagcccgctcgacctgtcctttgtggacaaagccacatt

SEQ ID NO: 20687 - DNA, 1537 bp, Oryza sativa
ggttggtttgttcatttgcgtcgcaggtgacgccgtcgcgcagcggcaccgttggtgtcgctgtcaccgcacagtgcaggtgcgagtgcacacaggctcgctcggcgcggcggggtggtgcggccgcatccgtccgtttcgcgtgggtgtcccatgtacagcagctgttcgcgcgcactgggccccgtccccgtcacgatgtggagtggagatgtgatcgtggcgtcgtcctgctgtccggtggcgtagaccgctgcaagtagcacatgtactcgctacgtgatcacgtggtgtggtgtatggtggtttccaaaagtgacaagatccaagaaacgggtggagatttatcgtccgcccaatgtgccgctcgagcctgcacgttgcacggatctctttgatcgatcagtttccagctgcaaattctgccgttcgcgaacataacaggtcaacagccagcagttctctcagctgattttcgctatttgtctacggtctactggatttctgggctgggctgaccgttgtcgatccatttcatcaacaggctgggccattgcaaagatttttggaataagttcagaaatcgtccctcaacttttcatcgagttgtatgacatccataatctttacccctaaactatataaaaccgtataatttaggtcttatagcagtatgtatatctggttttgctaacgtagcatcctagtcagcaaaataaaaattaaatttttatggggcccacatataagtgagtaaagtggagactgcatctcttctttcttttctttttctcctctcatctcttttcttttctttcttctctactcttcttcagcgagctaggaggcctgcgagcccagccgagctccgccgcctcgagctcgtggagggcgccgccaacgccgtcttcggtgcgctcgtgaagatcttggccgcgcggatgagcgacgccgtcgtgctccgtgagctcgcctccgccggcgaccgccacaccctagaggccatctagagagcccacaacatgtgtggcgcacttgttggcctcgtcacgagccctgtctcctcgcaagtcaccaaggcctccctgttcatgcacctcctatgtgccctagaagaacctgtccttctgccgttgctctggccctcccagtgccaccatggcgcccaaccaccaccacccccaccgcaacaataacagcaacaacagatcaaatcaagaccctcacagtcgctatctctcacctcataaatcctgcggacacaatcttgcacacgcaaaaaccgaagggatctcaccgacgacggatcgatgagctgtgcaaggcaagaaaaggcggcgttttcttggggggttttgggtgcctcctccgcccaacccgcctctgtcctctgtgtcaagctaccctcaccgccccgtcagtgaccgccgtggggaagtcattggtgaagaggagtcggtcagtcggggagcttgtccgtcacagactcatggaggcgtgcgctgacactccccaccatcgtcgatgacccctctgc

SEQ ID NO: 20688 - DNA, 2715 bp, Oryza sativa
ccacaggaggcccgaagtcacccgcgtctcggccctctccgtcctcgttgctttcgacgccggaggccgagagacaggcgacgcgcacgtctgtttgcgccgttgccgcagatcagcctgacgaggtaatcgtgcgcgtgcgcctgcgcctcgatcgatcgaccattcctgccctactcctcgatttgttcgcagtcgaattggattgcgatgtgctctcttcctcctcggttttcatcgatcgcttccttctttttgggcgcgttacttcttgaataaatccttttcattttctcaaactgtcaaacaccttgaacaatatttgccgttatctcgattcaccattcatacccttcttactttgtgatgatcatcacctaggtttattcgacttcaccaatagtctgtcacgtttattgtgttacaactgagaattaacaaattctttctgaccatttttccaattcattgcagataccagctctaccaacaactcccgttacttctctgtatgatgcctgttctgaactgagtcttcatagatagagagaaatgggttctctcacagatatcggcgtcgccgcaggaataaacatactgtccgcattgggttttcttctcgcatttgcggttctcaggatacagcctatcaacgacagggtctactttcccaaatggtacctcaaagggacaagaagcagcccaagaagcatgggaacggttttctcaaagtttgtcaatgctgatctctcgacgtatatccgcttcctgaattggatgcctgcagcgctgcaaatgcctgagcccgagttgattgagcacgcaggcctcgactccgcggtatatgtccgcatatatcttcttgggtgagcatgctgttcgtgtttcgcaattggtctttttttttgtctttaaagtttccgaaaaggttgaattcaactgataaatgtgactatatgatttggattggatgtcagaacatattcggtgtattatgcttactgcatagttctcttgctatgcaggttaaaaatatttgtgccgattgctgtgctggcattcattgtccttgttcctatcaactgggctagtggaactttggagaaggaaaagagtctaagttatgatcaaattgacaagctttcaatatctaaccttggaaaaggatcgaaaaggtataattctctgtgcttcatgtgtgtgtcctaatgcttgccgcaccaccatggatcgtgcctttgtttctttgaatgattacctgtgtagcgtataatgttaccgctagtctttacttctattccggtatatgcaacctcatatccttcgaacaagataatgacatagaaggtttcctttcctatctgtactttgaaaaaatggcggtcagacattttggaattttgtgaatatgtttgcagtttttcaatatcggtgcactattagatactttccattaatttagtacaaaaatatttatgcagtgataacctatgcttaacctaaaattgtaacaattaatggagactggtgtgactaataatccaaactggacctcttcgaaattgatgcatgttctaactttttcacataaatctgctctattaatacagaagtggcaaaccttctgccctttcttcaaaaagaaaaaaaagcttttcacataaatgaatgcaaaggctttgcctccaaataatttcccaattatcgatgattattctagcatttagtcatcatcacttttatcaaatcagtttttatgatgctctagcactagaatttgatcaggctcttgcggtatttttctaaccaacacaaatgcctactaattagttttttttcgttgtcaatttcactagtgagagtttagccgaatttatatcttgtgttcgatatcctgataggctgataatttctctaatgaatttatgttttttccctgtcaatagattttgggcacacatagtgatggcctatgtatttacgttttggacgtttttcgtgttgtatcgtgaatacaaggttgtaacaactatgagattgcgctttcttgctattcagaatcgtcgagctgatcagtttacggtgagagatctttcccgtaacactcagatcaacgaatttaaacttctttactagattatttcaactttgcaacttattatatagttatgcttctttttttttttgaatttacggcggtgaaaattttcttatttatctaggtcctggtgagaaatgtaccacctgacccagatgaaacagttagtgagcatgttgagcacttctttgctgtcaatcatcgtgatcattatctcagtcaccaggtaataaattttgctatcttcaatccgctgtggacttcagcattgctttttgtggaaaaactagataattaagttgtaaggaaatccaaataagaaacgactcattgtatttccttttgttctgttctcctgaattaccgacagttctttactcttagcacataacaaatagtccagctcaaatgtgtgctcctcatttggagtaatttcttttttatcatatgaccaacagaccgtatacaatgcaaacacccttgccggtttggttgagcagaagaaaggcttgcaaaactggctggtctactacgaaaaccagcatgctaaaaaccctgcaaaaaaaccaactatgaaggtacgggttgtctgttgcagatttattctcatggaccca

SEQ ID NO: 20689 - DNA, 8924 bp, Oryza sativa
  unsure (1)..(8924): unsure at all n locations
gatatacagtaggtttgttcatcttaaattagaatgaacccgttggaaaactaaccataggcgccttgcgagcttgcccgatcaacttatacaatcaaatgctaataatgggttagaatacaataaatgagctttcctgaatggtggtatcttcacaaccacttgagatccgtaatgacatgatctgcaacacagagagttatattgtcttggagattctaaattaagtgcttaccgtctgacctagtacatttgtaaatacgattactacttcctctgtttgatatatattcgtctttttttctttaaaaagtacagacgcagacgctcataatacacggacacttatccttatgagcataaacacatgtatcttaatcttaagattgataaaatcatcacagacgcctagctattgacggtatgtcaccaaccactgttggaataattaattgtaaatatgagcacccctgtcaagcctagtatttaacctgatgggtaggttccaccacaattaatctaaccagttgagagctatgtccacttcacactgaacgtgtagagatgtagcctagagggggggtgaataggctttcctgaaattttctcaacaattacagcggttaaattaacagggcccgaaacctcctggtgatgaacaccggaacttccgggcaggatgagtagcccgaaacttctggagttattgagccaggaacttccgggcagctgagataaattaaaactgagatgaaaaacatgtcctagcaagggaagtttaggcacacagaggaacaagatgaagatcgcagaatatcagcagattcatacaaagatcatacacaagagagacaaagacgatttttttcccgaagttcggattacacgaatcctactctccgttgaggtgctccaaagagccgggtctcgattaaccccttgcctcacttatgaaaagatcccagaagaggtccacagccttcaactcaacacttctaggtcattttctagaattgagtgaccaccaagatccaactcaaaatttcttctagaaaagaccacaagtgcaagttgctctacctaggacaacctctgaaaactcagcacaagaatctttactcacttaccttgtttccttgtggaggtgaggaaaaccttcccaaactttcccgggacatccacaagatctttggaagctcacgggcaacacctaaccgtctaggagaagatctccaaaagtaataagcccaagtgacagcccacaagatatccaaagtgctcaatcaaacctaatcttcaagccatctccaaaacactcctacactctcatctaatctcataatctcacaagatatgctctagatttgagtggaggaagcaaatgaagcttgggggtggctagaaaaccctagaacatgaatgaacagaagtggaatcgccaaaaggtgacctggggatgaaatccatatatataacggctaggtgacgccatctagctgttactcacaagtttgaactggaaacctgctaggaggttccggataaaagtgccaggaacttccgggcagcacttaggaaatttttgcaaataaacggtgcccggaagttccggccagaacctccgggtagccctctctgtcccggggagaaaaacatttttcaaaaatgattccaaaaatcttttgactcatggataagactaagagcactttgtataccctagaaccacacttgaaacccctcttaatagtacggtttttcctaaactcaatttcgaaagtgaaaaacctagtctaatcaccttcgatgatttttgcacttaggaacattcgaattggggggtctccttgcattcttagccatcacaactcgctttgggactaaactcctgtgaataaacttgataaacacgttagtcccctttaaccaccttgtcattaatcaccaaaacccactagggggtttaagtgcatctccacacacatgttcgcttttgaactactatatcattttgcctgccttgcctttttttttcttttccataaatataatgggagtatctataaaacattcaacattttttaatgaatgttttaattataactatattataattggggtataattacattgtatctataatatagttacaacttaacttatatatgcacaaatataattggataaaacaaatggtgtggacgattagcaagcaagcattcagccatcctgtaattcgactcttggcttcagcatgcgtgtgtaatttttcccatcctgtgcaaatctcgaggcgatcagaggatcagaaaattcaaaagttttgagcagaaaaaaccgtccaatgtttttttaagccattccgaattacaattagcagagacacattgtaagatgaattagttacagtcagcatataacaggcaattctatacataaatcagttctatacatatcacagtatcactatttttagcctcaataccattgccgatcgcacgctagcagcttagccgcacggcgcttcatcttgccaaataagcaaccatctcactcctcctaaccgtttttcccaatttcccactagctttactactccacaaatctgcgtgacagcgaccgtacgtgcacgttacacttccgtggcgcgactcggcccgcccccgccgccgccgctgcacaccctgcaccgcggccgctcggtccaaacctaagcacaactctgtcgagactcgagagggaacgggtgaatcgatctgaacgggtcgcatcgcatcccgcgatgtacgctggcgacgcgcaccatactccatcccactccgccgcccgcacggctgcttctccccctcccgtgcgcgaccgcgaccgcgagagcccaagaaaggaatagctagcgcgcgccaggtagtttgccgcgcggggtggaaatgcttggatttctccgtgcggtttccttttcccccccgaggggtgggacggatcgggaatagtattatcgtacgtcgccgcccacccaccacgcgtgcgtgcgtgcgtgagcctgcgtacatgctctccacgaacgcaggggatatcgcgagagacgtggaggagatcgagtagtaaggagaccgaatcgatgggagagatcggtaatcggaggaggaggacagaataattaaccggtgtgtgctagagattatggagtccgacacagattagcactccactgctaactaagaaaaagaaatgattgattattgagagtggatgaatgggcaggcagggatagattattatacaagtattttgttggccgaactagaggggaactaggtggtgtttggattaagcactaaactgtagtcactataacatcggatgtttaacgctaattcaaaatattaaatatagactaattacaaaactaattgataaatgagagctaattcgttagataaattttttaagcttaattaatctataattagcataggtttactctaacatcatatagactaatcatgaattaattaggtttaataaatccatctcgtaaattagtctagagttatgaaataggttttatcgttagtttacgtttaatatttttaattagtatataaatatccgacgtcatagttttagtccctagtggtcttagattcttggggtcggagtcggagggttagtgagtggaaatgacgccattagctggtcgaaaataatagtggaaaaacgccgcccgtgccggcgttgtcataggtttcgtgtatagcgcccgggggaattattttcttcttcttttcgttcaggaccgcttggttttgtttcttctgatgaggatcggagttcgtgtgcatcgctccttctggagagatgtcgtgagctatccggcctgtgtgtttccagagaacacatggttcaatgacaacatgacaacagcacggggtgaaatcgcggtgaagtcatggtcctgtacgccggtgggctgtatgtgtaaaacatggaaaagttctccagaaaaaatgaaaacgtcggtgacgtctacgcagacttaactctgcagggcagtacggtgctgctgctgctgctacggaagctgtggatctcctagttacgccagccaccgttgccatcatccacagtgctagtggtacattttgtactctctcctcgtagtagtagcatgcagcagcaatagccacgggtactgcacgcggcgtcacggacggtggatcgaatcgaccgagcggctggtggtggcgggggcacggaaactactgcagcgacgcagggggaagcagtaaatggtccgaagcttaggtaggaatgaaaaaaaatagaaatagaaaaaacaaagtgtaaaacagataattgtaaaacacggaaaaaatcatcagattggaccgaaaaaaaaacacaagaatcagatgagagatatactcaaagaaattttttcaagaggttggttctcttggtaaattttctttaaaacttacgttcaataagctattacagataaattttatagaatttagaaaacttcattcctttaaatcaaatgaccaaatataaaaaatgtcacgccccgaactagtcccgaccggaactagcccgtgacgctccaaattaacctgttaatcgataccagtcccaggaaacagtgctggtatcacaggaagacagaatatcacagcaacagaggtctctttattatagagtaggagtacagtcatgttgggccgcggacagatcccgagctcacaaaagggaagcggaagccaagacttggaccaaacatcacaggcgcgacttgggaactaggccgaaaccctaaaactcatcgtagccggcttgctcctggaagaactcctcgtcagcgggatccgcttcatcttcttcagcaagggtgagtacaggagtactcagcaagccatgggaaataagtgtttaatgcaggcttcaaagaaaggccgttgtttttgcgattgattttatttaaactcttttttgaaacaactaagggagtgcttctcaaacgacacggatgagacagtgcgtctcgtccggtcggagtatgtgcaatgtttcagtcttttgaattgatcaagattggcacccggccaacagctttcaaacggccacccgggcctggctgatcccatcagccgcagattttccaaacatcaaacccattccacaacagcaaatttcacaaggcagtagtcaaacaaaactatgctaggaatcacctcacatccgcccatgaccgtgggcacggctgctcgaacagttttaataacctctgcagagggggcacactttacccacacgacattactaacccggatcatccagcccgtgcagaacggccacgactagagaccttaaggctttcatgacaaagaatttcaaaagccgacacaggttcaccatatgccaacgagaggggtcccagaccaacaccagattaggtcccagaccatactgtgccaggaagccaaggggtcctccccgacaccaccccggcgaatccacatgtctcttagcatcatggctcccccgataagctagttactcagccagaggtgtcccattccacccatgtggtcgtacttgtcttatattcggatgaaattccaaggaaacggtccttaagtgcaagagcgggaaaccgtacacccggtacgttcctcggtccgcggttttggaaattcatttagttcgcaagcaccgacccaggtgtcgggttttccaagtcttttgtaaaacccaagttttacccaagatgtttctcagattttaagtttgaaggcgaccgtcgatacccgtgcagagtgcacgattaccgaggcgcaactaggtgggtacaagggaacatggtataacaattacaatggaagggtcaaatgcaacaaattaggtaggtccgccaatctgccttgcagacgggacaagcagattaagtgcgatcctatcaatgcataatatttttcaagcaacataattaagttcaaatataggctcaagatgttcaaatgtggcttgccttgctcgagatcttgagcttgatcctcgaaatcctcgcactgcgggtcttcgggctccgaaactacacgcgaaacgggacaactcagcaaacggcgaaaataaagccctattattgacctctaagcgtgccattagatagatctcgagatttgagaattttggaagttgaacggagtcaatcggacttacggttgggaagatattgaatttctaagattattggatttttggtctaaaggaaaaggatttatttaaatcctttttgaaaaagaaaagaaaagaaaagaaggaggcagggaaattagactttcctcgggcggctagggcgcggcccgagagaatggggcggctcggccgagcttaatgggccggtcggcccaagaaggcggcccaaagcgcgcgcgggggcggggaggggagagagagagccggtgggccgggtccatcccgcgtggtcccgggtgggacccgcttgtcggcgactcggctcaccgtgagcgaggtgcacgtggggcatgctagggtttggggagggaggcgcggcgcatgcgcgcggttcgtggaggacgcggtgcggcgggcccacgcgcagcctcacggctcgcggtggaccgcgtgcgcgagggggctgtcggtgacatgggaccgggagtatcatgactagaggcttgggcagccgcgatcacccacgtggcctgaccccctcgggggggggtcgggcccgagggtgatgtggccgcccctcgccgnttgtctccccgaggggtcggaccattcccgtttcggccccgagggccggggcgccccgaccccctgtgggtttggcaccacgtatatgggttaggtgagcacagcggggctcacctaaccgcatttattgcgggttggatgagcgcgtcacgccgcatgtaatgccgcgcagcgagctcgcttatccggtccgtgaccaggcgcagcgtgtgaccggtcagatcgcgggttaggtggtggcaggtggcctgttacacgcctcgccccgtcccgtcggaatgatgagagcctccaggcacttatccctagccggagccggcgtgccaactcctggggttggcacgtcagccccggccagatacatgccaggcttcatcccaaccattacaaggaagtaattgtatgaagaagggcagacgtgcggcatgctaaactgacacatggtggacaagaatgaccggtctgtgactggtctgacaccggtcacgtcatcggcaaacaaactgtgctcccacattgcgtctgcagccggcggagtggaggtaggtatgacccgtcccatcgaagggtcattcggacaacagccattgcaaatctctgcccattaatgaaggattgacaaggtgatcccctgtgtcaggcgagtgtcggcgctgggtctcactcaaagacaagctatgacttagcttctaggagaggtggtgcatgtggtatccccttgagatataaaaggaggaccttgcccaccggaaagaaaaaaaaaggagagaaaggagaagacgatagctgatagaaaacaaagagtagggagagggtctctagagttcaaacgctcttgctctccacctctttataatttcttcatacacagatccaccagaacacaggagtagggtattacgcttcccagcggcccgaacctgtctagatcgcccgtgtcttgtgcatttgctctctcgcgaaccattccacatatcgagggcttagaaccttactcagcgcccccggccgaaccggcaaaggggggcctgcgcggtctcccggtgaggagccccacgctccatcaggggcggagggaagcggcggaccggggtctgcttgacccggtcgcggccgaggtggcaccgacgtggcgcctacgtggctgccacgtgggccggcgggaggtagacgacgacgccggtcgaaacggacggcggacgacagcggcgagcggcggagcgaaccatggcgatacaggcgaaggcgagcacactgggatgttgcacaggacgaggggagacgagccaatggctcggattcgccgggggatgctcgacggcggcggattgcggcggcggcaaccgacggcgggagaagggggaaacagcgatgaggtcacaaggggccgattcccggcggtgagagcatctacgcggctacgggaatccgttgctagcgtcggattgggcggagctacgccgagcgaggccggcgacgagcgggcgctacggagcacgggcggcgacggcggcgagcacacagcgagcagcggcaacgatcggggcggcgccagctagctacgggaaggctacacatgctactaccgaaaactaaggggaggagatggatcgaggagggagaacgggggaatgcactaccgagatgaggcggggcgctgtgacgagaggccgacggcacgggagtgatctctccggcctcgggccggggaagaggaagaaggcgagcgcccggagtccccttccgtgtcctcgctcgtgccggctcctccgacacgtgcgacggcgaacggcgacagcgaacagagcacgggaggcggcgacaatggagtggaggcgaatgggagaggaaaggaaaggggggggaagcttgggtttatatgggcgacaatgtcggtttgggagaggggaaccgactttggacggtcaagccagcgagctggcgctctggctagcagccaaatcggcgacagggagtaggggaatgactccggcagaggaagaaaaaggaaaaaggaaggaagaaagggggcttgccccttgccactttgggaaaaggaggaggggagggggcgacgcggcagagggaggaggagctctgcctccgtcccttggaggctagcgcgcggagtgtccggggcc

SEQ ID NO: 20690 - DNA, 13648 bp, Oryza sativa
acacatgtatcagctagggatatgtctcctcgagagtctagggcctatttagagaagcttaagattttgagaaacagctggttaattggtagccagcttctgagaatatggaaaagctgggtttcctagcttctggtttctagttcatttcctggattctacgtacaactacagtttcttagaatctggaccaaaagctggactgtttgggagagcttctgattattagagaagttgtagcagctaaaagctcttctaaacatacccttataatcgtttctacgccatagctactatacgtaggttgcatgcatgtaattgtattcgtgcgcgtatgtgcgtttgatgtgccgtaggcatcgtacgttgcatgtattgttttgtatgtttgctcgtcacatggtgaattgagcacacacgacacatctcatcatcagctgctgcccctgggatttgtagccttcttgtatacctgctgcatggatgtggatttgtacatgcagctggggggcacgtacgaattaaagggcccaaggaattgatcatcgatcgatcggcaataattggtttagtggatcgaattccgtaatcagtggtacctgcatgcccccattggatgatgtttgcatatatgtgcatttatatttatattcgtattgaattattgatattagcgtgttggaccattgatccggatcttgattaattcagtgccatggatgccagctgctttaagtagcttcccgtggatgaacggtctgttaaaccctatgtgcgagaagtgatatgttaaactcgaattgtgattggatgatgtagttaagtgtcaacctatatatagtctcgaagctgtggacactaggacagtacgattctgattgttatgcacttgtgtgcccatggttcagttacctccccaagctagcaaagcacatgttgataggctatttatgagcatttttttcccatgagctgaacccgtgtgatctatctgtagatttttgttgatcgattggactagtaagatgactcatcacatatccaaattgttgcgcaccactccattgaagcagctagccaaattaatgatactacgaggcacttactatatatttccccgatctatttttgatagtcatatttccaaatctgaaaaaattattttttagacatatttcaatccaacaacttattatcttaatgactttctccgatttaatacgtgactctccattcctccacacaagattggttacatggacatcgagaaatataaatattaatgaatcacttgtttacaaggaatgactagtagcatgtttagatagatgataagattgatcttatacctcccggtccagaactagaattacttatcattagtctatatgtcaatatgaaatatgactatcaaaagtagatggaaggagtatgtcgtaattaaaattagttatgtatgtgaacaatagttaagtagtgctgttttaatgaaagaaccaaattacttaaagttccgtgtttttctgtgtgatgattaaccacgcctacctttaggaatcaacttcgatgagaaaaagttggtaagctaacacacaagtcaagacgaacataaatacaatataccctagagtatggtcggtcgatcaaagaaatgaatggcaaaagggaatggattcaagtttaatttggttgcaataattggatgggtagttttcaggcttaccaactacgagagaaagaatagattggaaacattttatgaccttatgtagttggtggtgtagttggagtcctaacccttttgaggtaacaaaactaagatcctctagttgtagatgtgagtgatttatcaagctaggttaattaaaaaacagaaacaaagacagataatgagacaaatcaatatcaataatgtatctgagcagtaagccatatatacggattgcgatgctatttaggacatgtataaagggggagcgtatcctatgcacacaagccctcgcgtgtacacaccgtgtacaccaactaaaaattatcacaaaaaattctaggaaaattcatacatgtactttcaatagtattacatctacgtgcaaagtcgcatcttcaaattcattctacatagagaataataaaaaagataaaattctgacaaaattgcaaccttaaaactgtcagattttttgttttttttgttacggctaaaatataatgaatttgacgttaagattttaaccctaggtgtaatacaattgaaagtatgtgtatgattttttctagattttttggtgacattttttagttggtgtgcatgtgtgtacatgtgagggcctgtgtgcataggatatgttgccgtataaaggtgagacaatcttgctatatatatatcttgtaaagacaactgtacagcgatcacaaacactataaatacaatattgcattattgtctttagaaatagacttcacaataaatacaccacaatttattatagctaacccatagacaatcaagttgtgttttttttttctttcatatgcccaagagcttgtatattttgccttctataacacatcaaattctcgtgacatgttcaccagaataatccacagttttgttagtagtattattttgcaatgataattgatcgatgtaatcttcttctatggagccccacaatgcataacagttatcaagcatatatagtcaacacatcatcacacgcttgatcatccaattaggatgacacacacagcactagaacaaggaaaaacacctgtcctaagtcctgaccgtgtcctagttaaggacatgtaggcagaagagaaacatggacagttctgtacagtctgttgcatctctgtccgtcaacactaagaatcacaccctgtttatatgcatttgattgctgtacaaggtactccatcatccagcctatgcatgtgctataaccgcatcaggtacagagaaaatgcatagacaaaggaaaaaaaataaagctataattaaaaaggtaagagaggatgattaagtaaaccaagaaagcccagatgattatcaacaacggcagatggtttctaacttagaattaattaaatcaagggttagtttgggggggtatggcccaggtttgttaggagtctctaatcatgcttgcagttgcattagcacacacactgtcgaattgccagcatgttatgttctacttgcatgtgtgctccctcatttagacagaggaatgacatgtacacgcaagctaccccctgaatttggatggcactgttgattagttaatgctacttgcacttagttgcaccttaatttggttcgtgcaaatgggtaaattgtattgaatgtaagatttttaggaattgttaattactacctccagtcacgagtcatttggacatacacctgatcaaagttttattttttttcttaacaacgtattataaatatttgtattggatatatggatgtcatatatatgcatggatctgcataaaagttactcacatgttataagtttattgggtttcaacaataatacatagtacggtagaaaattagtggtaagtcacagtaaaatttcagaggttatgtgattttttctcgaataaaaaagggttatgtggatgcttaaaatggcatattatatatgtttaggttgttttcaaaagaagtggtagtaggtgcaattactaagtgttcacgagccacctcacccccaagcggtgagccagacaataaatcatgatcgaagcagatggattgcttgatgaacctaggagtttcacgtgaataataatagaagtggtagcacttgaattttcaaatagatgtagtcaactgtagcatagcttagcggtgtagcacgtctctgtggctaatgactgtgctttacttaattaattagctccctcaattgttcgttgggcggactattttatatggacttgtaatcattaaaacggcagcaatataactaatttgtccatatgcatagaaaattgcatctttatttgagagagtatataaaaaaatgcatatgatatatacaaacaggggattgatgccagagtgacaccaaacttggtttaattttctatctgattccttcttctagacttctagtcacccatgaatgcatagttggtacgtacttggtagcctgcattttctctctccttggagcagagataacaacctgctaataaataaccaatttcctcaactaattttaacgacttgcattacttgcacttccatataaccaaaacgacaaatcagattagttgtaggcttcatacaatatttgaaaatgacaataatatttcgatgctaagtaaccaatctagcattttattaatataagttgtgcgccatggtttacctttccatttccgaaacaaaaacagctccccattggttgccgggctatcggctaaaaaccagtaaaaaccgacgtctttcactcaacaccttacgaaaaccgttaaaactgaacaattttcataaaccgaaaaccaacgatttaaaaaaaagatatgattcgtgaaaactctgttgtgcacgatataacccgagtctgagatagtaacaggggtccatgtcactcttctgtaaatgatctgtacatttgttagtatgtggcgacgtgaggcatcgattgaaacatcgtttttctttttagaaaaggatagttgcactgtgcgcagcttgcatccaacaactgtgagaaatctgaaaaattagcaacagtagcaatcaattgaatggattgatcttatccgctcttccattacttaagtgagcactagtagggtttagctgtgatgatgatgatgatgaaccggtggtttgtatggagaggatgccatcgggtagatgctcttgtcccttttatttggcgatgtgatgataatattgcggtcttcaagacaaataagaaaaaagaaaaggatgataagattgtgtgaatggtactcaagtcattcgtggcaggccaactgatgtgcacttgatgcggcctagcatgatatgcatcgtcccaactttcgcactctagttaattggaggtgatgtcgtgtacgaatcattctggcgtcaacttaaaacaatagtagtgactctgatgcggagggataataatttaattagtcacttttcaaggtgtatctaattcgttttaggtgattaaaaaaaacctcaacttcttctcttcttgtcaaaaagaggacctaatgtggcctttaaaccaaaaaaaaaaagaaaagtgtgtggtcatgagtagagtttcatatctattatatactaaaagtatataataaagtccatgaaacttcatacaaacgctcccaagccgccatgtggcgctctaataaaatagagaaaatcctataaattctataaaaaaaaaagcagaacatatatcccttgattttcacttaaattggtgggtccaatattatacaccgttagataaaattgatcttaaaacaaactaaataccatgggtcccacctatcctcctcccgcgcattggcaggtggagtatatacgtacgtacatggtacgtacgttcctcccccacttttttttattttttcttctttcttcttcttttttccatttatatatataatggatatatttttaaataattataattttacaaataaagaatctaccatcatataacttaaaccggtttactttgtactattattttcaaataatgcactattttaaaataaattttacacaattatatcgtgtacctatcaaataaataatatctatattaactaatttatacgtgcacttaagtgcacttaaactgatggccccattatataaatcatcggatctactttttattacattgatatattattctcaagtaatgcactgtttcaaaataaggtgcacaccatgtgtacccattaaaacatcaatttaaaatatatattaactaatttacacttacactagaactggtggacatattattataatcatcggatctattgtttgcttataaataaagcgtctgaaattctctttttgcccgctgcacaatacacgtctgcacctttgcctttcacacttgtgacaaagcgtagtatctgagacatctaaggtgatcgcaaccgatgtagcgctaccgctttgccacatatcaaatcatatatggagatgattaattttgttaataacatgaaaagaaaattaaaggtgtgatgcagcgagagaataattaagtaccatgggttatgtttttctcaatactaattagctctatttaagttgaaaccaagaattgattacataataattgtaatgtatttgtgttatgtcgtatttggattttgtactatttattcgtacaggtgaaaggaatcattatgttataaatgtgagagtaatattgacgaatatccatagaactcttactacgacaagggtgataaatagagttttaaggccctctctttttttttccccgattccatattttggatttttgtttgcacgctttctaagtttctaaatgttgtcttctttaaacaacattctaactttttagaagtcaattcattcgtttataccctcaaatagctatcacataaattatataattcatcaatttcatctatcctaaaccttactatatatttttttcatgcaagtcatggtgattagtaaattggtgaacaacggatcatcgaagtcgtaagatgaatatgtaagagttactctgaacaattgtaaataggtatcaaaattaattgctattaattagacataatggcttgctagccacaaaattaatttctctctacatgtatagaaacatggacgaaactggaacaaatactaccatatgtcccatacatatatattgcgcagttaatattctaattagtcatttaaaattccttaaaatgctctcaagctaccacgtggtgctctaataaattagggcaaatattagaagttctaaaaaaatcaaagtatctattacttaattttcacttaaatcggtaggtccgatattataaaccattagattaaattgatcgtagaacaaactaaatactacaaggtcccacctcagcataggtgtgtacctacgtgcgcgggttcgtacgcctcccctcccttttttcatttttctttcttcttctttttcccatgcatatgcttccctccctttattactatatcatgcactttcatgagacgatttaatcaaagaattttaagtatcttgcactcgtattttttatttgcggccatactacactatatgtatatagatggactgcatgataattaactaccaatagtttcttatttactcgagaaaaaaaacatgattcaaaagttgtaaatacttaatccatctcctactcaaaagttcgtgaatggttttctaagataccttaagaaaaatagaacccttaaattattataaaataaaattatctaaactttagtttgtcctaaatctatgagacaaaatttctgaacaaacaataatcttacctttcaataatataagtgcccgcgcatacgtgcgggccaccttcctagttaaaactaaaaacacatttgctagtgattagggtgacaggaatcaaatactaagcagcaattaaatgggataatgcatacgagcacatatctgcaggaaagcgagcggttcaaggctcttcttttcaggtcgaaaggtcccttgcagatgaattgtcttcccctcttcaatgcacatatgaaatcatgaggcaatcatgcataggatgaatacaataggtctacaattccacgcagtgtggtcaagaacaagtcggaccttatcggttactatagtatcaattccatgtagtgtgaccaagaacaagtcgcaccttatcgggtgcttgctagtatggcaatgctccaataagtaccatttttgaaccatgtttttttactgtgtcagataaatctagcatactagttgccgattactatttcccacttcttggcaaaaatttgacgatgagatgaactaagaaatagtgtacgttgccttacctgttcagaggcccttttgttaatgtccatccatccaacctggagtgaagcaaatcgtccacaatgccagaaacctactgttacactggcacattacgtagcaaaccggggtccaactagaagtactttatttttgtacaggtaaaaggaactgaagtactgtatggtatactgggctactggcccgttcctaagagcacagagttttttttttttctcttggcaaccaaactgaagtttcgcatagcttgccatgcaacgcatagcattacagtctggaatggccggtaagtatcagaactgcgcaaacggaggcagcagcagcagcagctcggaaaaacacacaacagcatcagatctgtatcccagcaggatgtagacacagggcacctcctggacatggggcacaggcttggcactccacagtccacactccaaactccaaactcagccagagcatggagaacctatcagcacagccgccaagaggaagagtaaagatccaaggacactatcaattaaattaatgttcaggtccaaacctgtacacgggtaatatgatacaaaaggagtcaggcccataattatacatgtaaaaaacctaggtggtggttatcatgtctatttcaaagttctttttcagccttcatttcgttcttttccccctgctttatcaacacgaaatacaacccgccatgcctatgcgatggtgcctatgtgcaacttgcaactccattgcatgattgggaccttactaaatttgaaatactgcacaatggaagggagcaagaaatcaggtaatggggtcaaaagaataccgcgagactatgaacaaaagccattagaagcctctgtcagtgatgggatatcatcaagaacgatatcggcaggatctccaatccaaagcccatccctccatctgaacttgatcctcagtttcccatttgcatcaacgcctacaacctcacctttactctcatatgtctcctccccccatccccaacgtggggttacaaggccaggtcgtatccgtactctgtcccctaatcggaatggcctcaccttctccacttcccaccttttgcacaaccattgtctttcacagaaacagaaggcaacccaaagttcaccatcctcggcccggtggattacccctatgctattatggttcacgtcaccccactgatatgtgggggtcgcaacacaatccttaacctttacccagtccccgacacagacttcttcctcttcctccaccttttcaacctccgctgggtctatcaaccaagctctcgcaccagcgggtgtatgaatcctaagcttcccatcagcatcaatagatgagatggtccctatactagaatgattatgattagaccagccaaatcttggctggtggatacagagtttgacccgcacgcgctgcccaacgacaaacttgctgactccttcaagctggcttgaaggccctatccacctttcctgctcaccacaaaatgccacatgaatggttccatcccagacatcatcttcatatccaatcccatgtaccacgccaatgctacctggtttgagcgacttccaatcatctgcattatttctcagcctaacccattcacccacctcataaacttgctcaatctcaagatctgcaggatcacctttccacagcccaggcacaccaaagaaggctactcttacttctccatcagcatggacaccagcaattatgcctctggaatcaggctttgcatctctccatccccatctgggctctgtaattccagcacggaaccgaacatgatgaccaatcttgagaggctctactttatcaatttctgtgttatgagttaaccatttccctttcctgaaacaaccagccaactccaggtaaccagagtttgaatgctatgaactactgcaatacttattttcccaacactccagtcataagtaggcctgctcccaatactagatttcaaccgcacccagtctccaacctcaaaagccgaaagcctctcagcatcacctggagctaccttccacaagctatttctgccagacaccttgacatttagagtcccatccatgtctatccttgagatagccccgatggttgctgcagtttcatttgaccatccaaggcgaggctgagatattgaaggtaacacatgaattttttctcctacctcaaaaggctgtgccttctccacatctgcaactgagcaagaaaaaggcttgcttctgaagcagaaagcaacacccatatctccatcttcttctagactatgaaccaccccaatactgctacgagtcacatcctcccagccatatttaggggatggtactgctgccttcactctaacccaatcaccgacctgcaaataaaatgataaatagaaaatgagagtccaattaatttgctgtgctccaagcagagcaaatgctggtttgaaaggaaaacccagtaaacttctaaccttaaacttttctatcttttccatgtctgatggatctgcctgccaatgtacagcccggttaggaatatcaattatgagtagcccatcactctcgatgtcaattatttttcccacgctgtgatgggtttcaccaccccaggcatatctaggctctgcaacagacctttttacgcatacttggtcaccaatctggaaatttgaagaaacatgagcttcacactaaacaaaacaaaaaagcagagcaaacaagcacagatacatgcaaggacaagttcataatcgctgtgccatgtaatctaactacaagagtttacaaagttgaataaccaattctagtaaataagaggctatcacatattaatgtatctgaaagtccaatagaaccctcaacattccatcatcatcaatacagaaaattgtccaaatgctactcatgactgaccataccatccaaatctgggaacagaggattttatatgtgattcacatttctcccacaataattgataacctactaagatgagtgaattctatttttatgagacattcctcaaacattggtatattaatggtaaggactttaacattcacatgcaaatggcaaatcccaaaatcatattttaattttgctttttgcagtaagcagaagagcaacttcagacttataataggtaaacatattagtacaggaaacaaatggtaagagtaaaagaaacagaactaccttgaagggatcaacatgttcaacctcctctggttcacaaagccatggacttgacaaatagcaaagtcccaatagaagactgctgtctggcctgattgagtagacaataccaacacttccaggagtaatagattccatgccatgtacagcaaccgttaatgagggacgaatccgaacccagttaccaaccttatattcttcaacccttacaatttcagcaggatcagctctccatcccctagaagctcctggaaaaccaaccctcaagattccatcatcatcaacacagagaactgtcccaatgctatctcgtgactgaccacgccatccaaatctgacaacagaggattttatatggtgattcacaatttttcacataataaatgattacctactaagatgagtgaatttgttatttgatccatgagacattctccacaaatcttcggttagtatattgatggaaggaattctcattaacattgacatgaaaatcagaacagtggctcctattatcagatttttaaagtttgcctttttgcagtaggcagaagagcaacttcagattttgaaaaggtcaaaaatcagaagcaaatcaccatttgcagcgagcatcattttctttctttgggacgaccaggatgccatcatttttgacaacatccagtacatcagtgtaaacttttaaaaccttttaacagtcaaatgcaattgcaagtcactgaaaggacagatcacctcccaggttttgggtcaatggatcttggaacttcaacttacaatcatgatcagcacagagcgaaacctagcatgggctgcatggcacacagaaagtataaactataaagtagagacgaatttattagctgtatcaataggcctttcacttgcaagtatcaataaatacatgggcagacatctaatccagtaaaccatgtatttatgtcagaataaagtagacataagtccccattacttttataatctcggtgtccagatgaatcaaacaggctaatggatttactgacttggtaatgcaaatcgtttaagacagtcacaacttgcgaagttgtttttgctatgtagtaagaaccacattctccacttcatagaaaggcaccatgcacaaaagagagttcagtgatgagaatatgaaggattaaatttcacttacctaggctccaaaacatcaggtttgagctgcacatgttggcccctatttaatggaatgactttgataacttcactcgtcaaaacgcgggcttctccagaacaaaatgacacaacaaggtggtcatggtctacaacagactgaacaaaaccaatgcttctgggtcctgcaccttgccagccaaaagctggttcagtaactgttcttctaaatttcacccaatctgcgaactcatatctggtaacagcatcaagtaaaccattcagataacttgaggtccaaagcaatcataattccagcatgagatcaaatacgggacagccaaaaaatatcgacaacattatgcctcgagttccttacatggttggggtgagatgaactcctttttcttctaaagtttccatcagttcttcagaaatccattctcgtgggagcctctccagaaaatctcgcaatgtccagcctctgtagttgatagaaacaataccgaacatgtaagtatataataaaagatacaaattctgcactgcacgaactaacccatgagagagttttcaagcagccttgcaataaaatgagaaaatactcgataaccaaaatttgcttgctatttacttctaagataccattcaatcattctacattcctggcagaaggacccatctgaaaatttaatgagcaaaatactggcataatacactacctaagaaggggaactaagagaatcttcactcaatcaaacctcaactaagaatcaccgatacatctgccaacagctattcccgtacacataaggagtatcagaatatctataccacttaaaatgtgtgtagtggtggtgtccattcccacaccatctctaccactgatgtgtgggccccacaatctatactattacaccacctttcaatgagtcctcccctgtttcactgttggttctccccaaaatttaaaatcacctactggttttaataagaaaaaacatagtacttggactaaataagtgtttattaattgatttaataggttagaaactcaaattgttgtccgttgcaacgcacaggctcttggctagtattgaagcatttaacgtttaaaattaagtaaattgcccattgtagtgggtaaatcgcaccctgttttgctttgcacaaggtttagcacataccttttactttgcatcacgttgtatt

SEQ ID NO: 20691 - DNA, 6445 bp, Oryza sativa
acttgcctgtggtttctcacatcaacagccggcgatggctgttgtaacatttgaacaatccatgagaggttttcacgtatcattttagccgcatcagcagctatgtggaaagcgttatcgccgtcgtcatcctggataaccaaatagcacaacattaagcacataataacttggtcctgacatacaatggaaattgaataatgttcgaaggaaataggagcagtgacaaaacaaaatgaatgcatggattttaagttattgcaccataattacagacctggaacaagtccagcagccaacccaccataacacctcatatcagacaaattagaaggaagaataaaggacaaattgcagaacaggccttcctattcatttaaacttaacaacaataatttgaggaaatggagaatctattcctcctgataatctagaaaagcatgctggggccttatactttatggtgagataatacagtagaatttgataaggttcagggtgcaaaatcactgggaactacaataaagcaatattgttgggcattacacatttcatttctgaaatatcaatagataccatagcgcctcttggaaggtttttacgtaaaataagctattgttaagagctgcagaggtctacaaaagcagagttttccctcttctgggtaactatatcccagtggtttcatttttttcattcccattcctgttttttgttctgctattactatccattctacatttgattttgtttcaagtatatacataggctcccgctgccctccacagcggctccaagtaatgaaatgaaaactaaatgttttcttaagtatttcaattctcaataacaacaaaaaaatttcttatcatgcatcaatacacaactatgacagtgcctgacagcaaattgatatcatgatgacttttaggatttgtgcgcatcataagaacaggaaaaaacatattgtagccggatatcgagaaaaagattattcaaacataaaacatctggaatcataaaacattattcaaacatcacattatcttgctatctcaaaaaaaatatcacattattttatttatgtttatatatatatgcttcatgagaaaacatgatgacaattgcataaatccccacaagtacaaaataaatataaattactagtaaagaaatgaatcagaattcagaaggataacaggatcagacaggttgacagtttacaattcctaatacccagttgcacaagagatcatgttactgaactatgctttcagaccaacacactgctatccttaaaaatgatcaatgaagccacagtacctgtagattgcagtttgctccagcagctaaaagcaaaccaacacaggagtttgcacctctgttcagtgcaacgagaagtggtgttgtgttctgagcatttcttatatttacatcaactccagcttccaaaataatctgtcaaagaaaatataacaaagggaataaagcatattttcatatagaattaaagcagaaacagcagaaaaatgaagtaaaattccaaccatcagacaagaacagaaaagcaaaggaaaaataataataataataagtagataacctttaccttaaccaattctgcatcattgatcattgctgcagtatgcagtgcagttcgacagtgtgggtcatcttgtgctgtgggatcagcaccagcagaaagcaatacccgtactaactctcgaccctctgtcacatatatatgtcaatattactattaaaacagacacattttccagtagataaaaaaaaatagacttctgtcctcatccttagtgaactaaaacatgtaagtttgcttgtgctaagtgtgaatgagataaatatgaattaatctctagggtgcccatgtgaatcgcatttaaaatacaactctcgttagtggaataagaagcagagttgtgaatatcaaagttctcttctctaacatgatgcttcttctataacagcattcagtgtatgtaaagaaccaacgagatggctcttgatatttgactatttgtaagtatggatgtgacatgaacaaagtcaggaataacctttctcgtgctcttttttaagagcagctgccatgcacaaagcagtcccaacagggctaggtacatcaattgcttcagctatctcctcttcagatgcaacttcaacccatcttttcaccacatccgcattccatgttttaatacataaatgcaatggcctgtgcaccatgacaagaatgaaatatcagtcgatgaatcaagcaggtaacggatccaaaaggaaaatatttcatgattccacagcaccaacagcataaggaaagccaataagccatataaatagaagaaaatatttcatgattccacagcataaatcaaccaatagaagggcaccaacagcataaggaaagacacatcaatagaagggcatcaacagcttgccatttcaaacaaaaaatcattcttacgttttattcacagaatttggtatgcccatagacctgcaaccaccattttccaataagacgatagcacaatcagtatatctcttggccacagcaatatgcaggatagattcgccttctccgtctattgcattaggatcagctccagccatgagcaattcctgcatgacacacagagaatttaaatctaggaacttgcaagctgaagtcatgaaaggtgagcataataacatacccgcatgcactctggttggccatgatgagcacaaacatgagcaagagtaggaccaagaccttctctaagcctcgaattaacatcagaagatctccttacaagtgcgcgaacacactgtggagagccagcagccatagcaaatattattggaggattttcattcttatctaacaagtccacattctcttgataagccacaatagcttcaacaatttctgctgagcctcttcggcatgctaaatgtagggcagtatatccatctgcattctgtgcttccaagagcgaacgaattaaacggccatttccatctgaggcagcttctgcaagaagattcctgacaagcaaaggttgtgtcagacagtataggctatacgatgcagcaaacaaaaagttgtcaaagactaacctaacaccagcagcatctccttcacatacaagatgatgcaaagcatttggattgtcctggaccatgtccagaactgaggctggtggcacatccgtaccgttgggcatgcttgcatttgtgaaatcactgcttgagcaagtagtgcattagaatcctctgtatcagcaagtttgcatacttcaaaagaataagttggggaaaataacatgcgccttactgcagttgatattatagtaaatcaggttaactcaaatatatttcactatatgttttatacacttttagctaaatttctacaaaccttagttccatttataaagcattgtagttaactaatgaaaaatcaggtaagaaaattacttttcaggacttgcaggtgggctccttggtatatctagaagatgcctcagaaaagtttttagcatgtcctggaaagatggtcttcttgaaggtttgaactgcaaacagtcaccaatcatcttccagagctccccaggaagtcctacaccgactacccttgaatattgaggcggtggcttcctctcttttacaacagacttacaaatttcctctgcacttagcccagcccatctgcatttcaattagcatctaaccacaccattcgaggagcattaagaaacacaaatgaaataatcaggctacttacggaacagcaccagtacacatttccacaagtgtacatccaaaactccatgcatctgactctggtaatattccatttgcactatcccaaaacagattcattgacttcttcaatggcacccaagcctcaggagctgtataattggggctaagaagtgtagcatccaagccaaccatgttggaatcatcagacactctacgactagtgaggttcttaagaatggccgaaagaccatagtcggaaacaactgcatgcccatttgtatccaaaaggatatttgacggctttatactcatacaaacaatacctgctgcatggagttctgctactccacgagcaatatctgctccatatctgcaaaactcacgctcgggaaaaatataatcagaagatataaagacttgagtaaacaaaagggaaggtcaaacataatcagactgaacaaaagggaaggtcaaacataattagactgatgaaaaaactaaatccttttgatgtgctcaagaataataacaacagtatactaggaaaaatgaggtggcaattcttataatggaaaaataagtaaagaaattggcatgctgacaaaataagttattttttccctatgtatggcatgggctatttcatgcacttagtacagaagcaattcgcgccatgtagctaccagacaaaagagaaatctgagttcagaattttatgagttatgagtcatggacacttgtgattgtatatcacattctattagacaactacagttcacaaagttccaccaaactataacagaaatacaggatgctcagaaattaatttgcatcgttagtttgacaatgtgctgatgaactttgacccacatttgtattggcattcgcatcaaatgctaccagagtgtgttgagacaaagtgcttcttgttagtaaagctaactagcccgattcggccattaacttatgtggcaccaaactcccttcttcaaaaagagtaaaaacatgtatcaaattgtttagatcacaggataatcatttcttattctttttaacccatggactaatggtacagttatttgatatccgttgcagcacacagtgagtgtgctattatagtaagaaactctacatcaggtaaacacaaatgagtggcccacactattccactgcacagaagtattcaacagatctttggaaactaaagtttgagttgagaggaacagaattaatgcagcagtgaacaaccatctttgctccaatccctccattctaacagccatatgagttatatcttttatggagaaatgtccagggtgccaaatattacagatatgaaccagaaagtgttggcatttcattcgtcgccgtcacgaacctcacaatattctaggaattataattttgggaataaacgattgcacattgtatagtacaaattcatagcacatacaagtgatcattttgttcacaaattaaagagaactcaagctccacatgtagaatgattgatgtgtgttaaatcaacaaaccaattgcaaaacaaaactatgttattcactggacactgaacttcctgagcagcctggcttgaattttaatcgtagtacaaagagtgatctttcattcctccaagcactaagtgtgataattgttaataatagacctaagcactatgtcacaacacaacaaaagatgcaggacagatggaataacaaagctgccgacaatcacccaaacattgccgaacacgtacaaatactacaaactcattgagatcaaatttggcactactaatcgcaaaaaccgctttccacgtcagtactcaaactacaacattttccaccttttatgatccttctagctagacatgcagcttagcgaaccaccattgaaaccccatgcatttgaacacatacagttagcggacaaactgtcgtatagcgccccagctcaactgtatttttagggttatcattttcggcgatcgatagtttgatagcagcaactataaccatacatgactgcagcaaatataaccacgcaaataaaacttagtatccatgtttagatgcaatgccacacctgaggatctgctccaacgttaggcgaccgccattctgccgcatttctgtctgcacagaccccgcgtaccgatccatcacgaagcagaggtgcccgccgaccctcacagcaccatggaacgtggtaacattccggcaccacgtcgcggcgcgcctcagccgctccacctcctcctgaacgccctcaagcacatcccccgcggtcacgggcaccctcttcaccgccaccggatgcttacacctcttggccccacctcccccaccaccacgagacagcgtgccggaccacacctcctgccccgcggggcccggcggcccgctcccgatgcggcgggcgagcttgaggtccggatgcgaggcgaggtcgaacgaggcgcagcccgcgggctgcagcgacggcgccgccgcccccgcccccgcccccgcggcggaggatcggcggctgggccggccgaagaagtcgtcgtcgtcgtcgtcggagccgtcggaggaagagccgccggagtcggagtggaggaacgagggcgacgacggggacgacgacagcagcgagaggatggggaagttcttccgcagcgcggagacggagt

SEQ ID NO: 20692 - DNA, 22998 bp, Oryza sativa
ggtttgggaaggaggaatgggattttttgatgggggggttggtgatgatgatgatgatgatgatgatgatgatgcggtgggagcctaggagggacgacaagcaaggctctctcctcttcgctcttgggaggggaggggtgtgcggtggtgtgttggccgtttctactttctgttccggttttgtcgagtgttctcgccttctcggggggattttgggcgatgttggaataagttctcctctttggtttgggatttagtacttgagtcatgttcactttgatgtcattttcaaccttaccaaattttaataaagttatcaaaaaagtggctacatttaatttgctgtcaaattttggtaactatataagaaatcctgtcttgccaaaattttggcaactatattaaaattttggtaatgtcaaaatttagtaaggttttttttggcatcaaagtgaacaggtccttggttagtgtgaatgaataactaaaagcaactttgttatgttctcttttttattttcttttttttggcgagctaacttgccacaccgatcaagaaagggctgagctgacggatagaccggtttggagcttgcttgtcctagatgtgcttccccgcaacgtgcccgtacacgctatatgtagtttcagtgatatgctaacttttttttttaccgatcgtttggtccacggagtgatatgattctctttgttggttagataggtataatggtcaaataggcaagatgttgttttgataattattttttccaatgtatggcctcatcctttgccctacggcttataagctaaagccaaaatttaaattttaaaacttgattttgaatttgattttgattctattttaacatagtttttttcaactttggcttttcaatcggtaagaacaatatataaaacttttactcgcatattatttcttaatcgttaagagcaagcttaatagtatagctaactactagctccaaatcttctatagccaatgtaatagacaattcatacaatagctgcttactacactattaatacttagtcccacctgtcatacacatattacgtcttggagtccgtgttgcagctggctacagatctgtagcccgcttcccttatctctcttcttttatatttttaaaatatgtttatagctagcttatagtctgctattgtacctgctctaataagccgttatggcttataataagactagaccaaccgatggggaccgtagttattgtaagtataggagtaaagccaggtatagtattttcaaacttgagaaaaaaaatgtaaaaaaaacgtactactaaggttgtgttcggttctatgggttgggaacccatctcgcacgcacgtaaaacggagcggtctattagcgcgtgattaattaagtattagtagccttttttcaaaaatggatcaatatgattttttaagcaacttctgtatataaactttttgcaaaaaaaatgcatcatttagcagtttaaaaagcgtgcgcacggaacacgaggaagaggagttgggaacatccggtgccgaacacagcctaagtgtgtgggcgctaccatcaatcgtgaaaattgtctccacctattgtaacgcacagatatttttctagtacaataaaaataaaaatatcttgtttgtggcttagctttaccgtatcttatattcggatgagtaaactataccgactatccttaaacttttatatgcatattagagcccataatctagcttgggctactaggtcattttaaaactagtccatgcacatgcatgttcgataagaaagcatgccaaaatacaccatatgagacgaaaacatgtaactgtaacaatgaagttttatactaggtttactgtagcgatctacaaataaggttgaacagcaaaaacaacaaaatactataaaccggctataaaattaagttctgaaatttaaattgtctactgcttatttaggtttatactacttctgttctcatttacttataattgcttaccacaaaagttatttgcaaatacttgtcactacacggatcccaaagcaaaattttccatttcacctttagaattaataattccattccactcagtcatacttattgtttctagagagtactcaactatattgatgattagatagcaaaaatccgacaaaacccccttatgtgaatttggctggggaggctagtcacgtgtaaacaatatagaaacgaaagaaccgatgagttcattaggatgtatacaagctcggaggtacaataccctattcttattatttgtaggattacccctatctgttatgaggatcttacaagtctattgattactcaaaatagttatgcttcctctcttctggatttcctaagaaccacacaaaatatgataaagtctcttttctctcacttccaaccctcctcgcttgtcctggttctccccatatatcttcaccagggaacacctgatgatcaaagctcgaggaaagatattgtttttctttactaaaggaaatatattgttcgtatcgggatcaaatatggtaagtcttgccaggatctcctctcattgcccaccccgctgcccttgggtatgccttggcggggtccaccatgaacgggatatggtgagaactcaccacgatacctagctcaatccatcgtggcctcgggtagcccgagtagggctcgatacaagtagcgtgtggcggtggcttgccatgcacccctactcaatccatgcaagcatgcgaggaatagggttcttcacacattgttggtcataggggcccacctatcaatgtttggtgaatggcagttaaagggtagggatcccgacggggttatgatagtcaaccactctctcccagttccccacactcgtgtaggcatacatggttaaagtaatgggcgacaattgcaacagttgccgccatgtctttcacgcgccttgctacggggtagacatccgtcttgtcgctaataaatcatatgatgtcatgggcccgagacatctcgggctacgttgtttcatgtctctgttatataaatggccacaggctacctcggggcccttgcgaaaaatattcacgcgctgtaaggttattttttgaaagcatgggcaatcccttgagggccaccctttagcactttgaggtggattcatgtgtcatctttgatcggctatatgtttaagtaattatagtaagggtcaaattatcatcttctataaaagttatgattccctatttttttttctccctagtcaataatagcaaatgaagaaaactagtacttcctccatttcacaatgtaagtcattctagcatttcccagattcattaacattaatataaatgtagaaaatgatagaatgacttacattgtgaaatggagggagcaatacatatgcagtatgatgctgaatatcaattatttgcctttgttagttatactttataagacttgttagtttctactttatgagattattactgttttagttgttttagctggctgattacaagatataagtatcatcaacagaacaatacacgcaaaatccacacgataccctcgtgtcgtgcctaccttggatctaatctaaagcccggatcaaaaccaagccaaaagcctagtgagcccagctcgctcccgttgatccggtgagcgagccctaatacttccagaagctcctcttcttcgccgtgccgaacactcgaatcgcatcgcatcgcaccacaaaccctcccccccgaccagaaagccaagaaagaaacctttcttcgtcggtctctctctctctctgcccatggacttctcggagcaggacgtcgaaatcttcggcgaggactacgacgacgccgaggccgacggcggcggcggcggcggtgcctcgtccggctcctcctccccgtcctcatcctcctcgtcgtccgccgccgggtcctcctcctcctccagcggcgcctccagcagcagcggcgggggcgggggtgggggcgaggacgaggacggggtcgaccagggggacgccagggggtacgacgacgacccgttcgacggcgcgcccgcgagggccgccggtgggtacggtgacgaggagaggggcgagggtgatgcggaggaggaggaggaggaggaggagagggatttgttcggctctgacaacgaggattacgtcaagacccccgcgcgtagcaactacctagtcccaggtccgcctctaatatttgctaaattatcgtgcacattttgggtgacaatgatcagtctctaagcatgtctaatcagtagaattaattagggcatttttacaaaatccaacccagttcttttggttgcgggtaagctgatcgtagggtttaggggattcagtgagcatgtagaaaattgcgggtttcacatgtatgtatgatgaattattcttgttctggactttttaattcttccttccactttcgataggcatatgatacgcacaatgtgtcttataaagtaacagtacatcatggctactgtcttctgcttgcaactcacttttaaatcgcaagagatgttttacaacaccatcaagcataattgttggagagtagccattgaacactgcctaacgataagtgttaggggctattggattagctgatagttacattgcactatgctagtatgttaatctcccgttttgattataggtagactacagttgaataacatctatctgcaaacgaatttgaagtataattgaagtgaactctgcagtagattacagttatgaagaatactgcatctgatctgatttcctctgtagaacaatttttttcacattcttctcaatctgccatctaactagaaacatagaagtttgaactttgaaagatcaaagttgataataaaacatgcataatttattgaaaaccttcaatatatgctaatcatatttgtgataggaagctccctaaaatcaatacgctatttgtgatgatttagtgctggaaggaatggagatcatgctaatgctttatgtgtaacaacttgatatctattgttggcatacattttatcaatctactaggtccattagtgattggtaatgcccatgcttgtggtaaagattgtaactgggttattttactggctatacgcttgatatgttggtgcggggcttggggcagctagcactttaaaatgtttgaattatctaggagggaaggttgagcttcaacactatatttcattccatgccttcccttatagtgctaccctcaatacggaacaccaacaatcattctcggggaggatatggggggcggaatggcagaggtccacctcttcttccaaggccaggaggccatccaggacggcataactttggatatggtgggaggttttcgcatggaaatgggcgtaatgttgaaggttttgtttcagaaatgaagcttaataagagtgaagaaactttatctaggaagtttgttgcttttcaggaggtgagtaatgataccatattcttttgatttttatatattatctctggtatctatgtatccaaatcctttcctattcatgcagccttctgagattgcatgctacagccgtattgagggtggggatgtatattttgatgaccgcagcttggtaagatcacagaattgctcacgatcaatttcactttccctttagttcgccatttccttaaagtctgtctatgtagtattacagaaaagtattgttataaatttgctgctgtactaaacatactgttattttagaggctcttcaaacgtaacatttgcgactatgttggtgaaaatctcaataaaggatttgaatcttttatagagaaaagaggtaattccatcaaaaactcatgttttctgtttttatgttctggagtactccctccgtcccataaaaggcaaaccttgtacgagatgtgacacatcctaggagacatgtccaaattcatagtactaggatgtgtcgcattccgtactaggtttgtcttttatgggacggagggagtagttgatataaagagtactgttaaatgtagaaattgttcttatctctggtattgcaaacttctgtttcaatcatcctggattaacttgtccacatttatagaaagttcatgacagcatggcaccttccactaattttacttggataatttattcttccttaaaaaatggcatgagagaaaatacataactactaattagaggttctaattatttctcatagagccaaaagagaaatgaaataaattattggaactaattaacccagaagttctttttttttttttggaatgagttgaatcctacatgtggatccagataaacagtagttctgttatttggaagttgttctttccttttgaatttattttcattcaaggggactgtttcatgacgaatgtggtttaattgtcaatatcagatttgggttcagaaggatttggtgatcttcttgcatgcataagaaattcaactgtacctcttcagaacatacattttgtggtaaaatgctgctgtcaaccttccgttttctattttagtactctatgcatggcacgctgatcatgtatgatgctcttcttgcagacataccgcaacaatcttaacaaggtatgatccttctagttcgaactatctaaaacaaactctgtcttcccctcatttttgtagcatataccactcgttttgttcaatatgcttgtatgtttatagatcgatataacaactaatattgttaccagatattggccacggcttatctaagagaaccatggaagatgggtgtgcacaaaagaaatggtgttgtatacctggacgtccataagctccccgaaagaccacaaagtgaggttgaacgccggaggtgattctctttctctgaatgcttcattaagttgatgtatatggtgatggtaatactgttagtgatgctcgttaaacgcatttatgttgggtgatagaaaaagttgatatctggtatggtaaatatattaatggccttagtttatactttatacgtgaattgtcctatagagattctactttcacaagaaagataaatggagattctcttttgaaaagtgttcctgtttatccaccatcagttatttatatcacaaggatatcttgtccaattttatttctttatgctgttttaattcactggcaaactgatgtaacaagacatgcgtaactgttagattccctgggaagtttgacacatgagattagctgtatcttcactcttgctctgtgcatgtatcatgttgccttaatgtttatagtcaattaatcatatgctcagtgttgttattatcgttacatgggaagaatctgaaccataatactttttttgtgtgccttgtctttatctctatatttactctcagatgttattggggatattcttttgaaaatcttgcaactgagaattccattgatgaggatggaagaggtattgatgcaaatgtagagttctgtgctgtaataaaaacgaaattgggtgcacatcgtattatcatgggtgctgagatggactgctgtgacgcaactgatgatggtaggcggttctacgtggagttgaaaacaagcagagaggttagcattactttttttttttgtgatttgctttagtttgggtaccacatttatttgaaatactcagtttttgagcctctggcgtgtaacagctggagtaccatacagtggaaaaatttgagaaagagaagttgcttcgattctgggtaaaattttagtcctgctgtatttcttattctccattcaattcaatatcatttgtaacttactgctctgtcctgcagtgtgaaagtttattttgtgttgtggttcattctcttagaactcttttttaatcaatgtctaacgctgctatttgcttttgttaagcactgataaaaaacactcaattgcattgtaaagcaataatgagggtagggatgcgtatctgttggcccatgggtaccctttggctcaatggtggagccagggaattcttagagcctgagtgaatctaactatgttagatatttgttaccaaaaatcaatttaattcctagagtaatataaaaagttagtgtacgtttgagttttgatgatgagagtgggctgccgcccggcgctggccgctgggtggtggctccgccactgctttgggccattcaacccagccattggttgcacttcaattgctagttcatattaggtacaaaatgtaaaccaaatgaattagtgtttagctgatgggtatccatggtcaagtggtcaaccaacttgcatctttaactgagagtagatgataaggtagcaatcttgttatgactctgtctaccatgagtccatgatccacttagctgccttttatttttttcagaaagtatgcatattttaacttctaacattaactttttttctttactaaatattgcagattcaatcatttattgctggtgttccatatgttgttgttggattcaggtagtattcattctttattgttttcccttacgccatccattttttgtagtcaatgtgatgagctttctatcacctgacagctggcatttttgcaatggaaaatgattttcgtgataaaatgtttgctgatacaatttacatgttaaagaagctgtgcaatgttagtattgggccttctgcttggctaggagattgacatgctggttatcacaaatcagtatgccactatggttgtcctctacaaggaacaagagtaatttcatttacacctggtgtcatcaactgtgtacgaagcaagctcatatttgtgatagtcagtcgtttctcatggatgtcctgttgcaataaataattgtgctgcctacccaacttttgtggggctaaaggctgctggtgctattacaataaatattttattatttggtactaaggtatatttttcccggtacgtgtatgctcattttcgagttaattttgtctaaataattacaacacgatttcatcttcgggataccaaatctttgtgtagtaaactagaggttcatggagacatggactatttctggtaatatactgatatgtctccatttattgattgtaataggcataataacttaaacacatacttgattttctagattcttcagttcaatttgtttgactgcatcacatgtacttgataaaatcgtatgcttatttttaatacaatgttctgatttggtgtggtattttgctcaatatttaacctaccccatatgatgcaaaagaaggcttttacttttttaacttcgactttgtcccaattttacattgattccagtggcttgtatttgtaacttgaactagtacccctcagcattttcctactaataaaggagtttcaaccatatattttttttacctgcaggaatgatgctggtgtacttatacggactgagagactaagaaccaaagaaataacacaaaaggtgaaagcgaagaactactggcaggtaatcaagctttcttcctagcaattttaaaggacacatgcctagatagacaactataatttagacctatcagcaggttaaatactggaaatgtgaatcatctgtaactctagactcccaaaggacgtgcttcctttgcaacaatttacctgctatgtaaaatatgtgagattagattgtctaaataagtagttctcaattaatttcctgccacttcaagcataaaagggataagaatacaatgtacttatcttgaaaataacaataatatctgatatccgtatgtacttcagggaggtgtttgcttggccttcgctgatgaggtcttatgctggttgtatggcactgttagagaaagtaagttcatttatcattctgaatatctaactagttgcattttctcaaatttttaaatcacggacttattggcactcataatcatatgatactctctgtacgcctgacattgcttttttccatctcttacagacgaggactacatcctgcaatttgtacatccattcaatcgcttggaacttctacgtgcccagtctccctgtcctgatgccatcactcatcatgtggagcagctctctggtacagcaggctaggttaattcgtacacacaacttcggcaagtaaaagggctgtttgaggtagatccgtgttgaaggattctattctaggggtgctgactcttaaacaaaacttcggcaattatataatggttgagctgacgacttacccagccaagcaacataggccgacgactaaatggtttgctctttgaactgccaaagagattttgaaattgtcaaaaccttgtgtttctccagtaacattaagttataaattagggaaatggagagctatgcggcaatgctactactgggtcatgccaccgaggcaccaatgatgtaactctctaccagataccagtaccaagggaaatgatatgaattctagagagtttctgaactaacatgtggtatatagctttattttgaaatgctataaattgagaatattaaatcgtcaagaagtgagaaacccatctgcaccccagcactccctagagcagagcatgacattttttgggttagggcctgtttgaggagtttatgtcagctgaagctttttccagaaatataagttctcacaaaccaaacagtctagcttctcatatagataaggccttctcatctagataaggtcgtgtttagttgcaaattttatcttcaaactttaaacttttccatcacatcaaaactttcctacacacacaaacttcaaacttttccgtcacatcattctaatttcaaccaaactttcaattttggtgtgaattaaacactttcaattttggtgtgaattaaacacagtcttatgagaagatatgagaagttaatagttaaaatgaacttataagctactacaagcaagctagttattttagcttctttacattttcagaagctgcctactagatgatgcaattgactttttattaaacgtttgaccattcattttatttaaaaaattatggaattataatttatttttttgtgagttgttttatcacttaaaatattttaagcatgatttatatattatataatttcctaaaaattttgaataaggcgaataatcaaacatgtgttcaaaagtcaacaacattatctattttatagagggggtacttatcagctgcgttctataatttatctattaatgggctgtttagttcccaaaacaaaaacttttcatccatcacatcgaatgtttggacacatgtatggagtattaaatgtggaaaaaaaaaccaattacacagtttgcgtgtaaattgcgagacgaatcttttaagcctaattgtgtcatgatttgataatgtggtgctatagtaaacatttgctaatgatggattaattaggtttaataaattcgtctcgtagtttcctagcggaatctgtaatttattttgtaatattactacgtttaatacttcaaatatatgtccatatatccgatgtgtcaactaaacctaaaaattttttctaactaaacaaggtctaaccagtcatttttcagaattttaagaattttaagctctcctaaaaaggttctaaaagccttgtattccagttgcgcgtctgtcgccttggcagggaggcaaatctaacgttcgcttcagttggattttccaagaagtattttgccctatttttgtgttaaggtgccacgaatgcgagatttccaaacgggaaacatcttgattcccacaagattgatagaaaagaaaagtcactgatctacgcatcttgattcccacaagatttaaaagaagaacaagtcgttgatctacagtatatatagtactgcaaatttcacaatttcacgggaaatatttcagatcccaaaaaaatggggaaactcagccatcgatatacgctcttattatgttgtaaacaggagcattgtgttcaaaccgctcgataattcaaccatgttttttttaaaaaaaatctactaataatttatttaaaatttaccagttttcatggatgacttaagggttattgcggttattgataaaaccatgaatatgttcatcgtaatctttaacttgttatagttttgattgaggggttgttagaagattaatggtttgcataggatatatggttgtttggttagtgtctaagtttaccacgattaaccttaggccaaacgtggtacggcgaaaaaataatacacccatgaaatagttggtcataagtgtgacaatgttttgccaaaacaaaataagtgaataacttgcgatgggggagaagctaggatttggagattagggggacaaccacaaggaatgttcgtgtggtttataatccattttaggccctctttgtttaggcttaggcttattgggttagacttttaagtcagcttgttggcttatatgatttataagccagtgaatttaatgtcctaagtttagtggtggagtcatacatctatctcatataagccaaaaaagcttctccaacctagcttttggcttaatagtgtaagagtggcttatggttttaaaaaagccaaatgaaaaagctgcttgtttgtttaggcttagactttttgacttataagcctaaacaaataggaccttaatgcgatgcactattcatactctgcattgatacctctaaagcagaggatctgaattcaatggtaatggcttctgatgatcgctatatattgaagggtatttaaacacacggttagtgcggtaatcttacggtatacctagctgatttcaacggtaatggcttctgatgatcgctataactgtgcggttttcacgataaccgccaaaccgtgggtgacgataaccacaccctagatcacatcagatttcttacagttataaattctactacctccattcccaaatataccagattttagttagatgtaatatattataatacaacgaatctggagagaagcatccaaccaaaatctcttatctgtgcgtttagttcacactaaaattagaagtttggttgaaattaaaacgatgtgacagaaaagttgaaagtttgtgtgtatgaaagttttgatgtgatgtaaaagttggaactttgaagaaaaagtttgtaactaaacacggacatatatatatatatatatatatatatatatatatatatatatatatagggacagtactaaattatatcgggaacccttgtcgcaaattgcagtgctagctgcactaggagtacaaatccctagtacagcgtagtactccagtcgccggctcgccgcacaccatcgcccatcagaccctgccgccgcggtctcttctcgaggcctcccgttccctcttcccggcgagctagcgcaccgcgcgggagagaaaggagagcaaaaaggatgggcggcggcgagtgcaggagcaacgactacggcgccgccgcctactgggacgcccgctactcctccccttccccctcctccaccgccaccaccggcggcggcggcggcgcgttcttcgactggtaccaggcgtacccggcgctgcggccgctgctccgcgcccgcctccccgcctcctcccgggtcctcatgctcgggtgcggcaactcccgtacgcctctactacctcttttacctgcgtgccttcactcacactagcttgaaactatctgcgtactcaaattcaacgatttcggcgctaattcgtcgcgcgcgccacatatttctgggaatgcactggagtagtagattaccctgttgcattgttatactaattatacggtcacacctatccgttgcatgatgcagtttgatcttattttggcagttttgtcggaggacatggtgaaggatgggtacgaggaggtagtaaacgtggacatttcatccgtagtcattgagcagatgagggagaaacacgttgatattccacagcttacatgtagtgttttcattgataatttcaaactcatagtttgtgaattatggtttctatgcaaggtctatttacttggtgtcttgtgttttaagatttccagatggatgttagggacatgagtttgtttggtgatggaacattcgattgtgtccttgataaaggtaccttaagaattttatttaccgaagcttgctaatgctcttgtggaatacttttttatggaatttactgaataaattcatttatggtatttgtttatttttcaccactacacttaccttgttatgacggaattatggaaatttctgaaggtacattggacgctatgatggtaagctttacttgttgcacaaacaacattttagctttctgatcaggcatgaaatgaaaaatcatctgaccattattgttgttgcatttgatcttactattttagtgtggcgatgatgctcctcttggtgcttccaaaatgctagcagaagtggcaaggtgtctggcatgaaagtttatccttttcactcttttcaaactagttggttcccaatgattcagtatgtttcatgttgaactatttttccccttgcaggattcttaggcctggtgggatctacatgttggtacatcctctaaatctaaacaatacagtgtgtaatcattttgcgtgggatgatcttatggagcgatgatgttcttttgcagataacatatggttgtcctaaggaacgagtgcaacttttgtaccaatctggaagccacaaaaaaattgaactgtacattatgcgtaagtatttttcttatgctatttcttgattcatggagctggacataatttgaaattccagaaggaaacactgaataatggggagattcaggtttgactgattccaaagggaaacattggttccaaagattggttgattctaatgggaaatcttaaaactttgatttgacgctatgcttttaatttctcagttggaccctgataaaatttactgttatcattttgcagccacacctggataccagttgaaatggagcaaaggtgtttcacttgcacaacctatcatggaggaagtttcattgacagtggatggtcaattaccacctgactatgttcttaaagatccagagtcacattttatttatatttgcaaaaagccagatgccgctaatgaagctaattctgtggttgctaatgaaggggaaaccataacttcaaaatgatcttttgtatccttaatttgcattttgttttgggttgctgacgagccttggatagtatgtgctcataataaattttgtcagatgttactgttggatgaaaatcacgaccctctttagccgcctggggccccaaaggttgccaatctgtgctcgatatttcttctcggaacttggaagatgtgacacaaaattcatatgtatttcaatatgctttggaaggggccagctgagttgtgttaagtttgtttaaaacgactgagttcctctttatatcgacacccataacatcagagtgattttgatgtgatcttgttattctgagatggatcatggaacactgcatgtctgtatgcagtgtatatggaatgatattatggctgtgtttagattggcccaaagtttgcaatttggttgaaattggagacgatgtgactgaaaagttgtgtgtgtatgaaaggtttgatgtgatggaaacttggaagtttggaaaaaaactttgaaactaaacataccctatgcaaactgaactccctgggcgattagacattcccgactaatgctcggttaatccccgataggaaggaatcagaagggattgagaatttgagatccttctcaatacctctcaattctccactagttacggaaaacgagagctcatcatggtatacatttgaaggggagcgagtgctttcaaaagtactttaaagagaatcgattttgaacttaaattttgttacaagatgaaaggagcatagtactagtatgtgagatcctggtttttctgaaggaggtccagtgcacgcatccggtatttccctttccaaaaggcccaatgctgtaccgtcgaactcgaacggtcgggaaaaaaaaaagaaacagaagaaggccgaaataaataaagaggatgaaaagaaaaataaaataaaggaaaaaaaaaagcgcacacaaggacctcccctgtgccaagcggccgcgcatcgcagccgagacgagccgccccccgcaccgcactctccgccgccggcgccgcgccgacctcctccgccgcgccgcctccccggcgcgcgcccccgtcaccctctctcgcctcgccgccgccgccgctgcctcctcgtgaggggggacggtggtgggggcctctgccctatggcgagcggcgacggcggcgacgacgcgggcgtgaagcgcgtggcggaccgctacctgaagcgcgaggtcctgggagagggaacctacggcgtcgtcttcaaggccgtcgacaccaaggtccatctcatcccatcccatcaccccccccccccccccacttctcccgctcctaaaaccctcaccggtgcacatcgtcgcgcgcgccggggggcgcgctgatctgccgccgcctcgagaaatttagtcgccggccggctagttcgggccctccggctcgatccgaccgcccggtggagaggcgggtggtcgggtgatttgagcttcaagggttttgttcccggattgtgaaattgcgtcagtgaacggatggctagagctgttctttctgcaggggcagtctaggttggccacccatgagccgtggttgagcccatgaatgcaattcacctggttttgttcactgccgtgtggattgaactggaggtgttgacactgtgagggtgtttgagctgtggttattgttttgccatctcttcttaagcaaatcgcagtttatccactctgatgggaggggatctgtgggatagcagggtttgttgtgtcgtggactcatgtatctttgtattatgataggctatatggtgccagcctttcactctacagattttgggtgtgctcctagtgcttttaagttttaagtttattacatcagctgtttggaatgtattgtcgtggaattttgcttcttgcttttgttaacttttattgatatcatgaatgttcttcactttgtttgagttaatgttagggttattgaacttttacatgttccttgttttcagactgggaatacagtcgcaataaagaaaatccggctagggaagtacaaggaaggtgtcaatttcactgcattgagggaaattaaacttcttaaggagctgaaagattctaatattatagagctgattgatgctttcccttacaagggaaacttacatcttgtatttgagttcatggagactgatttggaagctgtcatacgagataggaacattgtattatctccagctgatacaaaatcttatattcagatgatgttaaaaggtttagccttctgccataagaaatgggtgctacacaggtatccactaataatcttgctaaatttcttttagagagagtatcctttgacaatctgtgctgtagggatatgaaaccaaataatttactcattggcgctgatgggcagcttaagcttgctgactttggtctggcgcgcatatttgggagtccagagcggaacttcactcatcaggttcttttttgtggaattatatttattagaatttaattctctgtataatctagtcgattgtatacttggaacttgagaatcttgttgctgaaacaaatatgcaatgaacatttcttcaagtgtattgatgtttcttttgtatttttttaactcggtcgatattgctgtttgatgcttcgttgttctgtttatcaaaaagaacatccttgtggatattttgcgcccttatgctttacccttttttcaacaacagtaggcacctaggaagtagaaaagcttaaatctttatggatggaacaaaatgcatgtggggaagttcttatgttatttcctggacatttgagttggcagagttggattttgaataaatgtcacaggatactgatttcggaagtatgtgtccttgaataaccattttcttggtaaatattaatagtgttggaatgactgtttcattctgaattatttgtgctgattttcattcaccatcatatctggaggttctcttaaaccatctttttatcagttatgttgacgatagtcaaggatcaatgctacacttattacagcaatgctgtgtgctttgcttaaatgagtgttttttattttttattagtttcactttgaatcatattatcctgatgctgctgggcacttcagttttgaattttttttctcaacatataggtctttgcacgatggtaccgagcaccagaattattatttggcaccaagcagtatggatctgcagttgatatttgggctgctggttgtatttttgctgaactgctgcttaggcgaccgtttctccaggtttaaccgactcttataattttatgctctgtgtaatttcaatctatttataactaagcactttttatgctctgagaatgttgcatggctaagtttgctgttcctatatgttgtgataactgcatgcgtaaatgtgttacctcaaaatgttgtttccaaagccagattggacttgtagttttcaactgaggaaactggaaatggtcaggctctggtgaggtgattgaactgaacctgtaaatgatttaaactttgggtttaaatttgacaaagtgtttcaatggtaacagtaaaaaaattcctctgtggatttgaacctttgtctgtagattctggaatagaagaagctagttcctctgtgcatgtagttgatattagatttatttaatgagcacgttataatagtctagcactggtaggttcacgcaaattaagcctcgctctagttttagacttcaatataacaaaattatgtatgttatgtggggctgcatgtgcagccgcctgtgcatgacagttgccatgctcttcacaaccaacacaccaactatgttggctcctccacaagtttagtagctagatcatttccactgctagtttgtttgtttccgtaggattaaattatttaagggcttgcctgagaatatgatgcaagctgaaagttgtcccacgatctctctcctaacgccatggtgttgggcgacaaggtgtcacgcccttgtcctcttgccatccatcagcacaggtattatctgactgactcccaagaatcccctgaaccatgtgacaatgtacaccttcacaataatgttatttagagaaccagttagatcagtgaacagacgagtcatagtattggctgggtcgatgcctgcaaacgaccagttttcatgcttgaggtcattgtttactatatgtgaaatctgccattagttgtttacgagtagttttgggtaaggaagctacccctagaaatctgtgcatggggagaaaagggttggactttctagattcactagggtattgtttgtttctttccttttctatgttttttggaaggtagattttgtggcatgtgctcttaggccttactttcaagtgatagatctgattattctcttcaaaactattttaggtagaaaaatgttattcctttctccagtcttatgggatataggcacttgttactaagttcacgggtttgtgcttgattttaagcttattgcctgagatttggttaccctggctacttgttctggccatacatattttggccaaagaagggttttcaggttatcacaactataatgttctgattactggtggggttcttttagcattgaaaattaaaactgcaattccttgttattgttttacttgaattttttgaacatggtgtttttttttttggattagacgcacggagaaaacattaatgcacatgggaggctagataacatgaataaaatatggacttgtggtcttgtgctaaatgtgcataattctttttcactcaactgaaagccttcttaggccagttgtagaggtttaatttgttgcttctggtcttgctgcaggtcctcttgagtttcctgattttttatcttgtgtattctccagaaatgtggaatcatggagttgaatattcttgtgttgatttattttttattggttttttttattataaatttgttttctttatctatacttacaagtcaagttcttagatgcagtagaggtgttaattccattttaaggaattttagatgctcatctaaatttttcatcatgtatgaaaggcttttcatgtcactatccgtggttttctttgtgagaggcagcaattggttgaaaatattttgatctatatctaactatggttctctatttgattttcaatagacaagttgtttgctttctaggatcagatctgtctgcagctctaagtaaatgctctactgtcacaacttcttcatttcttacaaatcaagtgatttgtaaactttgggtttataacctcttaagagagcattgctgcatatgtattttgtaagcgttgtttcatcagtatgcctgatctttttgcatgtgtgctgataagagaaggttggaaaatgtgatatgatatttaacagtgggcagcaattttttcatttggtagctataccttaaaagctttaatgggcacccaagtcactaaatgttaatgttgcagggttctagtgacattgatcaacttgggaagatctttgctgcatttggaactccaaagtcttctcaatggccggacatggtttatcttccagattatgttgaataccaatttgtctctgcacctccacttcgctcattgtttccaatggccagtgatgatgcattggatcttctatcaagaatgtttacatatgatccaaaagcaagaattacagctcagcaggctctagaacaccggtatgcctttgttactgatcaatagaacatctgctatctatctctgttattagtacatgccatataaaaccatgtttatctttcctattaaggtactttttatcagtaccagcgccaacaaaaccatcacagcttccaaggccaccacctaagggtgattcagggaataacaagataccagacttgaacctgcaggacggccctgttgttctgtccccgccaagaaagttgcgcagggtgactgcccatgaagggatggaagtccatatgcatcgggcggatagaacagaagagcatccttcaggggcaaggcacatggatgacatgtccagccagagtttagaataccaatgtcagttgatgttggagctattttgggacacgacctgctcctagaccaacgttaaacaggtaaacgacacaaaccttgacgaatggaaatttggaactcatgtccttgtctaaatgaccaatgaacctaataatggaataaatgatgcatttaggattgggtgtgctcagctcgcccattctgtggaataattgaacatatttatttccattttgcagtgccgacaagtctcgtttaaaacggaaacttgatatggatccagaatttggatacacagagtaaatcaccattttttccatactggcttgttgatttttaaaatattctttggggagatagttccactatctaccaacaaaagaggattgtgtcgaaagccataaaaacttcactgaagggcgctgacaggatggcacagccaactatgctgttatcgtttttgactaccaaagccggctcaggaagaggaaactgaagagttacgtgttacgatgctaatttacaccaggacgtgcacatgccatttcattttggctggcatacataaatctgtaatctttattgcatagatgagtttgcttgtgtgagcatgtttcttccagtgttcgcaaagattattatgaagtttatgtctcaagttctttctggtgtcaattttcgttcacttcttgtatggacattgaattttgattgttgtttagtcggtcatcttattcttaggtacagtaattcttgtaaccaggagcggcttatattacctgagtattctgacacgtcttcctgcaatacgctgtaacaatgcatgagtgaaaaaaaaaagagaaaaataagagcaacttcttttgttcttacgatgaattattatgtgattacgatatctacggctttctaatgtgaacattttattatcctttctttagatgtcttctatactgaaatttctgtgatttatatttgtggaatgggtaaatggaatgaaaatgtttctttcggacttctggcttcaggtttgcaaattagcgcaacttctgtgaaggctcagcatttctgccgtgtagtgaaccgggtgtacaagaattgtttcattctcttttttttttcttcgaaaaacagtaaagatgctcatatacacgtgtggtagcttcaatttgcaattgattaaaaacattacatgttgggtgttcaacgcgaggatcaaaattcaaaattcattgaaccttatagagttgtttttaaatctgaaatatattagcgttaatcggcttgttacctcccaacatcaaccatgtttagacaagcattaatgttactcgggcgtcggaagtgatggcacaaacaaaatagaaatgacggtccataggacatgggtttcgaggcatctcatatgaaaagtccatacgctagaggacaagttgccatgtgaaatggacacttttgctaactttataactgctgtaataaataatgtgtgcagtatatgcatgtgaacttgtgatagtaaatggacctgactaaatggcgtgacatgtggcttgtacttgaatccatattactttatttatctattatatagaatgtggcatgtactcgaatccatataatatcgtacaatattggttatttatggtattccatgcgtatactatgttaaattactgtaataaaaatattttctaattttac

SEQ ID NO: 20693 - DNA, 8036 bp, Oryza sativa
ttcattttacacaaaccaataaaaaaaagactataatacccttcgcttttatcaaatctcaatgcaactatatcttactttatctactatcattttttttcttctttatctactatcattttttttgcttttacaaactcggatacaatgattactcaacaataaacttattttggaataaatgggaggagctaaaagtaacttatttcagagacctgggaagtaagattttatgtccagttcactctaaggcgtaaccgtaagagttgtcttaatcctccatatataatcatctactcccttggttgaaagaaaataagtgaattctttacatctcgaggaaattttagtggtgaggagaaaagaccaaagtaaccattatatatggaaaagtataatcggtaggtggtgggtaggtaatattaagggataaaatttcttaacttttggactatagtatgtatgaaggtgaaaattaatttatttttagacaaaatttaaactgtagaaaccaaattatttttgacgggaggcagtattataatttttatgagttaacaataaatttattgaggagatagaggttaattttaagtctcatgaagaaaaaacaactctaggtaaaaaaaaaagaggagagagggacatgatgatgatgattgaagaaaattttattttagatccacaagtactcctaggaaatagaaacaaagcattgataaagtactacccttctcatttcatattattattagttgcttttcctttttctcagtgaaacttctttagatcttaatcaagtttatagaaaaaaaaatagcgacatttacaatatcaaaatagtttcattaaatattacattgaatatattattgataatgtgtttgttttatggtgaaattgctatttcttttatatacctagtcaaattttaaatggtttgattaaaaaaaaatcaaagtaccttataatatgaaaaggggttcccctagtgcacatgtaattttatccatacttaaaacatattgttttaaacatatttttttcaatcaaattagatactcaaacttaaactgtatcattttatatattaagattgaatgtgctcatctttacccaaagtaacctcgtactcttataatatttctgggttttataactatactactggcatcggtgtgcattaggtaggtgtcatcaagatgagatgagatggacaatatgacttaattgacatgaagagaatttatgttcaaatcataattgacatgaggagaagtaatacaaaatgtaaatattactatgagatatttgggtaagaatcgaacaacaaacctcatccatatgatcagataactgcatgtatacaacagtcagtattaggtgcattaacactattactccctcaattccaacagtcactatgtttattattattataacacatctctctcgactaaattattgttattattttaaatctttcatgctcaagatctctgattctattgggtatatgcattatattttttgattgatccacataagaagaaagtgataataattgtttcgaaagtgataataattgtttcgatctttatggattaagggtgtaccttataatttgtaacagatggagtatgatatgatagttagttctctccccgtccttatatttttttatatggtctttagtggcatacagggtggatctagcatgagggcgacggggtctcgagcctccactactgacgtgagaactatagaagcccccacgaatcctccactaaaattttttactataaatagatggggagagggctatagcttcgtttagtttattcagtccctcatgttatttctttatccatcacgtgtggtctactttgaccattaatatatttcatattatgtgcccaatggatatgtaattagcataactcgaaagtacttcaaaatataaaacgagtgttataacgtgcataatatttagtataatttggttagtatgattattagtcaaaaggtaccaagtttaattttccttaaaacgataatttgggacggagggagtatcattatactctttatattatataaatataaataaataacatcactattgctttctaaataagctacgatgagagcataaaaacgctttcgacagtatcaattcctaccaaaaatgaaccgcaaaaaaattccataaaaaagagagccattccttatcggaatcagaacccccactacaggattcgcgctccgcacgggcgggcagcagcaggcaggctcgctcgagaccgatcgacacgataacgacacacggccacagtgcaccaccgcccggccgcacccgatccctcccctcctcggactccgcccccggccccggccccggccgccgtctctcgggctttactctctcccgtgccgtccacccagggccccaccccgccccctgaccccacccaccacccgggcccactcgtcattgcccccaccacttcgtcataaaccctccactgctataactgcgactgcgacgcactcgtcatattctcatatactagtagtatcaactacccaccccccacctcctacgcctccgccgttgcagctaaacccctctccctactcctcatccttcccatccgcatggatcgcgccgcgcgcctcgcccgccgcggcggcggcgtgaccgtggctgaataccgcatggtgcggggccgccgccgcggaggcgacgcggggccggtggtggtcatcgatgtcgaagacgacggggaggacgctgctgatgactccgccggcggtgggggtggagcggcggcggcggtgaagaggagggtggtggttccgggggccgtggcgacgcggacgcgatcgcggaggatggcgatggcgcagcaggcgcccgtcacgccgccggctgcggcggaggaggcgccgagcaggaggaggaagaggaagggggcggcgagtgcggaggcgggtggcggagggccgtcgaagcgccgcgtgcgatcctcggggtcagcgggcgggcgtggtgcgcgcaagcgcaaggaggcggaggcggatgaggaggaagcggaagcagaggctgaggaggaagcggaagcagaggcggggactcccgctcgcggagaatcgatggaggtgtcacaggttgacgggggtggcagcagcgggcgagccgatgacgcttcgcacaatggtaatggcgagtctcgcgtgtgtaacgcggatggcattgatcaggcaagcgaggagcgtccaagtgtcgctggtggggatctaattgaggaggagcactacgggaatggggaagccagcgtcgctggtggggatcgaattgaggagcactgcggtaatgtggaagccagtgtcgccaattcgaatcgtgatggcggtgagatcatcgctggggagggcacagaggatcgtgggaaccggagttatcagtggtggatccagtgaatgaagagttggcttccgatgaggatgattacgacgatgaaatgttggaggaaaagcttgtcggagatgtcattcgtgcttacagcaatggcgctgatttggatacaaatggagtggactgggaagccgaggatgagatggaatttgctgatttggatacaaatgtagtggactgggaagctgaggatgagatggaatttgatgatgataatgataatgatgctgatgacgacggtgataattttgggggtgatgcggatgaaggtgacaaatctgtacaaatgcatgacttttctaaggtggaaacacaagatttggtgagccacaatgttaatgttagtgaagtgaggcctcatgaggatgaggaggctatcaaggatgagatggagtcaaagggaaaaggatctctcagttttaatgaagggagctcctatattgaaattcttgactctgacgaggaagtcaaagtggtcaatgacacagggaatgccttgagaaggaagccattagtaccagcgaagctaccgattgtgccatcttgtgttgcatggagaactcggtcatcatggggtatgaaggaggagaggatttcttacaatacatatttcgaggtattgtctgatgagccaaaagaggatgatgatgacactgaagtggaattggatgatgaggaggacgatgaaaacgatgacgattgcaatagtgctagctgtgatgaagaagatgaagaggaagaagaggaaagagaggaggaagaggaagaagctcaaaggagaaagcaaaagaaagggattgactcatctgatgatgagatgattgatgatgctgtagattgtggcattgattgggaggaggattacccagaggttgattttactcggccacttacctttcagaaagatggcagtgaggcccctgtgggcagcgaggcttttacggagcaacagaagagatcgcgatttacatgggagcttgagaggaggaaaaaactgaagcttggcatgatgacgaatcatcgtttgtatgaacgagacctggaatcagattccaactcatcagattctagtcagaatcgaaaaaatggatgtcaagggagtggtgatcacagaactgggaggaaaaggaagaatccattatcaaaatctggtaagaaatccagccgcatgttaaagaggcagtctcttatgaagcttctgatggacaagatgtgtagcaatgatgatgggaagtctactccttttgaccagaagccccagattgagtatagtttcaaggatttgcatccgttggttttttcatttggggacgatgatcctagtccaactgataggtcagagcaagatgctgcacttgatatgctatgggctgatttagacttcactttagagtcagagaacattgggacttattatgatgatgaggtacttttgctgcatgaatttatctgacattgctgacgtcctattattttccttaatggggttgatttgattatggaacatggcaaccctatctatattacatgattgttgcacttatctttgcagagaaaataagctgggtatagacataggttcttgttaatcattcatcaccattgctgcccaatttgttacattctattttaccactatttgtggtaccaatatttgggaacagcagtcttaacttggcgcagccaattctaagtagtgtatgtatgcgtattttgtgccactaccatattgcactctttaacaatgaacatatatttatttgtttggagaataaatattcctttatgttatctctgtataacagcagaacaccttttgatggttgacaacaggagattctggtcaattttaactatattatattatgtaattctccaaaattttccagtgtgacaaatttgatgctttcatttttttggtgtcatctagtcaaggctaccatgttgaaatgattagcttctgttgttttgtagggccaagaggacagtctgctagatcatgcacttgctcctattacaccttgttctagagggaagcatgaatttattattgatgagcaaataggaatcagatgcaaatactgctccttggtaaatctggaaatcagatttattttaccattgctggtgagtttagtatctctcaaaacttctggcttgcttcccacaacataagttgatcaattccattatttatcttgttcttccattccaggcctccaattttgcagagaaacctgcatggcgaaacagctcttgtttgaagactgcgttgatgtgtcctgatctttatgaacaaacagggactggtgatggacaatctcaagatttccatataaatggaactgtgtgggatctcattcctggcgtcattactgatatgtatcagcatcaacgtgaggcatttgagtttatgtggacaaatctagtgggtgatattaggcttaatgaaataaagcatggggctaagcctgatgttgttggaggatgtgtgatctgtcatgccccagggacaggaaagactcgtttggctattgtgtttatccagacatacatgaaggtgttcccagactgccgaccggtgattattgcacctcgtgggatgctgtttgcttgggaacaagagttcaagaaatggaatgtcaacgttccttttcatataatgaacactactgattactctgggaaggaagacagagatatatgtagattaataaagaaagagcatcggactgaaaagttgactaggcttgtaaaactgttttcatggaacaggggtcatggtgttcttggaattagttatggtctatatatgaaactaacatctgaaaaggttggctgcactggagaaaacaaagtgagaactattcttcttgagaaccctggtttgcttgttctcgatgaagggcacacacctaggaatgagcgcagtgttatttggaagacactaggaaaagttaaaaccgagaagcgtataattctatctggaactcctttccaaaataattttcttgagctttacaatattctctgtttggtgaggcctaggtttggtgaaatgtttttgactaaaacaagagtgggtcgaaggcactgtgtctcaaagaagcaacgggataaattttctgataaatatgagaaaggagtttgggcttccttaactagtaatgtaactgatgataatgcagaaaaggtaagatcaatactgaaaccatttgttcatatccataatgggactattcttcgaactcttccggggctcagagagtgtgtgatagttctgaaacctctaccgcttcaaaagagtatcattagaaaggtagaaaatgttggatctggtaacaattttgaacatgagtatgttatttctttagcctccacacatccttcacttgtaaacgcaattaacatgacggaagaagaagcttcccttattgataaacctatgcttgaaagattaaggtctaatccttatgaaggagtaaaaacaaggtttgtaatggaagttgttcgtttgtgtgaagcattgaaagaaaaggtattgatttttagtcaatttattcagccattagaattgataaaggaacatcttcgtaagattttcaaatggagagaaggaaaagagattctccaaatggatgggaagatcctcccgagatatcgtcaaaattcaattgaggttttcaataatccggatagtgacgcgagggtgttacttgcatctacaagagcttgttgtgaagggattagcctaacaggggcttctagagttgttcttctagatgttgtctggaatccagctgttggaaggcaagctatcagcagagcatttaggataggacagaagaaatttgtatatacatacaatttaataacttatggaacaggtgaaggtgacaaatatgataggcaagcagaaaaggaccacttgtccaagttggtcttctctacagaagacgagttcagtaatgttaggaacatgctttcaaaagctgaaatggagcactgttctaagttgatatccgaggataaggttctggaggaaatgacttcccatgaccagctgaaaggcatgtttttaaagattcattatccaccaactgagtcaaacattgtttttacttacaaccagattgctcctgagttaagttaataatgactggcatcagatggattcattctttaaggtggtgctctcgaacttttgacttcttattgttgtggctagttctagaatgatcagatattgatggaatgcgatgtgcatgtgtaatgcagctgactagctagcgtgaggacagtgagactgaatacagcataaattttcagctgtttttgttgcagatgatgattcattaattataaggtgaacccttgtgtaatcgcactggaagaacatactattgctatggcatccgtggtccagagttaaatagttctagttgactgtaagtttgttccactgacttcatcatgttataaagttgacttgcatacaattagtagtcaggtggctgctgatttccattattttcttttaatggacagctatgtgttt

SEQ ID NO: 20694 - DNA, 9674 bp, Oryza sativa
gctcggcggcggaggtcctcgagcggtggcccgtggtcgtccctgcttcgagcggcggagggcgacgatggcgcctcggatccagaccgacgccggcgcccccgcccaggatccagactaacgatggcggcgagcggcgtagcccctccctcctccttctcccgcggcgtgtggcgaggacagagtggcgcaggtaagtggagtcggcggcgagcggtggagcccctccctcctccctctctctctctcgcggccggtggggttgctgctgctactgcaaggccgcgccgcgccgtttctccctcctcccatccgcgacgatgccgagcgggttgctgctgcatggccacgacgcgccgtttctcctctgcacggcgcgtcctcgtcctcgcatctctcatcagtgggccccgcactcgactttttgagcaaggttctcgttccttcgctgggaaccgaagaagctagtggagctatgggccccaccaacttttttcaccacgtaggacaaagtaacgcttcacatagacaaagtaacgcccccactgtgaagggcctaatagatgtcacatcactgccttatcaatggattttactcccaatactctctgggtgtgtttagttcgtgccaaaattgaaagtttgattgaaattggaacgatttgacgaaaaagttgaaagtttatgtgtgtaggaaagttttgatgtgatggaaaagttggaagtttaaataaaaaaattaggaactaaaccagtccctagtctctataaagtactacctcctaaaatataataatctagaatcgaataaaatatatctagcgctaagaatccgaacaaatcatctctctagattcgaagtactactaccttcgtcctaaaatatagcaactttttgctatgaatctgaacacacaattgttgagattcatagctaaaaatgtttacatttgagatggagggagtaacatatatcaaatcttatcatagattcttactacctccgccccaaaataagcgcagatttgatatatgtgtctaatgtttgaccatccgtcttattaaaaaaaattaaaaaattagtcacatgaagtactaatcataaaaaaatttcaaataagacaaacggtcaaatgttggacatgaacagtgtaaaactgtacttatttttgggacggagggagtataatatagtaatctaatatcagattagatatatttaaaagtataaatctgaacagatcttttgttcagattagtatcactaaaatatatcaaatctgaccatagagtcttatattttgggatgaatatagtacctctttcatatatagagggtgccaacattcgattaaaaatctatccggtatcgatctcacctactccatccttgaaccagctcacacctttgttctgtcgttgttttaccgacactcacaatgcaaagtttatattcgagaaggtaatcgcttggagtacttctaacagcctctctaaatttgactagaacagcctctctaaatttgactatttaaatatctatttagctagtttgttaaaaatattaaagagtgaaatttgactttcactctaatattcttattattacactttccaatatgatagtgggttacacatatcaatctttatattcttcgtcttccttccttcctctagatattttccccctcaccattttttctctccacccatttctttccatgccgcttggtggtaggtggtggacaaggctagcacaagatgcacaggaggtgacggcatggacgaggcgagcatagaggctgtgcgggagggcagggaaagggagggaagggcagagacacctccgtcagggaagccatatccacacaggggggctagcagggtgatgagctctccgaccgctgatgccaccgcctatgccttcttcgctagattcggtatcgagctcaccttccctccctacctcatgcagatcgacatagaggacgagcttgacagtgctggagaggggacgatgaagggagaatttgttggcggtgacacatgaggatgatggaagaggtgtggatcttgacgattgtgacatgacagtagaggggtttgactctgtgacatgcaagctttgatggcggcctcaccattataattgtcgagctgctcctcgtcgttgccattgtacaccaccgcttaaggtcgtatcctatgggatctacaggcaatggcccctccattcggttccagcgggtggcagcggcggaagggaggcaaggagggttgatcgtgtaagcccacggatggccaacgattttggctggccaaattttagtagtgcggagaggataatttggccagccatttgagaagactattggagggccattttttctcaaacttaccaaattttgacttgagaagccatctaacaaggttattaaagatgctcttagaccttcctctaactcaacccgggtttgacaatgtcattgtaactaggacaaaagacattaaaagtgatttactttcatataaatgctacacactctgtataaaataatataacaatgtaatactgaattagacacatcctagtactaacatgtactcctatctaattcagtgctatgtgcttgtagatagattgatcagtccggttctttgtcctcggatcgtgttatgcccttggacaacatctatgatcaaatatagtggggtttcagaggtgttaccgttgacgccggtggggttattcgttgagccccgcggttttctccagatcaagtggcagcgacaagccccatgggccatggcggcttgatctctagatccatagtgacatcctagttcttgactttgggctttcttcgatggtggtggccgtacactagtctgtcaatgctcaagcagacgacaaggggaccttgggcctgcaaccctccccgtaacaccaactgttattaaatttatttctctttaagaatggtttggtaaatcagttttgtttgttgttaataactgatactatcattttactcctaactcgattgttagaaaaaacatactaaagatcatatagtaattctcgtagtaaaacgtgggaagcacacttaggagaaatcgagctgtgtttggttggagggagtggaaacgtgtttgtgggtcgtgtgtccttgatgtacccgcaacaatgagcgctcacacattttcatgctctcctccgtacaatataaataaaatacaagcatggttgatgacgaaagattttctatgaaaacgttcacatcgtgctagattttgaatgtgcttgtttggctttatcatttgaaacatattatttattcgattattgtcatgaattatctacttactattaaagagagcaatctaacatcttaaaaacggtttagcttaaattatggcgacacatgttacactatgaattttttagcaacttgatcctctctgcaattcgtgtaggagcagcgttaaactggctagctaactaaagctactcaaaaagactcaattcttgggttccagtgtccaacgtttgactgtccgtcttatatgaaatttttttatgattagtatttttcattattgttagataataaaacatgaataatactttatgcatgacttatctttttaaatttttttataattttttaaataagatagacggtcaattgttagacacggaaacccacaaattgagtttttttttgggacggggggagtagctaggtaggcagttatttatatatttatataattttacacggtagttacaacacacttacacatcagttacgtatgtaaactcgacttacacatcacttacatatgtaattagtatgtaattttgggatttacatatgtaattttaggacttacatatgtaattttgggagttacattgtaaatataataaaattacatatgtaattttgggacttacaatggaaatatatgccaactattttttggtgaaaaatatagcgccataaatatagctactccctcttaaaaaaataagcttaggaaatagcttaaaataagtggtttaaacaatagtataatagaagaaagttttcttaaaaaaagttttttaaaagcacagaacaaataatatgtggcaataatctttaaataagctgaaaagaacgggtaacacaaactttagatgtgcaacaaattttttcaagtatctgtctggtttactgcaactacggtggttagccatacgttttagtcatgtgacattatggattagagattttctttttttactttgtttaaggtgtgcctactttttctatcaataaccaaaataaatatagtctttatcatgtctttttcattctttatcacattctccttcctactagtagtatcttccaatggttattgctaacttctaattctctcatgaagccatcatagagccccaaagacaagctagctgccttgaaaaaaaattgacttgcacatcatgtttaatatttcgtcttgaaaatttcttaggttagcacggaagcaactgcaactaggggcttgtttagttgtggaaaatttttagatttggttgtcacatcggatatacggacatacatttgaagtattaaacgtagtctaataacaaaataaattacagattccgccagaaaactgcgaaacgaatttattaagcctaattaatccgtcattagcaaatatttactgtagcaccacattgtcaaattatggcgcaattaggcttaaaagattcatctcgcaatttacccgcaatctatgtaattggtttttttcctacatttaatactccattcatatgtccaaatatttaatgtgatagagtgaaaattttcgttttaggaactaaacagggcctagttgcatggatgttgttatgttgcatagatggtacggagttagcagtaatcttcagcaaaaatgtttcggagaaaaagccagaggccagttcgaatttgcagttcggctcggaaacatgatggattattagcacataattaattttgtattaactattataaattatatatatatatatatatatatatatttaaaataactctacatagaaagttgttatacaaaacgcactgcttaccggttccagaaatgtgctaacctaaaacgagtttaagaaagaaattgctgttttgaattattggaaagaggtagacacgtatccttgcaattattgttgatggatcttatttcatagtaggtttgttattgatggatcttatttcatgataggtttgtttattttgatggtttattattgatggatcttattacataatactccatctattcctaaatataacggattttggtgggatgtgacacatcttaatataatgaatctggacatgcttcagtctagattcgttgtattaggatatgtcacctcccaccaaaattctttatatttagggacggagatagtaggtttgtttattttgatacggatgaagtaatacacaccttgcctagtatcccatttcgctcaagattcctttattttcatgacaacaacagtgtgcccacgttttggtatggactgcaaacaaataaaaatggatttttttttacacatagaatatacaaagaacaaatattctcaattgtaaaaattgaacagaaagattacatggaatcaatcaattgctacttattcccacgtgcatcatttcttttcttttacaaaaaatccttcaattaccactcatgtccaacaagtgtttgccacaaataccaccactcctgcaactgcaagaagtgtaaacaccatctttcattttttttttggtgcacatacaatgccttcggctgctgagttctggcagaactctagtactctacactagacatctgacattacaagataaatttattgcaactgattcatttccagcaaagaaagaaggaatatgaacagaactgatatgtttacacgctacatactatacgtagtcactacaactaattcgatctgtggaacacctatttcatttcaatagctgtagacattcaggggtaaaagaagaaacaaacgaatttattcagaaacattccctgacgctattaaaaagaccccacatgtatgacgtgatgttttgcttttctgtatctgttccttattcctgagacttattctttggtacaggatctcaaaataccgcaataccacatggattacattttctttacgaagggataatgataaaagttatgcactcttgattctcttctgagaaacaaagagatatcgccgcagggcaagcagtgaaatccaagtaaatcttgaaatcttctcctttatcatcagcagcaatgcagaactcaggacagtcttgagtatctgagcatgtaatcctttgaagaagcctgggatgccttccttgctccacatggcatgcaaagcgcccaacattgttttgggagattttgattttcctggcctttcagattcatcgtcatcatcctcatcagggtctgcagcctgaatcatgaccttgcacctgtttgataatgatgtcatataatttatatggtgataataatttatatgtagcattggcaagcaaaatcaggtggaaaggtccagatgtacatcttctgagaaaaaagaaggttcacctgattagtgggtaggttaatattgtagcaacactttttgagatggcaccaaggagaaatgctgagaaagcagaaagagcaactggtgaagaaccaccccctgcttctgcatttttacgtctctgtctctgaattagcttctgcttgagctgatcaaatacagtatactgcaacagacaggtaatggcaaccataaaataattgtcaattggtgcgtgcaaagaataaaagtgaagctaataagtccgaaatccagttctaggtgtttcttagagcttatttgttacaaattccacacagacatcagccatgtcattgaagtgatcttatattagaaatgttttttttataacacgttatcttgtctgcaatttttaggcagataatatatacatgatacttgaactaaatgaagtttcttcaattacagaactagaataacatttacaactgaatcagataggaagaaagtttagtgcaggcccacacatcatttttgtagtagtagttagctatactcaattctactagtaaacaaacttgaagcagctcacacatgaagttctgcagttcctccattgttgagctcaggatattcttaattattaagtcaaaaggcacgagagttgcatttcatttatatgcaaatacagtatagttcacaaccagtcaacagtacaatagttttgccccttcctgtgtttttcaaacaaatgaatttgtgactttcactaaagcttgcagataaatgactgtataactgccatttttaaaagcatctcagtacatatgtttctatacatacaaaaaaaagagagaatttgaacaatgcagaacctttgtacctgaatagaaggattacacgttagtataagagaaattcccaagccatcaaatgcctcaagccaagtgccttcggcaagagttgcccgcagccctttggactttccaaaggcacttgtttgcattctagaagatgctgtatctagtggctgaaaacacaggagagatgaacacataaaggtcagcaggtaaaaacgattttcagtgaatggtagctaattacttatggcgttagttacctgagtaacaacaactgtgcaagcaccagcagcagctgcaactaacaagttcgcttttgtgccgatagactttgctccactcttctccaagtagagtcttttaaagtagctatagccataaaagtaaacgaattgtgaaatgaaagattggatgttctttgtcttaaggccctgatatagggatagaatttgtcttttctgaacagcttcccaaaagacatctgaaagattcctggaaaaaataaacacgtgaggtcacttattgtatgaaacagagtaactcagaacttcagaagagatggaacaccatgaaggcctggatgccaggacatacatcaaacgctggcaaaaatgcatgacacccaaatcaatttaacttttttaagagtataaaggtgcaatcaagtgaggtaccaatatgtgaaaatgtcaaggtcaatgcacatcccaaatgctacaaagagttagctggcaaaacctaatgaataaggaattaactggaccatatcatccaggtggatgttatggaagagaaaaataacatgtacatgccaaagtccctctacaatcttatatcttgtggtggagcgatcggtaaacaaaatatggaaaggcaaaatacctctcaagattaagatctttgcatgaaaattatttcttagtgagcttcctactgatgtggagggtagtgaccttgaataaaaatatatagcttttgtggtatacttgaggttcaagatcatttgaatttttcagcgctctatgacctgctctgtatgcctaactaacctgcatgaactaaatgctggctgctgttgtcttttggtaatttctctttgaatctggtggtgtctcctaatatgtactatatgttgcttttagtgccagagatgctcccaactctattctctttcatattatctcctgaaaaactctggctttcaatacaagcaggtattggacccctttggttcaggaaaaaattacaaggtatttccacccactgattatttttttctttttcatgactagtccattgattggccacagaaaaaaaatctctatatgcataacccttctctctcttttttttttctctttgtggggtgcataatccttcctatttggttaaaccattctataaccaacacctattggtgggcaactgggagctgaaccaaacaatctccaaccaatcaacatagtgccaacatactatacgattccagattaagtgaactccttgtgaagtgtgagcctaattcagagatataatgcaaacactaggtctaaagttcctttccccccttctaacaacaaagctggcgaaaggagacatggctggggtttttctgcatcctttggccaccaaataagaaatcaacgacagttctatcccagggaaattatcaactggcctatgcgaagatcacgacatccgccgctaacgccaggttatccacgtcaatcggaccagtgcatcacgatcagcccaaacactgaatcagtagcagccagatcccaattccgacgggtcgcctgcctctcgatcgagaacccggcgatctccccagcaagctcctgacaaggggatcagcaatccaccacatggcgaagagagggagagagagagagagagagagaggagccgctggctgagctgcttacctgtacttgtgcgcgcccggctgcgtctggagctcggcctggaacttggtcttgcaggtgtcgagcgggtagagcacggtggtgctgacgagcgcgcccaccgccccggacgtggcctccgccacgctctcccagtccacaccatcccccgccatctctcctccctctccctctcccgcccgcccccgacgagatcgatccctaactcgcgagcggcgtgcggcgtggagaaatcccccggggagcgagcga

SEQ ID NO: 20695 - DNA, 5088 bp, Oryza sativa
cgtgcgccacgaggggtgttcccgcgaatctgcgatgcgttatctggccagtagtccgcgcgcgcggctgtgtaccgtgtagtgtaatcccgggtcgcgtgcagagcagtggtgtggtcgcgtgcgcgtggaacggtgggggagtcgcggcggcgtggtgggtgggtggggtgggggaagtgaccgagggagtggtgggcggagggtcggggacggtgaggacgggagtcggaacggggtggcgcgaccggaggagaccgcgagaccggtccgtcgtcgtcgtgcaggtgcagtcgcttcgcttcgacacgtgaaacgcgtgcccggcgtgcgagtgcgagagttgccggttggcggcgcggcggtcagcgcggatcgtgtttttttttatactcttctccgtcacgttcacgttgggatcttcgtgacaacacgtcggggtcttcgtgacaaccgagagatagttgtagtcataggtcctatttagttctaaagtttttttccaaacttccaactttccatcacatcaaacttttcatacacataatttttcagtcacatcattctaatttcaaccaaacatccaaacttcagtgtgactaaacacttctatactggtggggataacccatcggcaagatcacatctgggatatctgatcaaactaccggcattagttggtgcattggtgcgctatgcatttgtgcgtgcattagttggtgcattggtggagcacccgttcgctgagatgtgatgttcggtgtgccatgatgatagtgaatctgtgaatgctgcgttggtcaattgccaatcagcacaacctcacaccggctaacctatgcggacgcagcaattttgcctgcataagctaatgaaagatctcgcttagagttgctcgtgcatattatttgagaaagggattgctggtcccaaaaattgacagcaatttttcgttcttgcaacgggaaagagtaacaccctgtacgcttcgtgactgccacatgggcgtacggagggcaacctatccgttcactgtactccctccgttccaaaatatagcaacttagaatcggatgggacgtatcccagtactacaaatctggacaggagacatgtccaaatttatagtactatgatacatcacatacgatcctagattgttatattatgggacggagggagtagctacctgtggtctgtgcctccttttgctaccttccgacaatccgacgaatggtttggtgcacgaatcacgatcgacagctcacaggagggtaggacttcgaccggagctgctcgccaagacgccagccggcccacctttttgctaaccttggctcgcaagcccagagtctaggcccaagtgcatctcttttccttcgagtgaaattaggcttacactagcccattcaacgcagatttttctattggggaaaagtacaccgaaggtccctcaacttgtcatcgggataaaaaacgtcctcaaaccacaaaaccagatattcggggtcccttaactatacaaaaccagtcacccgaggtccttcggcggttttgaccctggttttagtctacgtggcggttgagtcagcgtgggacccacgtgggccccacgtattaggatgccacctcatcacctctcttatttcccactcttctccctttctctctctttcacttttctcaggccggccatgggcggcgctgtggggaggaggccgccggggggaggggagagaggaggtccggcggccggcgtcgcgccggtggaggaaatgccgccgtccgcatccaacgcgcgcaccggctgctgccacaccttcctcctcccctccacctcgccgccgcccgaaacagcatcggctggggcacccggcacccatggtggaggcggccggatccggcgagggcacgccggctggcgtcgtgctagcccctgcaaggagtcgaaggtcgtcgagatggctgcaggcaaacggtgggcaacgtgccgcgggcgacggtggccggcggcggcatggatgacgacgggccttctgcggcggagatggaggacgcggaaccgtgcccggatctagccgtcccatggccggattcgaagctcccgcgttgaatcttgccaatggcggcacggcaacaacggcgtcggcggctggacggcggggaggcagctagcgctggcggcggggctgagtggtggtgccggaggtggcggcggcggcgtatggtggtggtggtggtggtggcggcagcaaatcccgagacctggtggtggtggtggtggcggcggcggcggccgacgaggtcatggtggaggcggccggatccgtgctcgcgctcatcctcctcctcgtcctcttcaccgtcgcggcgcgggcgcaacaggagtacgaggtcacctcctcctcgtcctccttgccgtcgtggcgcggcgcgggcgagggccatcggccgccgcctcgggcgagggccatcgttctgctcctccccactgctctacgcttccgccgtcttcatctccaacctcctcaacgtcaccgccaccgccgtcgactcggtcgcccctgtcgccgccgaccccctcgtcctcacgtccgttgtcggcgacctcatccccacccgctggctagcctgcccgagaggagaagtgagagagggagagagagacagagaggaggaagggaggagcggccattgacgtggcatgctgatatgtggggcccatgtgggtcccacgctgactcagccgccacgtaggacaaaaccagggtcaaaaccaccgatgcacctaaagtaaacggttttgtaaattaagggacatcagatatctggttttgcggttaggggatgattttgtaactcgatgacaagtcgagggaccttcggtgtacttttcccttctatcggccctcttcggcctgttctaggctgtggcaattagtgcttgagctatggatctgtctagtaaatctattttaaatcctatactgattttgtggaaaaaaagtccaaatcaccctgaacaaactgatgtggcaagtggcaaccacggagagttcgagttccaatacaatacaattaacctttttctaagtaaaatgacccagccctatgttgttgaggtatgcaattctaaatgcatacgttaactgaacattactttagctccacaaattaagagtaaaatggaaattgatacctaggtaaccgtgtagtgataaatattttcaaattttcaaaagtggtgaaaacaacgaagaagcgaatttcaaaatataagtattttttagattggtacgaatatttagaaaatagatagaaataattgaagaaaatttatgattggttgagaaaaaaagttggtgaataaactaaatggataattgttacagaggataaatatgacactttagaggaagactcagaggacgaacagaggttgagagataaagatcgatagagaaacaactttattcaaaataaggtgctatgttaaaataatatctatattttgggacatattaagtagtaagttggtttccagtattttttttaatgaactgcaccagacactcgtgttgtttcattgaatggagtaggaaaaaacacaaggctaaaaccctggaaaggcagtagccaggaacgaaaaaaaaaacaccaccgtgcaccaatattgcctacacacaagtacacaacaacgctagcattggaccagatgccgctagaccaacaacgaaactaccgctgaaccgcactaaaccaaaccctaacagccgaacaccaaactcaaactctattcacatcttcgggattgaaggggaagagggtgaaagagaaaaatggatccgctctcccccacaaggcccgccaatatgatcaacttgcagaatttagggtgtcgtagtaagaggacaaacatatagagagagtacacacaagctgtcagagagaagttttggtaaggaggcctcctagacgacatctccaggaagaagagtgacaatgagcactgacgccaccttcccttgagacctcaaggagaaccaagacatggttttcaccaggaacgactcaaaaacggccctaggagggagaacgacaccagaagcgttgtcattgcttgcccggcatggccgggctaggtttacacctgccgctctccctagtcaattcgcagctattgctccaccaccgactatcctatctcaatgcgtggacactgctgtaccgatgacccccgccaaccagcctccgcatacctttgtggcacactgtcgtcgtcgcccttcttatcatcgccgcgttgacctccgacgatgtcagccagggcggcctccttgccgtcgcctgcattgacctcttgacgccaatctccaactgttgtcacctgcgccgatgtcacctgcgtcgccctcccgctgttgtcgttgtctctacgagccggccgctgccgctgtctatgtcgcgctaactctggccagatttatcgtggggggttcggaaacgggtagggatgtagatctgggcacggccatgccgaatcagcgaactccatcaccgctcgctgtccatgcacggatatgtccgactgcgccatcattgtctccgctaacgccattgctccctaccccttcctgtcactaagagtcactgtacagggggacgacctcccttgctagagaggccaaatcccgacccggggaggagggaagaggcaccagatctgacggcttcgtgcgtggtgcacaccctctgccctgccgccttctctctaccttatgctgcctctgtgctctccgtcccggcaccggcacgacacctccgccttctgagtcgcctcagtactcccatccgatacgacgtcctcagagaagaagcatcataccccaatcgttcttacactgtttagttttgactaccacacttatgtaccgatcaggtggaggaggaagaagagagtggcgacggcaatggcggttggtatagttgttcaggccatcttttaggtgggaccaacgcgggcggtctcccgtacttggaggttggaggtatcgtgcatccgaacgacagacttcacccggtgagttc

SEQ ID NO: 20696 - DNA, 1478 bp, Oryza sativa
ccattccgcggctactactacctgctcgactgcggcgccgcggcgtccaccaccgacagccgcggcctcgagtggctccccgatggcggctacgtcaccggcggcgagccccacagctccccgaccagggcctcctcgacccggcgctcgccacccgccgtgacttcccgcacgagcccgggaagaagttctgctacgagctccccgtcgaccgcaaccgccgctacctgctccgccccaccttcttctacggggcctcctcgccgccgccgcccgtcttcgacctcatcgtggacggcaccttctggaccgccgtcaacaccaccgacgacgtcctcgccggcagcgcctcctactacgaggccgtcttcggcgcgagcggcaggaacatgagtttctgcctcggcgtgaacccggactacaccagcgctggccctttcatcaacgcgctgcaggtgatccagcttcacgattcggtgtacaacgccacgaacttcactaccagcgccatggggctcattgcgcgtaccaagtttggctccaccgacggtgttgagaggtgagtgctcgatcactcttgccttcactattatgaacttctgcagtccccattaggtcctctattacgattagcttagtgatgaaatgttgaatggggattacatgattcactagaagtgagtatgtttattgactgcaaagctgagccaatcttgatatgatggacaatgatgtgtattcataggttatagggataaatgaaaattttgaaacaaataagtaatactctttggatcattttctttgatggactgaataactcaagtttttaggttatcttctcacgggttaatgtggagtgatatgctgtgttatattcatgtattaatttcttatgtatgtaaatttcacaagatctgtacaagtttttgacctgttttcctatattcaaacttaggtaccctaatgacaccttcaatcggtattggcagccattcccagacagtaaacatgcagtcagtagtacccacaatgtcacatcggctgatttttggaatcttccacctcctggggtgtttaatacagctttggtggcagaacaagatgcacccttggtgctgcaatggcctccaatacctctccagaatgatagctattatgttgctctttattttgctgatacagtctctgagagttcaaggacctttaatgtatatataaatgattacagcttctatgaaggcctaacagtaacatcagctggtctttctgtctttgcaacacaatggattctctcaggcttgaccagagttattttggctcctatttctggccttcctccacttatcaatgctggtgaagtctttggacttttcccactaggaggatacacatttcctcgggatggtatgtcagtcgctacatatattttttcttccatttgtatcttttttcgtaataggttaaactaaatgact

SEQ ID NO: 20697 - DNA, 3183 bp, Oryza sativa
gtcaagattgcctcaccccaaccattccttggaaagtcccgcagtgtctaacatggcattcaccatctcagttagagtgcagttctttctttcggctaccccgtttgattggggtgaatagggaggtgtcctctcatgaataattccagactcttcgcaaaacgacgtaaactcattagaaaaatactctccactcctatcggacctcaaccgtttgattttcctttcaagttaattttctacctcagctttatagatcttaaagtaatgtaatgcttcatcctttgttttcaatagatacacatagcaaaatctagtgcaatcatctatcagtgtcatgaaatatttatttccccctttagtcaacatgctgttcatttcgcacatatcggaatgaacaagttctagaggtaccaaagtcctcgcctcagatgccttgtgaggctagcgaggttgttttgattgaacacaagtatggcacttggaacttttgactaaagtgaattttggaattaaactcatgttagccaagcgcgtcatacaaccgaaattcacatgacaaagtcgcaaatgccacacattggactcatcattctcgctaatatggttcacaacattattattacacatgtcatccaaagaaaagcggaacaagcctccgctatcatagccttttccaataaaagttccatatttagatacgacacatttattggattcaaacacaagtctaaaaccatctctacacagtagagagccgctaactagattcttctttattgaagagacatgctgcacgttcttcagctgcacggtctttcccgaagtaaacttcagatcaaccataccaacaccatgaacagccgcaagctatccgtttcccatcaacaaagaggaacctctcccgacctgataagaagaaaatagggaaatattagcacacacatgaatattagcaccagtatcaacccaccaatcaagtgaatgaaaaacagagagaactgtaggtaaaaaattaccgtaccccaatgttcctccacccttgctaataaccatgttggcggacttcttgtccctacgatcaggacaattcttagcccaatgcctaggtttaccgcacacaaagcagttgcccttggcctttcccttgcctttcttcttaaaattggtagtagcctttgaaaaacagagagaactgtaggtaaaaaattaccgtaccccaatgttcatccaccctcgctaataaccatgttggcggacttcttgtccctgcgatcaggacaattcttagcccaatgcccaggtttaccacacacaaagcagttgcccttggcctttcccttgcctttcttcttaaaattggtagtagcctttggtttgacatcaggcttgactttcttgttgttgttgtgagatgcgtgagggttcttcttctacaccaaattggtgctggaacctccctcgatcttattgccccggttgtcctttgccctctccttctcctcaacacccaaagagccaatgagatcagtaacactgaacttttgccttttgtgttttagagaagtagcaaagtccaaccaagaaggtggcaatttggcaataatgccacccgccacaaacttgcccggcaactcgcagttgttgttctcaagttcctttgccagcatctgaatctcatgagcctgttgcactacagaatggtcatcgaccatcttgtagtcatagaactgctccatgacatacagctcgttgccggcgtcggaaactctgaacttggcctcaagtgcatcatacatgtccttccgtgaaggcatgtgaatgtacacgtccactatattatcagcgagtacactgatcaatgctccacggaacaggcaatccgaagcctcgaacttagcctccttctcagaagagagaggcggttcactctgtttgccccgtgaaacatagaagcattgcatcgctgtcaaccatagtagtgcacgtgctttccatctcttatagttcgaaccatcaaaagcatgatgtttcagtgttgcggcaaagccaactaccgaaaaggacctatcaggactttggagtgttggaaattaggtcataattcggtatattttaacccaaaataacaagataataaacatgatatttacaatgggatttgatccagtgatagtggtgaatgtaatcaacatgagcatgcttaacgtagaataagcatcaacaatcacataataacgcaatgttgacattgtgatgaacattaacagaaaaacttctaattgaaataatgtaagaaggttataccccaagaatggtcctctgttggagtttgaggcagtattgactccgttgatgttgacaggaacctccttctccttgtctccagtgttgccgttgtgtccagtgttcgacatgttggtgaagacgaagtagacattgacgaacagtgagtagtcgcgccttgcgctccccaaaaacctgatcgcccgcccatccgtgcaaacgtcgcagtagtgaagcatctaggcccccggtgttaattttggtaattaatgacaagcactaattgtggactaaccgttgtctttgagctatacattttaagttaggtccacgtcatatgcgcgcatggatgattatcgatggattaaaattgacggcgcaaagcaaagggaaagaagacggtaaaactagcgctttaatttagaattgatcgaggtgtagggcgatcaaatttgctagtttaattttagtttcgtcgtactattaagaggggtaatgacctagcaaagagatgattttaattgccacattaggtcattgcattttcatttgtgctctctttttcattacacaaattcactgggttcagcctgaccaggggcggtcagaccggccacatagtggcggtctgaccggcgtgccctagccggtcagatcggctacatagtggcggtctgaccggcggcactttcccggtcagaccggcctcctggaggccgagatgatgctgctcgggatggccgatacagagccgacggagccgtagtcggtcaaaccgagccaatggcggtctgactgagccgaggccggtctgaccggccaccccatgtcgatctgaccggccaggccgatggggccctctgacaggactacaacggctagttttctagccgttgc

SEQ ID NO: 20698 - DNA, 4283 bp, Oryza sativa
gcatttgcttccattgtagagctagtgtggcacttgatcatctccacaccgggtcattgcttgttactcttggaggtgccgcctcctagacggcttgtggaggagttgcccggtgacctctccgagaagattgtggaggaggcccggcgccggtttgtgagtggtttggagttcaccaccttcggagtgaaggaagaactaccctgagtgatcgaggcttgggtagtcctctccgtgggtcggctcccgccttgcccaccccttgacgaagggggcgtgcggtggcttcgtggttgagcggtgaagttgggctcgcctcaacggggagtaggaaaccggcgagtttccgaacctcggtgaaaaatctcttgtctcattgtctcatttgattgtcgcatttacatttgtgcaatttacttttctagagacacacttgagatcatatcaccctaggattgcaaaacatcgacataggagcgtgatttactttcctagagatatatttgagccactatcaccctaggtttgcaaaacataacttagttgcttagttagagttcaccctcaccaagcctagcaacttagattagatttgattaggtgttatttagttttaaatcgcctattcaccccccctctagtcgacatctcgatcctacaagtagcgcgtggtttcggaggcctactctcccaacgcgtgtgcacacactcgtcaggatgggattatcgtagcagcaacaaccttagaaaatggatgaaagtgtatctcacttctcacgcagaagatcaaatccattctctttttataggaggaatggaagatgaagagtaagagtcatggaataggaagaggaatagaataactaattctcatcaactagccatcaactatcctccactacacaaccatcaaccaaccatcaattaggagtaattgatgtaggttaccaatgtaataggaagagaaatggagcaactaattgtcatcaactagccatgaaccatcctccactacaccaccatcaaccatctatcaattaggagtaattgatataagttaccaattcactaatcaaatggattaattctcaaaactcttcatcccattgatatcctataagagaatgaatacatatgaattcatagcataatgagccttgaaatttatttgatttaattgatttaaatggatcaattacccaattaaatctaacagacacctccacatagggcttcggcgcatgctgcaggtcggccattcacggcagtcacgtcgtccctcctgaagctgcatgccagtgttccagatgaatgaacgatgctctatgcaaactagctaaattttcttggcaggcagttgatcgatcatttatgcatgatcgtttagggcaagttttacggtggaggtggatgtcacatactcacatctaatttagaccatgtcatcttctcattaattaagagcaagtataatagtgagctataaaagcttactataagcttatgtggaggagagaggtaacaaaaaaaatcaaaggtgttggctcttatgcaagagctagcttaacacaagctccaagacaaaaataataaatgtgtaagtgagagatacagataggagaagaaaattatagccaaccttatagctaatctattacttctatatgtgttagctttaagatgggctaatagtagatagtgatctctactattatccttgctctaagaggtaacacatacaacatatcacatataatacactaatcccaatattagttcactctcacattgaacgcgctgatgaagcctagaggggggtgaataggctgtccctgaaatcttaaaaacaaatcgcagcggtaaaattcaaacagacccggaacttcctggtaaggaactccggaacttccggcctgccaagcccggaacttccggtgttctaagacaggaacttccgagtaacaaaacagagatgaaattcaaattttgaaacaggagactaagccaatcttcacaaaatggtgcacaggtattctaagcagaggatatatcacagaatcattcacagaaacatcacagaaagagacaagagcgattttttcccgaagttcggatcttgcgatcctactctccgttgaggagctccaaagagctgggtctcgattaaccccttgcctcacttgtgcaaaaacccctgaggaaatccacagccttcaaccccaaacacccctaggcaaatttctagaattgagtgaccaccaagatccaactcaacctacttctataaatccactacaaatgtgggttgctctacttggaaagcctttagaatctcagcacaagaacttcactaacttacctcgtttcctttcggaggagaggaaatccttcacaaacttacccgggacatccacaatatgcaacggattctcgcgggcgacacctaaccgtctaggagatcatctctaagagtaataagcaccgagatgacagcccacgagatattccaagtgctcacccaagatcctagtcttcacacatctccaaatcttcttctctccctctcaatctctctttctcacaagaattaggctctagattcagtggagaaggcaagaaacacttgggaaaggctagcaatagctctaggtttgaaaagtgaaagtggaatagcccaggacgagctggaaacgagctgtatatgtataacggctaggtgacgtcatctagccgttactcacaaatttgaactggaaacttgacaggaagttccggacctagaagaccggaacttccagactacacttgggaaaatctttttcacaagaccggaacttccggacttggaagacaggaagttccagacttgcatttttggacagatggagtatttgcaaaaatgactcctagggaaacttgacacttggttcacactaagagcacttgatatatcttagagcatcacctggaacccctcttaatagtacggtttttcctaaaaactcgatttcaaaagataaactatcctatgcacttctcgagttccggtccgctttgattttgtactttttttttgggggtctccaagcttccatcttccacaccttggactaatgcacctgaaagtcactcaatgaactcattagtcctttaaccacatttgtcattaatcaccaatacccactaaggggattaatgcactttcacacattatcttgcatttttcttggagattgtgtagaggttgccccttgcatgaggggtggctcattttctctctcctacttctctcctccacctcatcatttaatcatatgtggcaaatttaggccattcccaacccaagacattagactagttactataaactccacatcatcaagaaactagtactagatactacccttccaatacaaacaccactattccatacttaaatttattgctacttatctcacatgatgtcttggatgttgtatagaaaccatatctcatgcaagacatggtttccttctctttcctaatttattcacttgccgcgtcatttttcatcctagggccgtgtttagttgcaaatttttttcttcaaacttccaactttttcatcatatcaaaacttttctacacacataaacttccaacttttccgtcacattgttccaatttcaatcaaacttccaattttggtgtgaactaaacacagcctaggtgtcaacttatttaatgctatggacaccatcctagtcattgggttgggaatggccttagagcaagtttaatagtatagccaactaccggcttcaaatcatctatagtcaatttaatagccgatttatacaatagtcacctataaacgtatactacacaattcatagttggtcccaccagtcatacgcacatgtatcttggagtctgcgctgcagctggctacaaatttgtagcccgctgtccttctctcttctattttatcttcctgaaatgtgtttatagctggcttatagtctgctattgtacctgctcttagagcaagtctaacagtacagcccactactagctccaattcatctatagtcaatctaatagccaattcatacaatagtttcttactatactattaatatacagtcccacctgtcatacacacagtgtgtcttggagtccgtgctgcagctggctacagatctgtagcctgctgctcttctctctcatcgtttatctcattaaaatatgtttatagctaagctggctaatagccagctattgtacctactcttaggggctaa

SEQ ID NO: 20699 - DNA, 3779 bp, Oryza sativa
tggggtgtgacacatcctagaacaacaaatttagacaggctaggatgtgtcgcatcccaccaaaatcccttatatttagggatggagagaataaatataatggatttctcttctcgcaagacaagcaaggattgttagtcattcaaaaacaagtacccctccgtccaaaaataattcaatagctaagagttatctttttttttttttttgacagagtagtaatcaacagatacaaccatgactaaaaagatacagaaaacataccagtactactccacaccgtcagtatcagaaacgataaaaattatagagaacgccctagtacaatttggaactgattatgcacaaggtttgatcgtccgtcttatttaaaatttttttatgattagtatttttattattattagatgataaaacataaatagtaatttatgcgtgactaattttttaatgttttttcataaatttttaaataagacggacgatcaacattgttggatacggaaacccacaactacacttaaaacgggatggatatagtactaatttgtttattgtgcccaggatatcttttgaagctaaagatgtactactttctcttacttaatacatctccgtcctaaattagttgtctttctaccattcaaaatgtatttcataatacttgtcactctctcaagtactatttatcccatcaatcacatccagttcaaatttctgcgtattatactcctcaaccaaccttctatcctcaaccataaattatttttataagctcaaaaaggtgtagctcttgcaaagtagttactcctggtaatttctccattttacattcgccaaaggaatgctagctgaactcttatgccagtagcagtgcaagcccctcatttgagttatcttagatgccatgtaggataaatacacagaatccacttctctcacagtgcaaactactttcacgggatccccgagccaaccaccccaacatccccgagccaaccaccccaacccaaccaccgctactttcgcattctctctcccactttcctcggctgctcctcaccaagtgggccttgcaccaggcttgtgcaaagaaagcactcattactctagcgagaagcgaacaacaaaccaaagctatggccccacctactttttcctccacgtagacgaatccacacgccatgtccttgcactgtgcaaggccttaagccattcacactgtgcccaatccccatgccgtgacccaaggaaaaaggcaaaaatacacatgtgcaggctgtgcagtggaggaaccgggccatgacctccagagtgcgctcacgatgctctcgccccatgcactcattcaggattagactgaagaacaagtgaccaaagttggatacacgaacttcagatatgtgtgccagaagcaaacgtggcacataatatttgttgggggaacaatgaggccaaaatgctgaatgccacctcgacacaatgtaaacgcccttaatgaatgtagtgttgtctgttgtcaagtgacacaccggccttttgcattggcacatacttttaccaaaaacatctcataattcaacagaatatctatactattttaaaagagacctgcgaaaagtgagagaagattttacagatttactttccatacaaacaagacccagacaaaagaaaaatatcgaaatattcttattgtggaatttctcatcgctctatgatatattggacaataggaataacatattttagaggctttaaaataatatataataaatagttttttaaaaaacaaatccgttgcagtgtcacgggcattatgctggtatgcttaagaatttgaagtggtcactacacaaaccatccatttactggttatcttgcattaggtaagcctgaaagattagctgctgcagccagcagggtatccatatgcatttttgtataagggaggtggaaaaattcttaaaagatgcgatggaaaaagatacaacaatctactccctctgcttgaaaatgtaaggtatttaactattttagttttgtgctaagtcaaagttctcttactttgagtaggctcatagaagaacagtacaccaaataaatacacgagtaaattgcaccagcgattcttaaacttataagcatgttttttttacctagatccacaaacttgcaaagcatgcatcgagttacctaaacttggtttattgcatcatcccaatccaaagctttgtttgaccgtggtctaacttacgtggcaacgatcacatgacacagttttattatttttccttttccttttttttcttctatctcctttggcctctctccgacaagcggtgcaccagcacctatcttctccggatcacaaatcagataaaaaaatttcgaggaaaaatcatttaacgcttacaacaaaaacctcgtgctacatggagcctaatagatgctagttgcatgcaaggagatgcggaaagagaaaatgactctttttctcggacacgcaaaaagattgtacgctaatatattaggagagagaaaaggactcgtgcacatgcagagctagagccatcagttgaacgtctgactttgtgttgtgcgtcgaaccgtcgatcaaaggcattctcggaaatcttgtgcagattaaccagaatatattatttaaacccataaacagaatacgatctcagccgcacacacagtatctgtccagctctcgccgccgggggtaggggaggctcctctaactttacatgtgctctctacccatttggcatttcagatttattttgacactactctgcaatctgcatgtgcctatgtaacaatttaagcatggatcgatcaagtctatctaccactagttgtaaagaaacaggtttaatcgattcctctgcactttcccatcttattgacattcacaacaagcataaataacaagtgacaaccacggcaaattttcatgtttgttcctaaatcgaaaaatactaacttagttctttattcctgaatcgaccgttttgtagttaaagggagtagttgtattgcgcccccgcgttgtcctcccccacgggcgacatgggaggtggaaaccaccggcgtcgcccgctcctcccccctcctccctccgccgtctcgccgccgcccgagcggccgccggcaaagccgcgcggccgcaaggacggcggcggcggggcttcaccctcgtcttcgtctccctctcccgtcgcggtggggggccacgcacgggacggcgaagaccgcccaaatccgggctgccgcggccggatctggcgggcaggccgccggcagcgggtcggtgtgaggtggcggcagcagttggtggtggtggcggcggggattgaaggtgggggggtggtggcggcagttggtggcggctggcgccgggaaaggcgacaacggtggcaggggaggcggcgacggcgacagggatggcgtgcgtgctggtggtgtgctgcttctcttgctgggggcgtcggcgacggagttggagatggcggcggggatggaggtggcggcgaggctggcgacggaggtcggatctagcagtgatgctggcatcggcgaccggatccaggcgctggagatggttttgccccagtggcggtcacgacggcacgagagctcgacgacggcgttggggcggttgcgttgcggtgtcggcggtttgcgacgacgactgctggcgtcggtggctggtgacagcggcatcggcgacggccgccgacttgcagtggccgtgactgagcagacgg

SEQ ID NO: 20700 - DNA, 4808 bp, Oryza sativa
ccggcttggcgcgagaggcgcagccgatggagggaggccggattggcgcgagaggcgcgtccggtggacgaggccggcttggcgcgagaggcgcggccggcggtggaagaggcgacctcggtgcgtggtggagctgccggtgggtgtggcgcggtcttcggcgcacgaaggttggccggcgggggcattcgtgcagggccccacatgtcggcagagtttgagtggtggtggagcatcggtgcatcagccgtagattcgtaggtggtgagcggcgggtgaaaacccagcccagccttggccggaccgacaacgatgaattccccctcctgagggcgttgtcgtgctatctcaccccttaagggtgattaccgggcgaaagcccagtcttggctcctttgagccctgatggacggcggcggcggtcttccgtcgcttctcttcttgaagacgtcgttttggcacccccccccccttgctgtagggcgatctcgtctgtgttcctttgttggtctagcggcagccggtcacgcttagcggcggctggtccggtgctaaccttctcctggtcgtgtgtgttggcgctgccggtgtgtgggtggtggtatatttttttctttctcctggttatgaccctccagggttataatattgtaattttttcctgctctatcaatagaacttcgcatcgtctcatgcgagtcgttcaaaaaaaatcctgaatcgaccgatatatgtttctatggttattgattacaatttttttcatactggtaagtctattacaatatttaaaagttagattgctcgttgtttcactccaagaaaaaattgatatagagtcatcagacgctaaatcaagtgactgatatataagggtaaaaaacaatagctcaggtagtccattttcttttatatcgcttcgaccatccgatggcaccatatatttgatcatagcatccaggtgcacttcctttgaaaaggcattgtttgcaatccatctcttacaagaccaaaaatgaaaaccgtgctatgcccgtgcaacattcacgcgttgcattgcaccatcgggtgcagaggtagatggtaacatacgaatgtttgatgccttggtatgtgaccaaattttgctactgttgaaaccatggattgttccagatattttcacatgctccatacaaaaaaaaacttttacaagttattgtactaatgttacattcaatgttttcttttccttcaaacgaaaatctttacacagtatttgacttgggaacttcagaactcaagtactcaaccatctctgcatctcgattatgcacactagagacacagcttgttggcttgaaactcatctgcctcatgctagagcttgagcgtgtgagataccctcacaccattctcatgatgatacattaatccagagcaaagcctcactgcttgagttacagttgaactctgaatgactagagcagtacaaatctaataggagttggacacccaggtgcagaaaatattctacgaaaatgcattgacgcccaagcagatatcagctaacctttgtattcaaatgctaggagtttctaactagcagaaacctgagaatcagctcaaaaggctgcaccctaattgcagctatcaagtactcagccggtaacttctagtcctatgtgcgcagaatttcatggtcctctgcaaactcaatcctcaccatttcagggaggatgccagttccaggagagattccacttgacgtatggtccgcagcttctcttgatacttcaacttggtcgcaacagcttccgggtcattaccagttgggaccttattgttttcatgtgcagcttgaacttccttcaagagctcatcaacttccctgatgaaatcaactcttagaagaacatcatcatcctgaggtggcagcttgatctgtccttgatgctgacaaaagaaagaattcagaatttttttgtagcatgagagaaccaaagagagaaggagcaggaaatccagaattcaactatgaactgacaacgatattccatattatctttggactaactaaattaactatgagggatgtggcagtgtccatgcttgcttgaaggaaaatttcattgctgtcaatgttaacaactatgaagtatatggctaagattaggaggttatgtataataaaagacttggtaacacttatgttaagtggcacaactaattttgaatacaactaggggatgatatttttgtgtgaaatctgtaaagtcagcatctctgttttggaattgtgtcatgtaaattaaaattttgtaaatgtctcatgcataaattttcattctcaagtctcgaataactctaaatttctagcatggtcaatttatcccatgaggaaaaggcatgcatttaactaacatacttcctccatgttgaaaccagcaggaaagaccatggtgaacgggtcttctctgggaaaaacttcaagcatatgttttttacatttctttaaccacttgtcatcatcagatccatcatgaagattcagaaggtcattgagcaatctcatagcaggagttgcttcactccttaaaatttccgtctgcattcaggttatggtttctgattagcccatcagagaccaatgaagcggtcaaatgaacaggattgatataaatataagagcttaatggactcctccaacaatgataagataatggaggctgtgtgcggtgcacctgtgtgacttacctctacccttctgtataagagatcaaggcttctgatggcatccctctcatcctgcgggtgtataagtcaatatctaaacaataaatatggtatcccattctttcaaaaaaaataaatatggtatccctctagtcaaatatcttgattgtagatattagaacttataggcaaaggaacttctcccttctcaaatatacttttgctatgctgcctctagtcaaatatcttgattgtagatattagaacttataggcaaaggaatttctcccttctcaaatatacttttgctatgctgaaaatttatggaaagactagatatcaacaattgagcaacagaagtgataaaagtttaaatatcaatcaatgtttacaggttgtaatattgagtggcagtgtggaataagaaaaataaatgcatgggatctaggagttcttacaactcacaaggtgttttagttgtccaaatctgcaaggtgagtaaatggtatgttgtagtgttatacagcctaaattatttcctccttttttgggggcagggaatccaaaattcaattgttgttccatcaatacttcaacattcgtacttaatgagtttctttaccatgagtcgtacttacatgtttctcgaaagcattttctgcacattcaactatgattatcttacgcccaaaatgaaaaaaaaaaaaagcaaccacacttttgataacaaaagggtgaatactgactagtaccaccgtaaaacaagatgaaaactgcaagggcttgaaataaataaaaaaataaacaatacataagtcatcagataattcaaagagaagattagcatacatcgcggcgagcaacatcaagtcgattccatatgaccataagaacaagttcagtaagctctcctctttcagcagccttctcaatttcctgcttatgaaagtagagcagcaatgtattaagaaatgaaatatttcataagtggcttaataaaaaaaaaaaactgctgtttataggaaaactcaactctgatgaccctacctaataaaaaactctttcaagctattatgttaacagaactttgatgtgtgagcctggagttaaccttttagtagtcacatacaaatatttttgccaacaaagaaggtgccacagagagaaactacagacacagtacagtgtgggtgttcaactgtacacagatcattacatataataaagtttcaattaaagttccttaataggttttttatgtacctcacactatcagctgattagtctacagcatatgccgtcccaattcaaatgtttcagattgaaccttaactgacctggttggccgttggcctaggttgtgtacctttcttttcttccttcaatataaccagttaacagttctcccgcgataacctttaaaatatatctgtatgtcacttgtgtttttagccagcaagtttgggccctgattctacaaaggcttggcttctcttccaagttccaacttgccaaatcaagacacacataagtcctctagttggtgtcgaaggctgtgaaaggtatgcagaaggatgaggagaaagtatttaactcagctcattatcttggttgcttgagagatttggaaacataggaatgattgtgttttcaatggtgcaacacctagtatggtggcagttatccaaacagtggctaatgaaggagcactttgatgcttggctggagcctcaaagctccaagagttgttggctaggtcgatagtccttgtctcctagaatgcttggttgcgtccgtcctttttttttctgttttattgtaagacttgctgttggggtgggagagtttattctaattccccacctgttgttttttttttctcttgcttaatgaaatgatgcacagatctcctgtgtgctcgaaaaaagtatctgtatgtttaaagtacctccataaaagtttcaagatagtggtctatactatttaatttagtagttcatttagtgttggcccccttatattgtctcaagctctgcccccttgttgatatgacagcacatgctggtagcttaaggcatacacatgggaaaata

SEQ ID NO: 20701 - DNA, 2031 bp, Oryza sativa
tggtttataagcataacatgcatctactaaccatatgttagattctaaggtcgtagttttgtcatcttctgttcacgattcagcaaaaactgcactaccagtagcattgggaaaaaaggatgaaacatagaattgcagagtggagacttaataaggataggttacctcttcaatatcttcaccagctcttataaaacttgaaaccaaaatccgagctttgcgaacttcttcctgtgggtaagctttcaaacgcatgcctatttcacggtattcatttgttagcctttcttcctcagcttcctctttcttccgatatgcattccattccttagtcttttcccgctgacgagcttgccattcctgcatgaaaaatcctaggtaatctatgggtgcagaaaaatgtttgctgctaatataacaaggagaattaactgcactggtgtttaacgagaatgtagcttcatatggacataacagcttagctggcggcaagaaagctgtaggtatgcagacgttatttgccacaagagtaaaagtatgagtattgactctactgaagtagccttgatctagttaacggttgcagcacactggcgtagtgtcatttatgtaccattgtacctacatagtcacgcttgatcaggaaacatatgtggaaagccatcaacgttgaacagcacatatttgcctttttcttatgcatattgacgatagagacagagtcacctccttttttgtgctagtgatgaatttgattatcatagtgagcagagcaccagtccccaaaaaccaagtgccaaaaccctccctgtagtccttctatttgccaatgaagctaacagcggtaattgagggtataattagcccattatgaaatgaaatataaacagttgattgttgattgggtttgtaaacatttacaaacccaaacaaatttcccatgtggatgtgtggctacagataaaacaaacaggtttgctactattgaccacctagaaatgggaaggtcgttctaggttactgtacaactatttcctggtttcacaacatcctcgaatcaatacgcaaattaacgtgcctaacctcgtcgtagtactccggcggcatcccttccagctccacctccttggcttcggcggcggcgcccttgcccttctccacagctgcagtacgcgaaacaacacacgaaaaggttttcatcccaaccatacgagagggggcgctaccgaagagcgtacgagtagaagcactcgagccgagccgcacctgagatggcggggagcagcttgacggggcggagagcgccccggcgagaaggcagagggcggggccacgggatgcggcggggaggcgagctggatgaggggaggagaagcgaggcgaacgccggcagcgcgggcgccgcggcggccatggcgcgttgtcacggcctcacggggttttgtgggtatttttttttcggtgtagcggataaaccgcgaagggcgaagcagagagaattctatcgagcggagtaaacggacgcgcccgcagcccactgcacaagtgaacaccacaccaccaatctccactacaggcggagccaaaaatttaatcatgcgaggtcaactattagcttatatttaagttttaagtgagattatttctctaactttttaaatttatacataaaaatgaaggattttaagcgcgtttttcaaaaagttgtggggtcagctgacccatagattgtgcatggatccaccactgaccgtcaccacttcccctctcccttcaaaccctagggacaagaggctggccagtggcaaggcaaggaggctagccagcgtcggcaggtggcagggtgatgggcaagaaggctagggggggtgcctggcgacaaggctcaacgcagcgacgggacctggagacggcgtcgacgcaaaatgggagcgcagcgcacgcgtcggctccccttctacggtaaaaccctcatctctttctctcttttacatgactgttcgcgtcggccattcgcgccggggtgcagga

SEQ ID NO: 20702 - DNA, 6985 bp, Oryza sativa
cttcctcctctccaccttcaccctcctccccaacctcaccccccaaacttgctctaacccaagcttgtcacaatgttatctagacatgtttgtaggatacccatctcgcgtgcattcccgaagtagtttttttttagtttgctatattttaaaacagggtaattctatagtaataccaggcaacacaaatagctcgggcacagaactcttgttggtgcaacttctagttgcccacaggggcggatccaacgtgggtgcacgggggacttgagtcccccctaaactcataaaacccatggataccccccggagcacccctttaattttttcactataaatgataaactaaaggtccctagatggttggaagttaaagaataaagaaactgtgtaattgagtcccccaattttttttttttttgatccttatccgccccaggttgcccattttatttcgggattgcacaaatagcgtgttgggcatcggcgcctgaagctcaggcatccagtttcggacgccggactaacggactcatgctaatgaccctccaggcgatcaggtcaggcagcagcaaaaatcaggccaccaaccaaacaccaggggatataaaggagagctcaggtcaggctagctagccatcgacagcttaatagcgactccgtgacatatgctgacatgggagtacatagggcatccgacaaggcgagttatattacacacactatgcaggtcaaggaaatgcagagggcaaccagaacaccgtgacatgaatatatccaatgtttttattccttttcacagttcttttattattgcatctgtttgtttctttttcagtgtttctttgagatttcaaccaatcccgccttacaatacaaacatggcacaaccacttgtaatcggtgtatcttttcactggaagtatattatttgaacagtttccaccctatggcagcctgaagcaacaatgttgccattggggccaacagacttttgttcaccggacccctccatcggctggcaagcccagtgtgctcctgcaaccatggtagttcaaacacaaagcacgccctttggttagtcttccggtgaaaaaaaaatcagtaaatgaatgcttagtatttagggtaagattaacagacaagctagcaatgaactagcgatggttgaatccaaacccaaacttctgctatttttaaaaggatttaaaaatcaactgtgtatgataaagtttaactataataaacagttagtttcataattaaaagaaaaactagatgggattcatgttggatccagatctccgttcagaaattatgcacaagagtaccaccagttaatctgatttatctagagatgtgcccttctatgttccatgattccatctatacaaaaaaattgccaatcaatgcagtaccatgtattccttttctaaaaaatccagtactatgcaaatcctaatgtagcaacgatcttcaagtcaaatccaaccaacttaagactcagaaagtagaaatacaattgcataaccaaactgaacagctagcctgcacgttcttaactgaagcaggctgtcaacgtgagttgacatagcagaatgcattttgctgttgcaaaaattgtgtgtgtgatatgaggtcatcagaaagattacaagataatgaagtggaaggacttttaagaaaataaattttacaactcttttgctataagtagagttacgagaacccgacctcaaaaaatttggtaacaatcaatcaataaaggtaaataataacttagcgaaaacgtttttcgtgtacaacggtgctacgaggcaaagttatagatactacaaaaatactgcaagagcatgctactaacaagtctaagcagagagccagagatcacatatttacatgtcataattgccctataagctgtaccaggcaattttagtcttagatatatgctagagaacaaaattgaactggtagcacatacatgctactggtataatcgaaaagctactaccaataccaggacacttggtgtcctagagaaacagaattagtgacagtaaggatagagtagtagcattcattatgaacttcaaccatccagaagtgatactaatgtaaattggtgatccttttttaatccgattccagaaactacaaagctcaagctatcaacagtactctaaagtctaaaccaaggcggtttataaaaaaaattgtgcgtgaagcacaattaatctcagcagcagtgcagcatttttcaagtcatgccaaactgaaataaaacaacgatagacagtatcgcctcatcgcatcagtaccacaaacacagtacttccaaaccctccattgtcaaaattcatttcaagattttggttttctgattttcttagaaatggtataaacgtgctataaggtgtgtctataaacaaggtatgacacattagtgccttaagatatacataagtaattttggcctagcaagtgcttctcccaatgacggttaggggctagatgccggcatgttcccatgctggtgtttaatacccccaaaaggccaagtggactggtggctcatctcagagatcaagaatagcagatcaggagcaaggagctagctagcactactgagctggtagtggcccaatcagaagctagtgcatgagcttgcggcagcagtagagatagagcagggtagcagcagtgaatcaatttagtaccacctcggaaatttagatagggccaaacgaacttgtaaacctggcaggtatgaacagaacaatacagctttagtctttattctgtgaaattaggaaaaaagccaaaggaagtaattgcgcaggtgagctctaatccaaaattgggttaggcctgaaacggagtcaatcactcaaccctgtacttacagtggtgcaagagccaaccctcgcagttacaacagactctcgttgtggaccaagggctcgggcatatagtgcaaggcgcgtgtggtcccaaagtgggcacacggcatggcatgtatgtagggcactagagaaacaaatgtgtgctaagaaggggaaatcctagtcatttctcagaaataggtaagttagtttctcgaggacatacagcttgttgaggatggtagcatgtgatgccccgaatcaggaaggggctgctggcacatcagagatcaagcagagcagatccaggaacacggagctagctagctagcacttgtggcctgttagtggcccaatagggagctagtgcatgagcatgtaggtggtagcgatagagcagaacagcagttaatcaatttagtaccacctcgaaaatcttgataggccgaaccaacttataaacccagctggtctgaatgaaataactggtttaaacattttccacgaagcaacaactaaagcaaaagcaagttattgtgcagctgaggtctatccaaaaatggggttaggcttagggccgctagaccctggatgataatggtacctagcatcaagagaaacaatggtcccaaaaaaaatcatttacaccccagcgtacttgagaaaagtagcaatagaattcgaattatgtccacaaagacaagataaataagattaattaggtaacaatgtttgccaatatttgatcatgttaacaggatgctgcattcatttggttacattttttttccagcacagcaatttactcttgcagcctaattaattttccacaattattgagtcccaaactcatggccaaattttagcaacggtagggttcagcgcaaaccaaatagcccaaaataccatggagaccattgaatggagtattggcagaattcattggttttggagggaaaactagatgaaaaagttcacaccgacatactgatacagatgaatcaggtaaatcccctaatcacactccgaagatcacacagaactagatggccatactgcccatttacaaataaaaggacactaaagatatagatttaatgataatgtaacaagataacctcaaactgcaaacataatcttcatctaaacacattactaacttgtaccccccacgctgaggacagaaatgctcttgctatctgaagtgtattataacagatttgcattctagcatggaaattgtcggaactatcttgcaatggtgaaactgaactaatctgatggaagttgtacggaatggcatatggtcaacgggcactcacctcttgcttcggcgcttgctctttggaacaccccagccctccagcttagcaatgggacatccacaccggttgcggaagagcagtacagcccggccgtttggtggagccatccgccgtagctccgcgcggaggcactcgtaatccgggttgttcccaccctgcccgcccttccacggcagcgcctcgatctcgcgccacatggcggcgtcggcgccgccactggtgctccccgtgcctgcgcgcacggcctcctcggtctggagctggacatcgaactcgagcgccttcacgaggccccggcaccgcgggttgcggcagcggcggcgagggaggcggctgcaggagaggaaggtcgccccggcgagcgccgccgcggcgccgaggtagggcatcgcggccgccgcggaggcgagcgccgcggcggccgggggcgaggcgagcagcggggtcagcgagcgcgagacgtgcgcgagcgaggaggcgagcaggaacgcgaccgagaagagcacgagcagcaggatgaggagatcgagcgtcgccgacgacggcgtgtgcctgcacgccgacgacgacgacgacgacggcggcggcgggtagaccgacggcacgtggtgcccgccgcccgccgaccgggaggacgacgacgggtggggcatcgccgacgcggcggcgaagggggcggcggcgacggcgacggcggcggcggcggcggtgcggttggaggaggggaatggccggagcatgacgcggccggcgccggggggcggtggattaatcgggtggactcacttgggcggatgattaatcgggatccgattccttgcttgccttgtaaatggctttctcccttgcggcgagttggggttttggacgtttcggactttgcctttcccttttcatttttctaatcgagagattaatcctaatgatattgttttattaattaatggcttaatttggaacacacagtttgtgattgggtcgggtggtgttggtggtggatcagtagatcagtttcgtctggattggaacaatgtcttttgttattgatgaatcagatggggtgtgtgtgcgcaaattgacttgctcagggtgatttttttttgtttgttttgtttactcgagaagctcagtgtgttattttaattaaaaactatctaatttaaagtaaaaatattcttattagacgtcattttcttgatttcgaattagaatgtgctaaactgtggttgcaggtacagtgtctcgttggctacaattaacatacatgtaagagcatccgcaatggtaaagtaaagtgttatctataaaacatgtacatctcagcaatagactagattaatagtaaaccatttcaatggtatgtctacatgggtatttatagatctctaatccattgcctcgtttttctctatagactattttcaggttagtagatagatagttttgctctctctcttcatttaatctcttctaagtagaaaaatatgctgacatggatctcttgtagagagcctatagataaccattacaggtgccctaatagtttaagacgcgtgcttatgaaaaaggatggaatagttccacttctcattagaactcagcgagacgaaaagatgtctttgataaaattttcaaatgctctaaaacttttgctatttgttgtatccagacatcccaaagttttggatgcattttgacaaatcgtggtttcatctaaaaactctttcaggccaacgacaatactatttcgttccaccaactacagatgttgatccatcctcgcatcattttgatatcccacttaaatttaatcctttttttctaatgaattcagatttttgcgtgtttggacaaagagaggggagattagtgcctttgcttgaagctttttctaagatcaattcatgctggaagcaccatctgttcagaacttgttgtcgttgtcggcaaaatgacaaatggcataatttgaagcaccaaaaagaaaaaaaaagacgtagaccatatatattgtgtcccctttcacagcctcacagtacagtatccggttctagtttcaagggcaatgtcccgaaagatcatcaaacacttcttgggtatcacaacccttcctcctgaatatattgacaatgtaacctacaacaaactgtacaatcagttctactattcactaccgttgctaacggctttgactaggtccaaatcatctgacactgtaaacttgctttcatgtacagaacggcaacaaaatcttggtgtagccacccaaagaatcgacaaattgtcctcctagttttgaattctgttgagtacagttgggagcaattggttgcaaataaaatgcctgattgtcagcgaggtggtcttggaaaaaagttgttccccggaagaaacctaccaattatacgaatgaaattaagaggcatcctatggagtatggacatatgatccttagtaatatagattttcagctagagaccaaatgagacttactggtaagtcaaaccttgattcaacagcaagttcagtggaactgctccatccagttcattgttctgcaagaatctggatgaagagaaacattttaacagattgtcaaatggtgttctaacaaggtggtgaaacatcatgttggttatgaatccaataagcatatatggacattcaagatcatcttgttgacaatatcatattgcaccaaagaataaagcatgaaactgacataacatggtacaagcataaacctcgatgaaaccacacaaaatgggggcgcag

SEQ ID NO: 20703 - DNA, 1710 bp, Oryza sativa
  unsure (1)..(1710): unsure at all n locations
attaataacattaatttaatgaaaggttctgtattgcagaaggccattaaagggcaagcggcggctgatttcttagcatcacaccacacatatatatctagtaaatagaataattcccagtgtagttctaataattcccagtgtagttcactggatgagcaatggcagagctctttttaaacactccctcctttgcattgagtgtcaacttcactgttttcttcaaacgcacaagaaataacattatgttgaatacagtataattttaagacaattataaacatgctatgcagaagctgtatatcgttctttctctagactgtggtagatcctttttcatttctattaatggaaatggagggctcttgccctttgttaaaaaaaattgcagaagctgtatatactgtattcaaatgaaaaaaaatattgacacaatcaacatagtatgaaattataatgtcaaaccataaacgaaaagctatacaagtcaacttacagttcacgcaaagatgtgatttccccagtgtctgcggtactgttccatttaatttgttgtcctgcaggtgcctacagaaaagagttttttttcctaagtagtggataagtaagcattattcaaatagtttgggaattgactagctaaggaatagcttacagtcttgtgagattcctcaggttgctgagatttggaataggtccagacaagctattgtttgcaaaagatctgttcatggaaatagtgttaattttggcattcactcagtttgatatatatgcagcagaacttacatatcagtcagagcggtgagccttgcaatatcagatgaaagatatccagagaggcccatacttgaaaagttcctggtgtaaaccaatacagaaaattgttaccacaaaggggaaaagaataaaatcaaataatataagcaccatgaggataactcacagtgagatgacacgtggtatttggcctttatcacatgtaactccagtccaagcatatccatgaggcatacatggatctccattccaatcatcaggtatattttgaaggcttctcttaatagcttccagggcatgtgctgcagaaattgtggagtaattaatacgttaatctaataaaaatatgcatatgcagactattcaaaggtggtaatcaagtaaaagcaacttggtgcattaccaaaaaaatcagtcaatagttcaatacagatacttaaggaagcaccattgttgtggtggtggagtcatgggtgcatgaatccacccaccaaggttcaaattctggtgtccacaaatatggatgtatggatcctagttggtgcaaaggctggaaataatacttccattatctaaatataggtgatgctacaacattaacacctcacagagttacaaagtgaaatgtactgtggcccttttttttgcgagtcccatgacctgatatgcagcaacaaatttccataaaacatattttgatgacctgctgctacatatataatgatgatttgttggccacataagtgccaccaaaggcataatacataagttgattatttggttagcaacagcttgtattgnnnnnnnnnnnnnnnnnnnnnagtcatttagtttaacctattacgaaaaaagatacaaatggaagaaaaaatatatgtagcgactgacataccatcccgaggaaatgtgtatcctcctagtgggaaaagt

SEQ ID NO: 20704 - DNA, 715 bp, Oryza sativa
ttcctgcagccctgcgcgcatggatgattatcgatggattaaaattgacggcgcaaagcaaagggaaagaagacggtaaaactagcgctttaatttagaattgatcgaggtgtagggcgatcaaatttgctagtttaattttagtttcgtcgtactattaagaggggtaatgacctagcaaagagatgattttaattgccacattaggtcattgcattttcatttgtgctctctttttcattacacaaattcactgggttcagcctgaccaggggcggtcagaccggccacatagtggcggtctgaccggcggcactttcccggtcagaccggcctcctggaggccgagatgatgctgctcgggatggccgatacagagccgacggagccgtagtcggtcaaaccgagccaatggcggtctgactgagccgaggccggtctgaccggccaccccatgtcgatctgaccggccaggccgatggggccctctgacaggactacaacggctagttttctagccgttgcagagtagcacggtctgaccggccgcatacctccggtcagaccggcagagcacagagttgggggatttcgcccccaacggctagttttggtgggtgggagtataaatactcccccaccagcagcaagggggctctcttggcacccattcaattgcatacactccttgcacctctctcacactcacttgagc

SEQ ID NO: 20705 - DNA, 9441 bp, Oryza sativa
tctgaagtttggtgaaaagttgaatcatggaagcgagtcttttacagagtttggaccacataataaggattaatctatggggctttgaatgatcttcagttaagtagtactggtaagtggacaagtctaccaggacctagagctaagtgtcattgttaatggagtttttgcctcgcaaatgcaggtatgcaaaaccctggagcatactttgccactgtttgccactaccactgatgcactgattcatgctgaaccctgtgtttactttctacggcaactcacttttccgctggtgctcctgctttcccatgcacacgcatttggtaaatcatgagggggagggatttcatcctttgagtagacatccattcattcctcacataaatagtcataataaaataataaaatggaataatatgagatatatcattttacaaacatccaatgttaaattcgacttttacaaattataacaaaaggagtaatctaaactttttttataatggatagaaatatgatctctatatccataagcggatatagaatcaaggaacaatttaaagtgaaactagtatacatacatttacactagtatttgttatttttgttataatttgtaggattcaaatttaaacttgcatgttgtggagtaatatatcttatattaatctatcttatcaatcttttttttaaaaaaatgatgattatttaggtgcatgaaagaaacgaggaaaatgtctcctcgaatgatgaaaatcatgatatcaagcatgtgtgatcaagtgagaaattaaccattgttgatctgattaaccatcaaacactcattgattagcaatttagcaaagctagcacgctacctactgccaagtactgaatcatctcatgccatcctaaggcagaagaggttacatcttacaaccttgcaaattaacctctacaaggatcgatcataatatcatcatatctaatcatctcatcatgccatcctaaggctgagccgctgctgcagccatggcgctgccgccgccgccgccgccgtcgacccgtcatgtagcacatcgaatgccattgctctcgggcacggcggcggctgccggagcgagccgtcggagtcggtcgacgacgacgtcgacgtcgatgtcgccgtcgtgaggctcccgcccgagcagttggacgtgaaggggctactctcccgccgcttgttgttcctcctgccggcggcgcctccgccgccgacggccagtgtcagcgctagctcgtcttccctggacgacgccggcggcggcggcagcggcgtcgcttggccgccggcgtcggccacgacgatgtactcgtcggcggggagctgcaggttgagcgcccggcggcgggtgtgctgcttgcgccgctgccgccgccggcaggttagctccggcggcgacctgttgaggtcgctcatcagctgcttctggacgcggtacagccggtgcagctcatacaccttcagaggcatcgagacgaaaagaattttgttggttttgtttggtagaattttagagttttttctttttgttctttgcagtgatgatgattgtgatctttggtttgcgtttgatcgatatatatctaacctgctgcttgaaagtctcttcatgcttgagcatggccatcttcatgacctccatgtcgcactgcctcacaagcttctccatctgcaccatcatcttgagcttcactttgttcttgttatgttcttgtccttgactgagatcagcaagctgatggtactaccctgcaaaaaaaataaaaaaagaataaaaaaacagatgcaaaatgcaggcttagaaaggagctagctagcttttcagttgctgaaacacatgtactcgaactctgagaagaatcaatagatagatcataataacaagtgcaaattaatcagttgcaagatgctctgatgctggtgtgtatatctcaatgcataaaaaggtgaagttgtgcagttttcagaacacacactgaagcaaccacaaagatcacaacacacaacagaaagagctgtgcccccctgaacctaccgccctattcagcaagaaagcatccaaatatatgctcttgtcccttcccttgtttctcctcttgtcttcgtctctttaacctactagattcctcaggggatttacactggcaatgagacaaagaaacaaaaggggagagagagcaaagcaaagatgttgccactgctgaaactgagaacttgagaagggctttggttgggggtatgggggtttataaacattgcctctagagaagtgtggtaatgagaatgcaaagaaaaaaaaatgcaagagatgtgttgcaatgcaatggagtgcaatgatggctcaagagaacatctcacttggcaccttttctgcatgccaaacaaaggggatggcctatagccaatggcaatttgggggaccttttgggggtgcatcctttgcatgagatgctcctcccagagcagacaagttggcagggagcctaggtttaggccctgacccacacccacagggtatggcccgtacagtttcctctcttctgtgtggccatgctagttctccctagtagctgcagtgtacctcactgacagtaccatgtacgtgtacatgtgcactcttccaggtcccatgatcgtcttgctgcatgatttgacgagactccttttcaaccatgaaattttgggggatttccgcgagaggcaatattcctgtaaaaagagaagatcatataaatatggatctgattggtttactaattaatcctctttctcaaacctgatcattactctaattattgagggcctaaaacttgaccactcagagcgcgcagctgtattctttcaaacgggttgggaatcctttcttctccttgcaaaacaaaacaatagattagcacataattactcactccatcctaaaatatagcaacttttaactatgaatttagacacacagttgtccagatccataactaaaaatacttatattttggaacggatggagtaattaagtagtagctaaaaaattgaaaaatgaaacaatatgatttatacaagaattttctaaaaaaaattgaaaaaaatgcatcatttagcaattcagaaaacgtgtgtgtataaaaataaggaagggagagaaaagaacacaccacccgtgcatattattgatttccaaacgaattcattggcgcaagttctgatcaaattcaccagagaaattaatttcttcctcaagtcctcaggatcacctacagtgcatatatactccatatacttaagtatacttaattagaagtactgagtgctgatataacttctagattgctctttttcttctctctctactatgacgagatctacaatgatcacatgctttgaccgtttttatatatgacatgtatcatatatagcgaggctggaccgttaagtttggaccatgcatgcgtcaaactgatcaatatgcatgtatgcacccccacacgtaaacagtaggcagtgtcagcactgagaaatccaccgactaaatcattgtcacgtacacacagtacagtggcacacagctgctgcttgatggtcagatttacggtatgagttggtcagaattcagaagctcgtcagtgtaccatccccttccgagttttctcccttatcaaacagatgccaatttgtattgcgcgtggtccaatttcaaaaatctggagtcgtttggttatatatgtgcaaaagattgcaaggatttgatacgtgaaaatgatatcggtagataaatctgtcatgaaaacgccttattgtatatataattaaataaataggacgtattttacctctgtttttgttagcatgctgtttacaatgttaaacattatgtattttgtgtagaatttttctatatagaggttgttttaaaataccaaataaatccattttgaaagtttgaaataagtaaaatcaatcaatcgtcttttaatttaatggtttctcgttttaggtgcctgtccgtaggccttgtttagttcgcgaaaaaaaaaataggtatcacatttgatgtttgatcagatgtcggaaggggttttcgaatatgaatgaaaaaaataatttcataactcgcctggaagctacgagacgaatcttttgagcctaattaagccgtcattagcacatgtgggttactgtagcacttatggctaattatgaactaattagactcaaaaaatctgtctcacgattttcatgcaaactgtgcaattagtttttatttttaactaggaaggtggcccacgcgatgcgcgggcatccgtactattgtaacgtaatattatagtttctttagaaattatatcttataaggacaaactatatatcgggcatatctgaaaaccattgattgacttagaagatagatcaaggtcatgtgacttttgaattgacttttggaccgagtgagtaaatatcatgtataccatttgaacacataccgtacaatattgctacaagtaaaaaatgcgatagcaaggaactcaaagttattatgatcgaatcgtctcatgaagatgcatgatttagtgacaaccaaattaagatagattaacggttggattgtttttctcttcgtagaagttgaaatttttcatattcttttccaaagttttaaagaatttttgttaggacacaaattgcaaaattgcttggttgggtagtgcaaaatatcagcaattgtttgaagctattgttttttctttttcgcatgtttgatagttttcttcgaaacacctaagctatctcaggtacgatgctccatcatacatgcagaagataaatgtgcacacgtgcgaggtctttagaagtttttttttatttttacaaaagatagatatgacagtcttgttaataggtccttaataggtctagttaataggtccattagtttaagtgaaaaccgacatcaaaatatttttattaaaaatagtataaaatattaggttcattaattaatgtaaagaaatagttaatatagaccgtaaattggtaatttactggtacataatataattacgtaacatctatattaaacaatgtgtttttaaaaatttgatataaaataattgtttgatataataggtactaccttcatcccagaatataagcatttttagagttggacacggttattagtgaaaggttgtgattggttgggaaagaatgttggtggagaagtagttatattttgagataaatcttgagggctaaaagttgttatattttgggacgaagggagtacatcggtttaagtaaagaatattatattgttaatataaagggtaaaattatatagttatataaaatttattttcaaacattgtggagctaatttagacatatatatgatgatatatataatctatgtttataaagttataatttcttaaaatttattttcactaataataattgcaattttgtctatacatggagaagagaaggaagaagaaggaaacaaatgtacgtttttaatgatataagtaatttatatttttatgacttttgccactttatctttttaaatgtatgttacagttgtatatgtattttcggtttttttacaagtcatacgtacatacctttctctcgtcggtgcgctaagggagattctgagatagattattaataggatttaatctaatggtccgagataacggatccatcaatttaaataaaaattgatggctagatattttagtttttttctcacattttctagaatttgttttctaatttattagagtgtatttttacaacttaaaatatagttaatatgaatattgattttctatctcatctagccaaaaagggaaaaaaagaggaaataacaaagagggtacgtacatatgtacgtgcacatccatgaagagatagattctttttccagatgaacgtaatttcaaaatcttaagatagatctatgttaactaaataatagaagaagttagcttaaaatgaagagttggagggtggccagagggagagagtacgtactcgcggatgtatagtggagggtgaggctaccggatttttgagtgtcagagagatctaatggttatccccgcaaaaaaaatctaatggttaaaattaatggattaaccaatttaatagaaaattatagattttttctaatttattataaagccatgtgacaacttaatttggagcgtttttagagcatttacattatacatgccgttaggagtctcacgtgacgacttgagagcatctataggaagcttagatgttagtggccttctaatctaggccattcattttctttaaaatccatgcagttttttaaaggagggtaacatatgtacaccggatattctttttggctttttttagtacttatgtatttatatgtacgtgggatttttttttgggaggaattattttataatagatgtgatctaatgctataaaataactgaaaatcgaagattggaatttataaaatttcctattataattacataatttttatacgaagacgaatgatctaatatacacccaaatagtgtcaatagcatcaaaaagtagaggttgttgggtaaaaatgggttaaatgggggagtaaaagaaagatgggcacgtacctttcctgtgtacaaatgggatgaagcagttgtacatacatgcacgcaggtgagatgagagggagggactaactcttgttttaacctaatctaatgttctaaaatatggacccgccaatttacatctcacgtagtaaaaaaaattattcggtgaataatggagtactttttggctttcttcaggtgaatagtactatatatttatacatacataggatattctttttgatttggaagatattttttttatagatataatgtaatgtataaaataacttgtccatctgatttaagtgaaaatcgaggatcaaatattttattttattctcagaatttcctattataactatacaatttttatactaaaataaatgatcaaatatacgctcaaatgtcaatggcataattaagaatgaggtgatataaaaatattgtagggtattctagataaaattaaataaaaagtctaagggtgggggagtaaaaaaggtggggcacatatattacccgcgtgcaatcggtcaggatgagggaggcgtacgtttatctagataaaaacttgttttttaatctaatcaaatctaatggtctgaaataatggacccacctttttaagtgaaaatcaagggctagatatttctcatatattaaaacgccacgtggcaatctaggagcgtttttagaaatcccatgtgacggcttgagagtgtttgtaggaagtttaatggacttttagtatataatagaaatagatagatagatgttctatgcatatgtctaaagattcgatgtgatgtttttaaggaaaaaaatttagcaactaaaccaggccttaatcttcggtcgccatgttgtcctacggggcctatagtgtcaactgtcgtcaatgacaagagaaaaaacgaatagattgagtgagaaaaagatgcacgagatgagaggaacaaaatgcgtttgtcagtttccactgaaaacaagcaaaggcgtacacacacgttggggcgtgtgtgtggatgcatgcatatatagtcagcaagtagtagcatgatccaacgagcgtggtgatgagtattgctgacaggccaccaggggcgaggctttttagggcagagaaaactctattgtttggaggaaaaccaagcaatcaaagagcatgagctgagctagtagcaaatgatgtgcatatccctttgagagcaagcaagcatctgtatgtgttccccttgttggcccttgcatattccaaagatcattgctcccatcaaaccatcatattctacccctgaccctgatgtgatgatggcatcgccacatgcagctagccaggctcatgtttaactcttggagagtgcttgtatatattctttgttcgagtgatggatgcaacagcgaggagagcaacggaaagagatgtacagtgggcgatgcatgtgagctcgaacataacacatcatgccaaggaaatgaaaagagaaaagcgcgggtttggtttttggatgggaacgggccgggagtagcatggccgggtagacgaatgatcgattgagaggggaacaagggacagtggcgcacgcgctgccggcgacgggaggcgcagcccagccgtacgagggggtggtggggtacgttggcccgcgccacgctcgcatcgatcgcatgggaacaccggccgtttccctctcctttctgggctcccactttcggtccaacacgtacagatgcatggcgcaacgccaataacatgccccgtccgcgcgcacatcaacttgccggccggcctccctctcgtggccacacatcgatctctcgcgggggcattcgcggtgaaaaccatcggcagcgcggaggaagaggatagggagtttagtgggcattttcagtgctgcgctagcatcggcaaggtggacgcgtaggggagtgtcgactgttggattaatcagtcttgtgctcagcatttttattttctgttagcttgcatatgcagctgagtcacggtggcgaggccagtcggtcagtacatggcaaactgcaagaagtgtttcctgccgagaggataggtcctgaggagttcttttttttttcaagaacagtcagactattgccgacgtttatataaagaataagttttcttaattttttatataaagaataagttttctcattttaaggagaaaacgataccaaatcttacggtacatagttaattaagagaaactatacgaaaaccacaactacagcatcaaacagaacatgataaacctaaactacaaggctatgaaaactgaaaagccatgttcaacaaatgctattcaccacaagccttgcaaaagaaagttgcaagctaaaagatcaagcaaggctcctcgcataggcagatacgtaacgttattgtcatcacatcatcatgggcgataggaaaggcttgctgatcaacaagcttgctacccacactgtagcaaaaactcaaatgtcctgagaagtggaaccttgcatggcatatacacgttgtggcgtaagactagcttgccatggctggtagttaggcatgtgactagtttacttgcatggtaattaacttgagtgattggctaggtgtaattccttgcatgtatcttatcgatctctatataaatgaaaaccttctagaaccagtgtgtggcttgtgtcaacaaataatatttgtgttattgtgttctttcgtgtgtgccaccacacacggaaaaaaaaggaattgctacatatctgtcgccaccagattttctttttttaaaaaaa

SEQ ID NO: 20706 - DNA, 5953 bp, Oryza sativa
ccaaagttacatatgtaattttaattttaatgtatttacactataagtttcaaaatctatctattatatctttaaagtaatagaaaaaggagcctccacgttcgctctcatggcctagaaattctcacattaatcctaaaaataagaaaaaagaaaaatagaactagattagaattagttaaaaactgaagaaaaaaaaggcatattaagaaactcgaatcggataatcggtaaaaacaaaaacaacctaatcatactacccgaaacggaatcggacaatcggtctaaaacaaaaaaaaaggaaaacttaatctactggaaacggaatgtacaattggtcaaaaacaaaaaaaaagaaaagaaaaacctaatcatactatacactggaaacggaaaatattttaggaatacgcgtgtttacatcacttttagaaacattgaaatacaaaacaatcctaatcaaactctgccgtttccgaattgtattagtattgtcatgccaataaatacataaccaagccaaaaattagcaagccaaaaatacataaccacgttcgttgtggaggctagaaattcccacattaatcggagaaaaagaaaagaagagtctaaatagaaatacaatcaaaaatagctgaaattcggaattaaaaatatgcaatattgaaagagaagtccatataggaacccaatacatgattaattaaaattcggaataaaaataaaataaatttcgaaattagaaaaagaaaaaaaaagaggagttcgagtaggaatacaatttaaaaataactaaaattcaaaattaaaaagaaataagagtccatataagaatccaatacaagattaattaaaattcagaatgaaaatttaaaaaaaaatcaaaattataaaaaaagaaaataatagttcaaggaggaatacaatttaaaattaacttaaattcgaaattaaatataagcagtattgaaaataagagtacatataacaacctaatagtatattaattaaaattcgaaataagaaataaaataaaatccgaaattaggcaaattaaaaagagagttaaagtaggaatacaattttcaaacaactgaaattgaaaataagaaataaaaatatcaaaagaacacaatacgaaaaaataaaataaattctgaaattagaaaaagaaaaatactaggaataccatttataaataagtaaaattggtggtaaaaaatcaagactattgaaagaaaatatcatctaaaacacatggcgagattaattaaataacatgcctataaaggagtagagtggtggcggttgatatgacatataaaaactgttaataaaacaccaaatagaatcctaataacgattgaaatgaaggacgacgggtaggccgtgaagcaatcgatcaaggcggttgccgggacttctagaaagtaaaaaaaaaaaccaatgctaatcatattcatttttaaaatctcaatgagaataaaaaggagaagtagtgggcggggtgtataggagaaccgccgacggttggcgagacttctagaaaataaaaaatgaattccaacgatagttatgttcgatttttagaatcccaatgacaataaagagtaggcggcggatgggccatagaggagtatagtgacatcgtttaacgggacttctaaaaaattataaaaaaaatgaaaccaacaaagactataaagtctaaaaactacgaggtccaatttttataggtttggaacttctaaaaagttaaaaaaaacacaatgataatcatgttcgattttaaaatcttaataacgataaagaagggaggtagcgggcgtgccataaaggaaaacaatggcaaagccgctgacggtttagcgggactttagaaattaaaaaataaacccgaacaataattatgttcgatttttaaaatcccaatgataatatagagaaaaaaaagttgacggcccgtagaggagtataatgacaacatttgatgggacttctagaaattataaaaactataagatctgatttttaaaggtttcaaggaaatgaatagaaatagtggtagatcaagcaagcaaataaagaaggatatgacagaagtaaggggtagtagctggtgtgacttttaaaaactatataattagaaatacgggatggtaagatttggtctttcaaagtcttaagacaacgagatagctatttaagaaattttaagtaaaattatactgaaaaatatatgattttgtttgggtgctagccgcgcaattgcgcgggccacccaactagttatatatgtaagtaccaaaattacatatgtaagttaattaatgtatgtagatgtaaattgcttggttttctttttcttctagcatcattgacgtgattaacgtccggtgactaacgtgcgttgatatgttttcatttgaaccgcacttggtggtggcttgaaaatccgactgattttctacgaaaaatctgtcgaatgatttttagacagcaaaaaaaaaaactagagtgtttgtgataaacaccaaggagcaggagagattcctaacatcgacggcgcgtgtgtgggtgcatcaggaaggatgggaggaagatagatagtgattaggtttataatacttggagcaatagccgttcaaaaatgactaagatttagtcaaagttgggggaagagttataccttattttacagttgagagatgcaattctactgaggaaaagaggtgagggaagaaaaataaacttattccggtccaagcacagcagcttctcaacttctccacgttttcttgatgtatgcggaagcccatcccactgatctggcccaactggattgcagccaaaatattggttccctttcatttctccttgaataagtccacttgacatccctcaactttatgtcgagtttgtatgacgcccctaatccccaataccagaaatatcgacccctcaagtgtttaaaaccgtgcaaaataaatctcttgacagtatagatcatattttcccggtttttgctggcgtggcatatgtcggggctcatttgttagtgacccttatctcttcacctatctctctcccttcccctatgttcccatctcaccagggcagcggccggtggtggactaaggagcaacagccggcggtagacggtgaggagcggcaggttggcagccgatggggaggacgacacgaacgacgagcggcgacggcatcttggtgatgcgctgcacgatcccgtagtacatgtggtaggtgttgttggggttcaccaccatcccagggaggaacagcagtagctccggtgtcctcggcctctccaacgtcacgattctgccgctggtaagcccattcttctaggctggtttggggagagggggggtgttcttggcaatgaaatcgttgaggctgacctcgccggcagggaatatgttggtgagccccatcatctccttctcgaatgtgtccagatccacaccctccacagtcggcgcctctgtgggcttatcccaagaaatggtggtcgtagtggatggtggcgcggcaggagaatcgaaggtgagctccttgcggatgccgacctcgtcgttgcaaagttcgcaaccaacgacgacgtcgggaatgcggaaggacaccgaggaggttggcgagggaggggtaggtaaacgatgtggtgaggaggacgtgccatcctcctcaccgtccgccgccggtctctagggcctgctctgcctcgagggctatccagtgattgcaagttcggttctatatttcggaccgcaccggcaaatcaatatatcgaccgaaattttcggattttatcaaatgtttgttgaatttggtcaaagtttatttaaatccagtcaaaatatgtagaaagttcaatccgaaaagtgccgaaaatcacgaaattttgtaaattttggtcctaccgaaattgaaaatgcaaaccctggggctatccgccgctacgtgtcggggccaccgagtcaacgctccgttcgaggccgcgccgtcactctgccacgaggctagaccgccgcacatgttggggtcacgcccagaaatttagcccaaattttcagactattttgtgtattaaatctctgtccaggaccagccagggtacacaaaacgacaagtaatatacagttccaaacgtaaataaagcgtaaaatacttacagaaaaggcacttagtcctcacaccgaaacaaaagcagcagcagcgaaaaaggcaatcctagcggggcttcagctccactccacaggcaaaactcaactggggtctgagccttggtcctctaactccatcttcagctcagaagcactacacttctgaaaagggggaataatagcaagactgagtacaaccaccgtactcagcaagccacaccaacgatgcagacgtgcaaggggatacaaggagggtttgtggctatttgcatgaaggcagttgtaaaacactttattgagcaaaacagtaaaactgttgagtaattaaagtaatattgaatctccactgatcaacgctaccccacgttgaacaggcccaaccaacccacctgaactacagtgtattgggtcgatttattaagatgggactaatcacggtgaatctggtcgaccgcccataaccgcgggcacggctattcgaatagttttactctgatcagaggtgtacaactgtacccacaagacacagccccacgacacgtttccgtgcgccgacatgccaccacgacataccggaaagaggccgtgacaggacccttcgcataaccccctctaaccaagcacaccacacctcaggtttcacccccactcctcgcaaggcagcgggcagtcccctctcgtgcctaggtgaatccggaagccgcataggccgtcgcagggcccatccaaactccatcacgcccacccttgcctggatgcgttggctagaggaaagctacactacaagcccagccgttgcccacgctggcttgtggtaagtacgataagttcttccagggcatcccgcaaaccggtccttaactgccatgggtgcgaccagcaaaaccatgcacccacagcccaccattcagtcgcattttagttggataattacgaccatgaagcatggccagatgtctcgagcacgcggctcaatctgatactaaaagggtctaatactgtaattatcccatcaactgagctagtggtaattaagcatggctaagcatatagttctagctaagtcacataagtaacatgagctagtcgattcattacccaaagttgacaaagaacagatatcaagtaaacatggcacaagcgagcagataggtaataccctgaccccatgtaattagcaaaatatgcatatttatttgcaaacagtaaaacatttgtaaattgggatcaacatgctcaaggggaatgtgtgacttgccttgcttcttcactttgatcttccgaactcttttcctcgcgaccgcggtcttccgaaacgacggaaactacacgctggcacgcaaaacgaggaaaaactctaataaaaaccaaggaaacagtacataaaaactaaacaaacatgtagagctcaattttagatgaattttgcaagttgaatggctcaattcggagttcgaatgaattagatatgaattttagaagttttgagccatttaaatgaatttctagaattatcatcgaattatgacgcaattattatttatttttacaaaggaaatggtcctcgctgacgtcagcaaggggcggccggcgccgacacgcgggccccacacatcagcgagtcaaagggggagggcgcacggtggacatggtccagacgtgcctcgggtgcgcgtccaccacgtggacggcccagatcggccaaggccgatcggacggctggggacagccgggcggcgcggccctggccagcgctcacacaaagctgg

SEQ ID NO: 20707 - DNA, 11577 bp, Oryza sativa
ggcgctgggatgcagcgaatgcggtggaggcggtggcgcggcgtgaagtagatggggatggcggcaagaggcggccggttggcggcagttagtggtggggctcgggtttgcggcgggaatggtgcttcgggggtggatttgaggagtgggccggtggccgggatgcggcacggagcggcggcgctgtgggaggcagccgcacgaccgggcgaggtcggtatcgccggcggggagcggctggagacggagggaagagcggcggctcggttttcacggtggggtggtatttcggtggtggtttgggggaaaaaggagtggaggacggggtagagcttggcagggcgttgccgacggcgcaagcggcgaggtgcggcgacgactaacgcggcggcagcggccggctgaaggcggtgtgtggcggtagtggctcggcctcgcgatgggaaggtggttccggcggtggaggagggagatggagtggatgccggggtgcggcacgacgcggcggagctgtcggtgcaagcggcgcggcgcggcggcggctacagcgacggcggcgtgcagccggagcttgccggaaagcggcggagcgcgggagcaacgtggggagagcggtagggagtgcagcgggttcgggaaaattggggaaatgggaaaggagaccacggggatcgtttttattggctcggggcggtgggatcatggccgcggagggcggaatcgaccggcaacggtcttcggagtgggctccggcgacgtgggcgaagtggggtggttcggcgccggttttggagggggaaagtgggggaggagagtggaggaggtggggcgacgcggtcccgcggtcggggcgagcgcgcgggtggaggaggaggcggaatcggcggcgacgtggggaggccgtggcggcggtttcggctgagggagccggaggttagggatggccctgacaggtgggacccacctgtcggtggctcggggggaaggagagaggaggagacggttgggggaggccaagtagacttgcgcgaaggagggggcaagccgggccgatggcccaaagagaagggaggaggggaaaaggagggcggccgggcccaagaggatggagggggagaagatcttgggccgaaagcggcccaaagacaaagaggggaaattttatttgttttctttttattctaattgatgcaatgatctttgtgctattaaaactatttctcgagctccgaaaattcacggaaaattccggagagtacattagggcacaaagaatattacaaaatattcccggccaatgatttttaaaggaaaatttcaaattctcccattatttcacttgattaaattgatttatcttttatttaatttctagaaaatgcattatttaatgatttttaaacccgaacgaaaatcggggcgttacagtcacccagccggcgcgccgtcgctccgccttgaggcgggctgccaccgctccgtccctagggatggcaacagggcggggcggggacgggttggataagaactcccccgccgccactccctgcatttgccccctgccctcggccccgcagggacatccgggtgaaaatcgttcgccggccctagcctcgtaggggacccggcgggtgagcgggcccccgtatcacccggggtgcacaaggctgccaatgttgaacggcaactcagaaagaatgaaaagatggcatgaggtgttactagtccagtcagtaatcagtaatcaatggatcacaaattcacaattagtagtaatatgcattctaggtaggggacggctaatggacgcctagcgatcaccggcccacccctccccctatatgctaccttctctctccctttctcctccccttcttctcttcttactacagtacaccatataattttaaaaaataataaaacaaagttggaaaaatttatgtatagaaatacaaatactatacataaaaaaattgaattcaaattcaaatttaaaatgggtatgtaaacttttgatttataaactttagatctataaactaatatttgaattcaaattcaaatttgaacgggtgtaaacttttgacttataaactttgggtctataaactaatatttgaattcaaattcaaatttgaatgggtatgtaaacttttgacttataaactttgggtctataaactaatatttgaattcaaattcaaatttgaaacgggtatgtaaacttttgacttataaactttgggtctataaactttaggtgtataaactttagatgtatagaaatattatatataaaaaatatttgaattcaaatttaaatttgaatcggatatataaacttttgacttataaactttggatctctaaactttagatatgtaaatttgaggtgtataaactttagatgcataaatttactaaaataggaaagtattacggtaccaaaaaaggaaaccaggtggaggaagtgggattcggatccaatcgccctgggcgatcgctcgcccagtagcaattcccttctaggtagccggatgcccaaatacacataaacacaagtactaatgtagttaagtggtatgtatgataaatacacaactaccaactcacaagcaaagcagcagccagccaattagcagtatactagtagctttgctcgaggttgaggagctggtcgcaggagtcaagcttagctcgaggttgaggagctggccacaggagtcaagcacttggacagtcggatggcagacctgcaacgcgcggcgatggcgctccactccggctcgatgttgcgggctccggcgctctggtcgccagcatcgcgctccgcttcaccgccacgccgccgtcgccgccgcacgcaatgggcgcctgggagctaccaaactgatttagggttatcgattcttcagattttcttttaggaataagttcactttaggtccctctatttgtcgtccagtccgattttcgtcccttgaccgtaaaaccgggtatgacccatccccaacttacgaaaaccggttaaacgtggtccctcggcggttttgaaggcggttttggctgacgtggcgcctacgtggcttgtttgactaggtcttcatcccaagtggcattgacgtggcgcttacgtggcaattatatctcggaaaaataataaaaaatgtggccccacatgtcatctgtaaaaaaataattttaaaatagtggggtccatgtgggccccacatgtcagccacactcctctcttcttccctctcccttctctctcttcttcccttttccctctctctctccccttcccgggcagcggacggcgtgggtgggaggcggagcaggcgagctccggcggtggcggagggcgtggtcggcaccgccccctgaccggagcaccaccggtccgcgtgaaggcagatctggggaggtccggcagccagcgctacggcagaagctcatctagatgctactcgaccccaacccgggcacccgcatcaccgtccctggccttctcgagacgccgtggttccgaaagacagcgcccgtcccgcgccccatcatcgccgaccccgtgccgacgccggtacacgcatggcaatgccgcccgaggtctgcacgcggttccacctaatctccctgtctgagggcttcgacctgtcgtcgctgttcgagcatgaccccgccgtgtcgccagggcgagccacggcgcgcgcgggcagcacgcggttcgcgacacgggaggcggcaagcggcgtggtcacgcagctagaggcgctcgcgacgggcggcgccacgcccacgcgcgtggcgaggagcggcgcgcgcggggtgcggctcgccatggcggccgatcgacgtcttcagcgtggcaccgtcgttgctcgtggtggtcctggtggacgtcaagaaggatggcggtgacactatggagtactggtcgttctgcagcgaagagctccggccggagctcaaggacatcgtctggtcgccggtggcgacctgacgacacggcgggacgtcgctgctgccattattgcacgtcatcgaatcgtatccgttgctatccaatggggtgcattattgtttggtgccggggtgatgtctggctcgctcgtttgtccgtagcaactcgaagtcaatggctgctgtagcctgctagtgttgctggctagagtagcttgctgccgcggatgtagtagtaggtcggtatcaagatcatgggccttttcatctccaaacggcgagggcggggacacggcggtggaggcggcgaagcaggccatcgccaccgggcacgtggaggccaagagcgcggcgaacggcgtaggcctcaccaccttggagaagggcggcggatggctaggtgagcggcgcgcaagagagagatggctgccgccaccccacacgcctcgtgcgccgtcgcccgccgccggccatgcgctgtccatctccgcgccgcccgccgctgccgcggtccgccgccgcctgccgtgttggacgccgtctggcgagaggagggaggaagatggggagagccggagagaggaggaagaagaggattggatttggtcatttgagaatgacatgtggggcccacgtgggccccaccatatttatttttagctgacatgtgggacccaccatttttaaattattttttttctatggctgacatgtgggtccacgatttttattatttttccaatatataattgccacgtcaacgccacatcaatgccacgtgggacggagaactagtcaaacaagacacatagacgccacgtcagccaaaaccaccttcaaaaccgctgaaggacctcgtttgcccggttttcggaagttgggggacgggtcgcacccggttttgtggtcaagggatgaaatagagggacccaaagtgaacttattcctttcttttatactatgctgggctgttgggatgttgggctattgggctgacctttgtgggcctatttcgcacaaattttaacgactgggctacataccctggggccccgcaggtacccgcgggtgggaatagccacctgcccccgcccccgcataattccgtgtcacgatcagtcagcgagattcgagattcagacagatattggaagcaggaatagaggaagaagacgagttcagggaagaatttgatagcaggaagagagaagatttgaattgagttgagatatttttctattacaagccatctctctctccactgccgacctttatagcacaacactattaggtctctatcactgactctggccccagccgatagctactggacccacactccacccatatatctcgtgttgggcttgggttgccttacggtgcgcttcatggacctcaactgttgaaggagtagaaatagactccgtgacattctccccccgttgagatgaagcttgtccccaagcttctgaagttggaaagcgtcgacgcatttcttggaggttctcccaagtaatggcgcgaggttcctctccggaccacagaatttgaacttgaaccaccatcttggagcccttgcgaatgagacggtgatccaaaacctgaagaggaacagatgcatgctctgcactggaatccaagacgggcaaagtaggttgcacagactcagttggcgctaaagcatgcttgagctaagaaacgtgtactactggatggatcaaactgcttgatgcaagagctaagtgataagccacagtgccatctttggccaagatctgaaaagggccatagaatctaaaagatagctttcggttggcacgagtaacaactgattgctgcacataaggttgcaatttgagatatgcccaatcaccaatctcaaaagaccgctccgaacgtttcagatcagcctgagctttcatgcgaatctgtgaccgcaacagatgttctttgataagagtttgcatcttcatacgatcctgtagccaatccgataattcggacgatgtgcaagcagcgtcaatagatagtccaaaataccgtagcttgtgtccatatagaacctcgaatggtgaagtgcccaaagaagaatgaaacaatgtattgtaccaatattctgctaatgccaaccaacgactccattgacgggggcaagcgtggacaaaacagcgaagaaaagtttccaagcactgattcacgcgttccatttggccgttggtctgaggatgataagaagagatcatacgcaattgtgttccggccaattggaacaaagaagtccacaaggtactagtaaaaatgcgatcccgatcagaaatcaaggactgaggcatgccgtgcagacgatgaatgtgttgcatatactattctgccacttccaaagctgtgaagggatgagataaagggacaaaatgggcatatttggagaatttatccaccaccacaagaatgcaattgaaagaaacatagcgggacaagcctttgatgaaatccaatgaaactatttgccaagcgtgattaggaactggcaatggttgtaacataccagggtacttaacgtgttccgatttggccttctgacaaatttcacaggcttgcacaaattcaaccacagaatgacgtaagcctggccaagcaaacatttgcttaatccgttgacaagtgatagcagtgcctgaatggcccccaatagcagcagtatgaaggttggccaaaatcttctgttgaaggctgacattgttcccaatccacattcgctaatcataacacaacactccatttttcaatgtataacgaggcacagaagcaccagcaatacacagcgtctgaactttactagcagcatctggatcgtgctgatatcctgccaccacctcctgaatccaatctagaacacaagtagacaaggctgatagttcaacaatcgcattctcaggatagcgagacagagcatcaaccactctgttatttgtccctttttttgtatatgatcttgtaactcaaacccaacaacttagtcagggccttatgttgccaaggtgtggataaacgttgatcacggagaaaagccaaactgcgatgatcagttttaatcaaaaactcatcatgctgtaagtaaggtcgccatttttccactgccaacataatagcaagactttctttctcatatgtcgaaagaccctgatggcgcggacccaatgcacgactgagaaacgcaatgggatgtccattctgcataagtattgcgccaatacctttgtcagaagcatctgtttccaccacaaaaacttatgtaaaatctaacattgccaaaactggtgtagagacaagagcatgtttcaaagcctgaaacatagcttctttatcggaagtccaaacgaaaacttgcccttttcgcaacagattagtgagtggtttgctgaggatgccaaaatgtcgaacaaatttgcggtagtagcccgctaagcccaagaaactacataaatccttgacagaagttggagaaggccaattgcgaacggcatgaatcttatcctaatcagtagaaacaccattagggctaatgatgtgtcccagatatgcgagtcgttgctgagcgaaagaacacttgctcttcttgactttaagttgatgacgatccaatatctgaaagacctgttgcaaatgctgaacatgttcctgaagagttctgctataaatgagaatgtcatcgacgaaaaccaacacacaacgtctcagcaaggaagatagaatactgttcataactccctaaaaagtagccggggcactggtgaggccaaaaggaatgactctgaactcaaaatggccactatgagtcttgaatgctgttttatgttcatcatcaggatgcatacgaatctggtgatagccggcacgaaggtccaatttggtaaaccattgagcacctgctagttcatccaatagttcatcgatgattggtagtggatacttattcttaatagtaatagcattcaagtgacgatagtcacacaaaaacgctacgacccatccttcttcttgactaaaagcactggagaagagaatggactggcactaggccgaattattcccttagtgagaatatcctgaacttgagattcaatctcatccttctgagcaggtgtgtacctatatggtcgcacattcactggttgagcaccatgaatcaagggaatggtgtgatcatatggtcgcgaaggaggcaaaccagtaggcttatcgaagacagttgcataatcttgcaataccttctggaccacttcaggaatttgctcgactgtaactggtgttgacaattcacacagttgcactagatgggccactgcatgacgatctccaaatgcttgcatctgtctaggagtggctaaagcacaagtatttactgctggtttgattccacacagagtgatggactgcctgtgagcactgatagttagaactctgttacaccaatcaactgtcattggactatgggtagctaaccaatcaatgcctaagatcatatcaaaactggtcaagggaagcacacgcaagtcagtgcgaaaagtgtatccctgcgtgaaccattcacattgagtcacaatcgaatcacagtgtaagacaccaccactagccacctgcactttcagtggagttggaagagaatgcagtcctgataatccagtagccaatttgctactaatgaagctgaccgaactacccgaatcgaccaaaatcagcacctcaaaaccttgaacatagcccagaattcgcatagttcccacagattccaccccttgtaatgcaagtaaagagacaaccattaattctgaccgtgcagggctctcgacatctaagatatcagctgaaacactgtcctggggatcctgcaaatgggcaaacacctcctgaaccgcatgcagttgcacagaattagcacatttatgattgtgagaccatttctttgcacagatataacacaatccttgagcattgcggtaagcacgaagagtagccattttgtcaggggatggtacagccttgactccatcagatttagcttcaatactaccagatggtcggggtggtggcaacggcaaaggataagctcttttgacctgagctcgagtaggtgcaccaccatcataacgcttgaaatcagtcggactcttagccatctcctcttcttgtaatgaagcaagaacaaaagcagtctcgaggtcgcgaggccgatgaagtataactgcaccccgaatctcttttcttaacccattggtgaacttatgagtgaaatatctatcattagccgctaggtcataaaccaagagctgattggctaattcatcaaatttctcataatactcctgaactgtgcctaactgctttatggtgtccaattgccccaaaacccaatcatgcagtttatgtcaaatttacacgctactgcaccacaaaactctgcccaccctagataacaaacatgagcacgagacgaatgtaaccaggaagctgctctacctcgaaaataaatggtggcaattcgtacccacggatttggagatgtatcgcaaacatcaaaataatgctcgcatttcatacgccaatcctgtgggtccgaaccatcaaaaatcggaaaatccaacttaggcattcgatgattgaaggacttttcccaaaattgcgtcccaaaatttccctcaccactctcccaattcccagcaaaattaagatgagagggggtggcatcgtacgtactcttgatcggagtcaggaccagggatgtgaccacccccgatgcccttccccggaaattttgtggtgcgcggtggccattggcccacttctctgctcctcccgctgcagtcgtctccttcgtcggcgaagcgggcgtgggaagcagcgacgccttcctttcctcatccgtcaacggaactcgaggggaagatgccgccgtagaagtttgcaccgccttgccgaggagatcaacttgctgacgaagttcgccgacctcctctcgcagctcctgcacggcctcctccacttgtggcctccagttgttcatgcctagatccagcttgacgatggcagcttgtgtctcaacctgagcccgattcaacactacgagcgactcctggatccggacaagcaccttgccgaaatcgatggtttgctttccatcgcctccacctgcagctgcagccgagatgtgtagcgtggcttctccaggatttgaggctctgataccagaatgtcacgattagtcagcgagattcatgattcagacagagattggaagtaggaacaaaggaagaagacgagttcagggaagaatttaatagcaggaagagagaagatttgaattgagttgagatatttttctattacaagccatctctctctctccactgccgacctttatagcacaacactattaggtctctctcactgactctaggcccagccgatagctactggacccacactccacccatatatctcgttttgggcttgggctgccttgcggtgcgcttcaactggacctcaactgttgaaggagtagaagtagacttcatggcattccggggccccgccccgatggacccgcggggtgaaatttgcactccccccccccccccgcgcccccgtaggggggccgtcgctgctcccctcgagactgcaccgttgctccaccatgagaccgggccggcgtcggggccaccacccagccgccgcgtgctccccctcgaggtgacgaacctgccgctggcggtggacccggccgtcatcaacctccgcgaggatggttacaaatgccgcgcgcgcgaaagacagcaagtggccgactctggagctgtggtggagtggtcacagtgcttgcgcggtaaaagtggcggttgatcgctcactagctacattcactctcagcccaccgaaacccatttcatttccacgtacgatttatacttcttccgatcctcaccattaattaatccacctcctcctaggcctagctctgcatcgatctgtccgtgcgggatcagaggaggagctaataagctaggtaggtaggtgaagaagaatggtgaagatctgctgcatcggggcggggtacgtgggcggcccgacgatggcggtgatcgcgctcaagtgccccgacgtggaggtggtggtggtggacatctcggcgccgcggatcgaggggtggaacagcgagcgcctccccatctacgagcccggcctggacgatgtcgtcaggcagtgccgcggccgcaacctcttcttcagcaccgacgtcgagcgccacgtcgccgacgccggcatcgtcttcgtctccgtcaacacccccaccaagacccgcggcctcggcgccgggaaggccgccgacctcacctactgggagagcgccgcccgcatcatcgccgacgtctcccgctccgacaagatcgtcgtcgagaagtccaccgtccccgtcaagaccgccgaggccatcgagaagatcctcgcccacaacagcaagggcggcaacatcaggtaccagatcctctccaacccggagttcctcgccgagggcaccgccatccaggacctcttctccccggaccgcgtcctcatcgg

SEQ ID NO: 20708 - DNA, 12473 bp, Oryza sativa
cgagctgtccaagctcgccgccaacgccttcctggcgcaacgcatctcctacgtcaacgccatctccgcgctgtgcgaggccaccggcgccgacgtcacggaggtggccaactccatcggcaaagactcgcggatcgggccgaggttcctctccgcgagcgtcggcttcggcggctcctgcttccagaaggacatcctcaacctggtgtacatctgcgagtgctacggcttgccggaggtggccaactactggcaccaggtgatccggatcaacgactaccagaagagccgcttcgtgaaccgggtggtgtcctccatgttcaacacggtggccggcaagaaggtggccgtgctgggcttcgcgttcaagaaggacaccggcgacacgagggagacgccggcgatcgacgtctgcaaggggctcgtcggcgacaaggcggtggtcagcatctacgacccgcaggtgacggaggagcaggtgcagcgcgacctagtgatgaacaagttcgactgggaccacccgcgccacctgcagccgatgagcccgtcgtcggcgaagcacgtcgccgtgtcgtgggacgcctacgaggcggcgcgcggcgcgcacgccgtctgcatcctcaccgagtgggacgagttccgccggctcgactaccagcggatgtacgacgccatgcacaagccggccttcctcttcgacggccgcaacgtcgtcgacccggacaagctccgccgcatcggcttcgtcgtctactccatcggcaagccgctcgaccactggctcagggacatgcccgccgtcgcctgatcttttttttttcttttcttttcttcagttcagatttctcagggacatgcatagaagtagcaccgttacagattttcggtttttttttacgttagatttatatgtgatatccattgcacattcaaccttctagcgtcttccgtaatttgtaataagtttttgctctagtttactctatccgttttctaaaacatcgcgcaaaacctctatttctacaggtgcttagttgtcggtggttcgacaaacacgtgcaaaaaaatatttttctatacccgtgaatggttttttcgcattaattactacttactacatcctaaaataaacatagtactccctcttgttactaatatattatgtctttatattaaaatttattgatgaccagaggtagcaaattttttgtgtaagttattactctaaacaaataggaggagactagggatcggacgttcgatcgatagtgtttcaccgtatatgaaaaagttctattagatgttttcctactcagtaaattttttttcaacaaaaaaagtatttcacatgtttcattactaagaaaaatattttattgcttgatgaagaatgttttaaccaaatataacattgaaaaaagctaatggcaacatcaaataagacatagccatcatgtgaatcgtcccaataaaatagagtgaaacactctaagacaaaccaaatgcaacaaaaagaaacaatgtactgcaacaaagcctacccgtctgcaccaatatacgccagtgacgtctcaccccgtctcatgtccagcctccccacggcggtgctgccactgccggctagcttggagctctctccggccacgacgcattccgctcaacctcgcacgaagcctgctcacggcacagcatccacaaagcctacccctcgtgtggctctgccactgccggcgatctcggagccctctccagcgatggtgccttctgctccactccgcaaagagcatcttcatggcgctgcagccgctaccagggagcttgaggccctctccggcgccgcctctgcctgcggttcccacccgtaagcctccttctcgtgtctccacctgtctcctcctcgcgacggcggcgatgacgagtttgggcttccacgagattggatcctctccgacacaacgtgaatcataaaattagagaaaggagatgaggtagaggaagaggaaatggggattttcgaaagcattttcgaaacaaacacatacggatatgctcattaacctactcactattcagttttgtgaagtacgtatctttttctttgaccaatccaatacgaatccgaatctgaagtgaactagctggccggaactcaacgttttataaacccgccacgccaacctagcttcctccttgcttaattagcttacgatcgaactcaagatcttaattcttacgatctcagctagcagccggccccgatcgaacaaggaccgaacgagagcacctcgatcgagaagagaagcaagatggatctattacctgcgaaagtgatttcatctctcgaatggatatcccttgtttcttgcatgccaactaaatagtcataaaaaaatttagaaaattttggtaagatatattaatatgaaatatatcactccacaaacatgttaaaatttaaattctacaagttgtaacaaaaataacaaatatagctgcgaatgtacgatagataactattttcagtttattttgttcttttcgttgtaacttgtagaagttaaatttgctctgcatatttatggagtgatatatattttatattaatatatgttgttattttatttaaaaaaattgataactatttagatgagatgtaagtaaagaggggacatccctctctatggatgaaaatccatatccctattacccgacgacatgatcgcggaggtcctccggcgactcccacggtcccactgggcagcctcgccgcatgccgccgcatctgcacgtcgtggcgcgcggccatcgacgaccgcctccgcgaggacctcctcccgctctccctcgccggcatcttcctcaacctccacgacctcttctaccccacgcagttcttctcctgccccaccaccacgccacccggcggcggcggcggcgccgtctccggcaacgtcgactacacgaggcgcaggtccaccttgcccgactgccacatgccctcgatcaacatcaccgaccactgcaacggcctcgtgctggtcaacaactgcgtgacctacccggcgacacggcggtgggagcggctgccagactgccagttgccacgccgccacccgcgccacgtcgcgagcacggcctccgccaggttcgccgccgtccgcgagcacctcgtgttcgaccccgccgtgtcaccgcgcggctagctacgaggtgttcctgatccctcacgttgcccctcgcgagcgcgagcgcaggcgcaggcgcagggacgatgagttttaccccacgagcgatggatcggaatggccaccgtcgccgtttttcttgtccgtcttctcgtcggagacgaggcagtgggaggggaggcgcttcgtgcgggacgggccgccagcgggcaccgtcgctgccatgaggctgcatcacgcaagcgaagtaggcacaggtattcactgccaaactaattttgtcatgaggtaattaatttctaaatccttcacacctaaaaacgagatttggagatttttttttttaagaagaaagattttggagaagagtcgtcctccaaacatttttttttaagaagaaagatttggagggacagatgccctttcaaactatttttaagaagaaattttgagcgtgttgagtattgaacgtgagaaaccaaacaccccttaccactgtactatcaagtgcatctctaatcctttactccttaagcattattttcacctcttttattcattatatttatggtaattgatgttggttgtttactcttatgatctagtaattaattactaatttttgttcttggtatatgttatttttttctcccagaatatcattgtcaagtgaagtaccaagtcatcggaccgccgttaagttttgatgtgtgcagatacaaagaatttcatttaggacgatcagagaagggtgtgtattttgcacttttgagttcaaatcaacttttgaagaatcgtgtggccagataggttgggtattaaagcttgacaacaaccttaagcccatttagccacatttcaaagatggcaaaattaagtgatgatggaccatgaccttacaagatattgattattgcgaggatcctaatgaagacgacgatgcacaaagtcaaacagtacaagcagcatattatgattgggactttgacaatggtgctaagtctatcgatattcaagataatagtgttcaagggtgtcatagaggttttggcttccttgcattccatcctttcaaagaggtggttttcctacattatagcttggagagagaactagcctataatttgaacagcttcaaggttcaagacttgggtaacttatgcccgaaagattatggatttgacactgaaccatatgtagaatcttcttttccataccatgctggatggaggtgtttcctgaagaacaaatttgatatttaggatcttttttagttgtaatctgttcctagaacagaacatagcctactcaaattgaattgcacactaaagtgctcattgtattgtgctaatgaaatgtattgactgaccatgtccctggaaatgtaattgcactttagtatgacttgcctattatggagtcacctgcaaatctgtatatagcccattattcatctagtattgaattttgcgggcaagcataataaaacaataattttggaaccacagtgagtgcagcttcatattttgcttctagttttggttttcaatcagagaatgcagcttatataggctatttggtcaacttcatccataataagaatagcacattctttcatagtttcatggcatccggtattcctgaagagcattagtaagcacaaggaaaatacgacataccctgtgatctaaaacacagcaatcagcataacaggtaagttaagatattgatgggtatttgcagatcaaaagatggctgtaccaacaagaaagacttcatgcattaccttttggtagcttaaccggaaaatttgtaagatcccataacttgtcatgtttcattttaatacttctctgaagataagtaatgaagaacaaattaagttaaaaagggttttgctccagagtccagacatccagttcctatgccttagaagctacagacagaactcctaaaaatcaggtcattttaaagagtgagaaaaagtataactgtgcctaaaatttctcaacatcctcagtatgagggacaaatatgaagtcaagttccagggctcaactacatctaggtacattcacttctgaaatcaaccgacaagttaagccaaagcgagccaagctccttcaaacacaaatgctattgtgatttatgccccagcttgaacttttgaagcacgtcagaaaatatcacaatgagagtaaaatgaaataaaattaatcactcaaataatgctgtccacttgaagtaaccaaggaattcaaatcgtgagattgtcaaaattgtaacccaaataaacttctaagccatgaagtgaagataagatcacaaaactttgtactcagttacctggaaaaatataaaaatcaaacaaatacttgtcgatgcttttcttaaaccgatataacttttgaactcaataaaatgctctgagtcagatcaaggcatccgcatgacacacaaaatgaagtcatttgttgcgtaaggttttatcaacctcaatacatgcataaaaattatgttgtttggcttgagcccctgagaaaatattggtttgaaatgcaaacaattcatgcaaacatactgaaacatattccatataccatgacatttaagtattgaagaagtaaaactgcagaatatattgcgtcaaaaaaaaactgcagaatatactgcgtacttaacaaagataaatacaggcatgagctgaactagagtggaatccatacaaggtgaaccaaaatatagctaaaaataagcaatgggctgaaccagtttgggaacaatagcaactgctacagaagcatgtggcaaaaaataaaagttaactacaacaacctgaataggacagctctcccattgggaacaactaaaacttgaatcacatcccacactgcaaacagaagcacgtcagtataccgaaacagggcatcagattctaaaaactagttttgcaaagtcaatgtaaagagagcattggtggtatcatattcttgattcttcaactatctattagtaaccaaaatgttgttgctgccccttgactggtgcagaaactgtacacatttcagacaacacccatcattcgctcactctgaatgctgcttgcaacccaccatgggttcagttcagactctgtccttgtactgctgcagtccctgttactgagagctggaaggttgagttcatgcaactcattttgcacttcaagcagctgttttcttgatggagtcacagaagttttgggaaatgttgcaacctttttatgagcaggaacactgtgggacttcatgtggcctcccaatgcagatccagatgccaagaccttgccgcagagcctgcactcatggatagctgttgccttcaacacatttgaaagactgccaaacttgatctcctcataagaacttgaattttctggctttatcagctcagtatcaccagttacaccaagacgataagaactcggctccatctcagtcttctgcggaccgcattccaagcttccatccatctgaggatcttcatccagagaatctgagcccttgtaagcatcttttgaaagcatcacaagaatgcaggcagcatcctccacctgtgtcccatgtgtcaccaccactaccggggcagggaaaacgtccatgcggatcctcttcgacctcgctctcttacagtgagcataagatacagcagcaaaaccatggtcaccatcatcaacaccgcagaaattagcagaagaagtctttctcgatgccctctgctccaccatcaccatcttcctcccatggtggccatgcgccttcatgtgcatcgacagcgcgtcgcaggagtggaaagccttgaagcacagctggcattcggccttgggggccagcgtccatggctcgtcgtcgctggaggcgtgatccggctggctctgcggcgccaccggcctctggcggcaccgctcccggaaatcgtacctgctgccggaggcaccagtgatcggtggagcctttctcgggctcggcggcggcttcttcttcctgcgcctggtgctgtggaggttcatgtggcctccaagtgaacaatatgaagggaagctcttgttgcagagcttgcaccagcgctgcttttctgcttgtgccatgcctgaacggtgacaagaattgaggtaagaacgggcacaacaagatgatcagagcacgcatgcaagacacgattgaagtgttgttacacatggacagctaaatcctgctcctttacagcattttcggagaaactaagatgcatctgagcagtttttagtgccaaaaaaagatcttattttttagtggcggaaaattaatttgggaaaaccctttcgttttgaaactcgattccctttcccaaaaaaaaaaactctattccaccttactctgcgaaatttattgaattgcataaaaaatatgtatttttatctccccgttgtcgagattgttacatcaaaatgctcaagtacggaaaaaaaatcaaggaatggagggagcagagctaaaatcagagagaaagtaagagcggccacaaaaagatgatcggagcacgaaacgattgaaatggtacacaaggatagctaaatagtgcttctttgcagtattttccgataaaacaggacgcatctgagcagtctcttagagccgaaaaaacaccttttttagtagtggaaaatgtataaaacttgtccttttgaaactcgattcgatcttagtctgcatttgttgaaattttgctaaaaaagcttcaaacttgttgcccccattgccgagattgttcgatcaaaatgctcaagaacggcaataaaaccaaggaatggagggagcggagctcaaatcattggacacacaaccgaatcactcaagaaacccactaacaaaaacccacacgtcatccaagaacagggctagggttcaactcgattgttagcaaaaaaaagctttcatctttgccacgaagcgagcaaatcaagaaccccccaaatcagtgcacaactgcaaaaaagaaaaaaaagaaaagaaaaagatagagagaggctaggcaaagaaactaaaactagaaaacccacctccaactccaatctcctcgagtgggatgcctcgacggggagccatgaagagagagagagagagagagtgagtgagtcttggaggagtggctccgttcgctggatggtgtggtgtgcactgcggtgagcaggtgagggagagccggagagggagtgaggagagtggagagagaggaggaggaggaggcttgggttggaggcaaaaactggggggatatgggggaaaattttctagtgcgcggctgcgcgcccgttgcgattggaggaggatatttggaggctttggagggcgtataatcggacggcccagatcgggccaactgctgcctgcaagtgcacaggcatgaacgaacggaccgtcgcgtcttgcgctttttggaaggatgttttttgatgggaacttttgctgcaaatgctttttattgttgggagattttttgtctagggctctaggcccactcttctcgttttcatcgccgaattatcgccgtggattatttggtccatatgtctttaaaaatatctttttttaataaaaaactttgttatgttatgttgtttagatcgctttttcaagttatgtattcgatttatttctcaaaaatttactttttctttatcaattagataatctgcggcagtgaaatatggacactcaccgttcctaaatatttgacgccgttgactgttttaaacatgtttgaccgttcgtcttattcaaaaactttttgtgaaatatataaaactatatgtatacataaaagtatatttaacaatgaatccaacgataggaaaagaattaataattacttaatttttttaataagacaaatggtgaaacatgtttaaaaaaatcgacaacgtcaaatatttaaggatggagggagtatctttcaaccaccgttttagccaattttgcattttagtataactattgttaacagtgaaatttggtaaacccggagtagtcatcggcagtcagcatcgacttcgaagtcctgagattagccaatgagagttgtcaagtcggattcttgctatattcggttaaggaaatcgatcacctaaaggaagcttatccagcagagaccgagttcaaagagaatgcggcatggcaagttatctattaattaagaatagtttattagtttccttttatctttaggaaagtttctttcttgtccgacaaggacttgtatcaacccatgggtataaatatgtacgcccgaggtctatgtaatctatcttcacgatcaatataattcggcgcatcaccaccttttaccttttctactttatttcatcatccggcgggacttggcacctgacgcggggctgcatcggtgttcgatctccggctaaggggtaagtccaatgttccgccggcccgggcaattgtatcgtttacgtcggcgtcgttcaaggctgcatcagtacattcgacctcttggattgctctggtttggatgatatatttgcctacctatttatcatatgtctttgttaatctagtcttagcatatcaatttagctctatcggctgcttctcgttttagggtttctgccggtattggctaaatcgcgttgctagattagattagcttagacatctaccacactgaaaactcagtcaacggcttgattgtctagatattatatttcttttcatacttagtgctgcatcagttaagtttgatctactaagtcgtgcttagaaccacaatctctagcctgcttcttgattgccaataagggtttcatcggggtttcagccggtgagttatctggacgttgcatcggctcataaggattacatatacatataagttcgatttagccgatgacaacaaaagtttcactgtttaatctaatcttgtggatttcatgacatcggacctccagccgatgtatgcttttaaccttcggatcgatgcttatttatcatatcattatttaccgattggtttatactggattatattgttattttattacatcatcatcagccgattgcctttatatcattatctacattggacatatagccgattgcttaagccctatcgctatcggctggtatcaacatcggctattatcggctatcggctggaactactccatcggcttgtcagccgatcggctgttttgtctattatttgcatatcttgtcagttgcatgatcaaactgactggcacgcccgcatctttccaacctttggacctgcactagagctaagcagatcttccaggccgatgtgttcgatttttttcgtcaacaactataaaataacacacccagtgttcctgtatagcgcccaatactgggagtaacaaatttacttgtgtatttgagtaccaattaccaaatatatttattggtaaaattgtcaatattgccacaagacaatcaaattttgtgtaatttgctaatagacataaaaaacgtgttatagctgaaatacatcctaaaaaactggtaatttgctataggacactttggactcagttgaaaagataaatttttaagaaagacgagaatgtacccattgagtgctctacctcgggccatcgacctcatacgctttaatgcccttagggccacatgcttcaaacatgacattagagtaaaaatttaaaaattatgtaactctaaatttactatcaccccaaatacatcaatagcatacatcatattacatcttcacttccgtctaagctcaaaagcttttaatcctagaggcatttttgtctttttgaagaatttctctctccaattaagtcgaaagtgttttttagcaaattaccagtttttaaagtgtctttcagccgtgacacatttttatgatgcctaccagcaatttacacaacttttaagtgtactgtagcaaattttgctgtaaaatttatctcatcccatctgagaaaaagaaagaaagaaatgggccatgctcctggctaggctttatgaggatgcacctgccaataagctcttggtattatctgaggcatcgagaagatatgacatatgaagtgattaaagatctatctatgccatgacaacagttcccttcctatcaaaaattgtaatcaaagaagaatgcacagctcattaattccaaataggatatatgaaattttttcgtaactatctagttgacatgcaatagacgggtggacgtccactcgagctattagaatcctctcccctactctctatcatccacagaatactgtgaaaaaggacaatgtccagattttcattgacatacttcataaaagaaattgtgaactatcttcttgtgctacagttaagtatggaagaccatgaagctttcctccattcctaccaacatcaaagaccggagacaattacaaaataaccaaacaatatagacactctcactaaagaaaactagaaaatgaaacttaatccaaatttttaactgaacatcaaaactgaaagaacgaaagatggaaaaataaagagaataaaatgagataaattacccatgaaagtatagtgatcaaggtgaaagaaaaatattcagtgtatgctaggcattgtctggggttatccaatgtaatgctgaactgggtagcaattgagaaaactgagggagggcaaatcatggtagtgttggcgtgtacttctgaaaaaatggctcaattgcagatgaattacagattaccatgttcctgatcaagaatctaaatcatgcaggatcttttgcgttatggagtatttacacgatcttatcaggatggcagactacaataacacattacataagcaacaatatttgtatttaatattgacaggtaaacagtttgatactcatagcttacgtttcagtggacaaccaggtaaaaattgcagtaatatcaaagactgaaaccaagctgaaaacgtctggatttttgggttacagcaatatttgaatatctgattttcaataaatgctaaaacatcacaagattagtagagcactgcatgacaaaagtctcgagcaatgttcttgtgagcacataaaacacaacaccaagggcgatcgagaccgggagggccggcaatgccttacggtagaatgctagtagcagcagggtgataccgagcccagcaattatggcaagataacatgcatacactgtcatgtagtcatacattgctgccctcccgacgagaacgctgtagaatatgaagtcccccaatc

SEQ ID NO: 20709 - DNA, 1469 bp, Oryza sativa
taagtgcttccagctttgcagcttcaatcctagttaatctttttcctccctgtttaccttttgcaccagacggtggtaattgatgtgaaaataaaattttattctctttgtcttgtgaacaatctcggccgtgcttgcttttttcatatgattccctggaattacaactccccacggaaccactgttacagaaggattctgactgagcattgtaaaattcagattctttgctggcatctttctccacatgcgcttctactttcttgcagctttcttccaagagttgaatgcgtgtgttattattcttcttcgcttctagaatctccttctcaagcttcgacacgtgcttcacaagaatgctgctcagatctgaagcagaatctgttgcctttggattcctgcctgtaatctgtctttgagcaccttgtgcacaagaatttactgaagaggcttttctacctgcttctcttgcttcgtgaacttctttttcaagctttgaaagatgcttgaccaagaacttgtccagacttggtaactcagatgtgacttctttctttggttgtaggacatcaacaaagctagctgcagtggaatatcttcttgagtgtgccctttgtgatgtaaagctgttcacagactcagtttcctgatatttgcccctgtcactttgaagtacagcatttaagccagaagtggcaacaataactgccagagaagcaagttcatcttcatgaagagcttttagcctttccagcataatgttcacaagatcattggattgctgaacgttagtattgtcaaagtcagatggaaagatgcctgttcccaaggtttctttattgaatttcaaattccttttgtcttcactgttacagtccccctgatgctgctcatcttcagaatttgcatcaatctcagttacatcaggattttggctaattttccataaaagctccttaaactcttctttgtttgatgaaatagaagaattcgcaagttgaataaatgccttcttaactgcagcggcaacctccatatcaacctcaaaaccagtctgaaaggaagcagtgaccttatgagttgatcgtcccccagtctgtgacgatgattccacctcatactgctgacttgaacaatctggtctgtcgtacatcattacgcctattactctagcttcttcaaatgcttcagttgcccgaaacttggccttttccataacttcttcagcgtccttcttttggatcctgttgaaaagtagaataaaaatcagaacaaatgagtgtatcaaggaaaatacacacaaggctggacatgatggaataagataaccatgattttcaccttgctgcatgaagaattctgcaccacgatgcttcaaccatggcagctttgcgagcttccattgcctttctggctgcttctctagctgcaattttctcccttgccattcgcgtgtagtgaggattggc

SEQ ID NO: 20710 - DNA, 4848 bp, Oryza sativa
aagtacctgaagacgctttatctttctcttcaagtatggttcagtcttcttccgagggaccaatctataggggaaccacttttacgattaattgacttcttgaattgggatgctgatttatttacagaattcaaaattgaacttccaaattctcttgagcttgaactctgcagaaaacaaatgagaagattgatgtagctaaatccacataaaaagaatgcttacaagcaggaaacagagcatatgaaaggatgctttttaacagaacatagatgttatgtcacccaaaaaatacggaatgatgattccttaagaaaaggaatggtaagagggtatatggcagcccatgctatgtgtgctaggctgctctcaccagcagcacacatggtgacctcctacttattgtgctcatttgaattagattgattctcgtaggtaagctttccaactgaaccatgttgtaatccttgctatatactccctctgttgttcattgtatcgttgtctcgttggttagttcaaacgtcaaataaacaaaaatggaggagtattactgtaccaaatcattggaatgattattgcgtgccattctaagagcatttggtctatcagagatacctctgttaacttatggaagcttaacccaacacttcaatggtcacatatactgaaactataatcaattgtgtaatagtagctatactttggataatactaatcgacaaaaaaaaaaacagttgccacactgaattgtctgaaaggagcatactggtgtttgatttcttccgttgacaataattttgatgtctacttagctgtcaagctccatccaacccgtctatagaaatatctatattatggagtacagagtaaacctggatcatattacagagtatagatcggactaaggagcagaacaagaataatataaccacataaataaattgaatgaaagaggcaagtacaaatgcacgaaccaccaacagagctcacatcagggtatggtgcgcatcaacttgaactgacgaaaacaattaaacaaagagttgcccatgtccattcacgcaaacccgtaaatggaaccaacctttaattagtgtttttagcaactccaagtccaggttgagaaatcactttaacaaactaatgctactgcacatcaacgaaatcacattagggacagcgatcaagtgctactgcacgcactttcgctaaactaaggtccaacaggatcgaagttatagcatccatatataataataggacaaatcatgcatagtaaaactgctatataccggagtttatgtggttggatacaccagaaatgatgagaaatttcgattcacagataacagattgcagagcaccaaccaaatacagggaaatcaaggtccccaaacactaggttctaagaaattaaacggaacacgcatgacacccaaactccgcccaaaactccccgtggagatccgaaatccaaaaccaaaatcgctacgcagtaccccccacccaaccaacagacctacagatccgctcgagttctactcctgcagttcgcgcggagtcccagccgaaacccaacgacctaaaattcgagcccgcgcgggctcgcggcagcgtcggacgcggaggtaagggggggcggggatctggagggcgaaccttgcgggcgcttccgccgctgcggttgggggagcccttcctgcggagggagggcgtcggcgaggcgcagcttcgggcctccacgccgtcgccgacctgctccggcggagtaggatgaggaggaggaggcgaggccaccatggcgagccgcgtggagaggggcgaggtggtggcgaggaggaggaggaggaggaggacggcgtgtggattcgaacggaattggaggggggagagaagaagtagccgtttctgccgatgtgatcgaaatggtaaggtaggcttataggcagtgggggtgtgactaggacagggagcgctgagaagggttgtcgccttgtcttgtagggcctacagtactatgtcaaatgggccctggaatatggcggcggcgcgcgcatctggcctattgggcttttgtcaactgggccctgagcccatctgggctggttgtgtaggcctcttgacatactgggcttctcctctgtccactgtcaaatttcgttaagcatccaaaaagtcagatggaacgacaacatgcacaggagattagggaaagaaaatgcatttttatattaggaaaagaaaatgatgtatttttttgctgatcacacggagttactcgcacgcacatcacacatgcatacgcccacgagaatgaaagtgcgccccatgagccatgactagccaggcaattggcataggtttatatttgttttctttcatttcataaattatttgttgaaaattacggcaatatcaaagaacttagtttattacgacgacatcaacacgtgtgctagatattaaagattatatttttctgcttagtaagaaaaattggagcactacaattacgccgattttttatatctaggcagagggacaccatcattaacacaactgggtggcccgcgcaattgcgtggctagcacccatataaatttatatatttttaatatgattttatttaaaatttattaaatagttatctcgttgtcttaagattaaatagttaccaaaccttatcatccatgtgtttttaattttatagtttttaaaagtcacaccagttgctaccccttacttttatcatattattctttatttgcttgctcgatctaccactgtttctattcattctccttggaacctttaaaaattggatctataaacttataggttttagagtttattggcctattgggcttctttttttataatttctagaagtcctgtcaaacgctaccattatactcctctatgaccgtccattgcatcttctctttattttcattgctattttaaaaatcgaacatacttatcgtttaggttcaattttttactttccagaagttccgccaaaacatcagcgactttgtcactgtactcctctacggctcgctcgctgccgcccttctttattgtcattgatattttaaaatcaaacataattatcattggggtttatctttttactttttagaagcccgaatctttaaaaattggaccttatagtttttagagtttattgtctcgttgagtttcatttttttataatttttagaaatcccgtcaaacgctgccactatactcctgtacgacctgtccgccgcatactctttattgtcattaggattgtaaaaatcaaatataactatcgttggaattcattttttactttcttgaagacccaccaaccattggcggctctgccattgtactcctatgcgacccgcctgtggcctctcatttttattgtaatcgagattttaaaaatcaaatgtgattatcattgaagtttattttcttactttctagaagtcccgccaaccgccttgactgattgcttcacgacctgtacgttgcccttcctttcaattgtcattttgattctatttgatgttttattaatagtttttagatgtcccatcaaccgccaccactctactcctatatagacctattacttaattaatctcgtcatgtgtttcagatggtcttttctttcagtagcctttattttttttcaccaattttagttatttataaattgtattcctagttaatatcttatttttatttttctaattacagaatttattttattttttgtattatgttcttttgatatttttttttttaattttagttgtttcaaaattatattcctaccttaactctcttattaatttgcctaatttcggattttattttatttttattctgaattttaattaatctactatgctcttatatgtactcttatttcaatattgtttatatttaattctgaattttagttaattttaaattgtatttctacttgaactcctctcttcttttttttctttttcctactttcgatttttttcatttttattccaaattttaatctcatattggattcttgtatggactcttctttcaatttttcttatttttaattccgaatttcagttattttaaaattgtattcctactacttggactcttctcctttttttttgctaattttggattctattttatttttatttcaaattttaattaatctcgtattgggtttctatatggactcttcattcaatattgctcacttttaattccgaatttcagctatttttaaattgtttttctactttaactcttcttttctttttcttcgattaatgtgaaaatttctagccccaccgcgaacgtggtgccttctttcaaagctgttttaataatataatagatagatttattcttccatttgttgatattttatactccctcagtttcatattacaagacattctagcattgtccacattcatatagatatcaatgaatatagatatacacatatatatgtcaagattcatttatatatatatatatatatatatgaatgtggacaatgttagaaaatcttataatatgaaacggaggaagtaaatataaagattccttgtttttacaccaggatctctttaatactttctgtcaacatcttactccatccgtcccaaaatataagaacctagaactggatgggatattttctagtacaataaatctagacaatgtcccatctgattctagattcttatattttgaaatggaaggagtacttgaattcgactgagtaagtttaccataagaaatgtaaccaattaagaatggaaaattttgctatatgac

SEQ ID NO: 20711 - DNA, 10081 bp, Oryza sativa
ttcgcgctacgtacataatattgatggtattgagaaagatatcgaattaatcttgcaaatgacgcatcatccgttttgtccgcgttgaaataaagtgtcaccaaataacacgtaacagaaacacatttcttgatcaaaggagaaaaccacaaaaagtgattgattgattgatcattgcggcccatcagctgaccataaacacatggagcttgcccatcatcaggccatgacatgatcggtcatcgatcgatcggtccatcaataccagcgtgtataatagcagtacggagtacttgcaaacgtacgctaactataattagtcgtctaattaatttcttaaccgaatggaatcaatggaatcatgggtgtggctgcatatatgccccacaggtcgacggtttagccggccggtctaccttgcatgtactacacgtgctgcttatatattcgttggtggtggtggatactccaaaacagatcggttggtgctccgagcggctgattaattaacaggaaccaaatattactcctatcttcatattagaagattttctagacaatgatattaatgaatctagacatatatatataaatatggataatgctaaaaaatttcataatacgaaacgaagtactatccatattttaatgtatgataccgttgaccttttgatcaatgtttgacctttgttttattcaaaatttttgtgtaaatataaaaatatttatgtcatacttaaagaacatttgatgatgaatcaaatcacattaaaataaatgataattacataaattttttgaataagacgaatgatcaaacattaaaaaaaatcaatagcgtcatatattaaaatatggaggtagtaacagggagccggggctactcaacaagcgatgaacaatgtgctagccagctgctagcgtacgtgcgttttgttggtgcgtgactgagactgcgtacgtgtttgctgctgcgaaatatccacacatgcacttggctaataatagcaacgcgcgtcgcggcgttgtttttggtgatagatcgatcgagtagctgccggtacttagtgactcagggttgttaatgtttggttaatttgtagtactagcgtacattgacataatttgtcgcactacagattaggaaggttactttgactaattaagttattgtcaccttgtatccaaggttccaatgttttgttgactgaccatataggagaggatctgaattgctccacggacgcccgataggagaggagagcatgtttcggcgttagatttgcggagaagaggcggaggcggtcgggctcatcgcgtctcgtcgcttcgggcagaggggcggggtgttggttggccacggtgtcatgtatctggtgggctgcatgggctgctggaggaatgggcttggcccagctcacatactgaaggtgcaagcaaccaagcagtacaaataccaacagtggtagtgagagaaggcatcgataaattagaatctgatggctgtggcctcttcttcctcctcttgatttctcctctaatcccctactctgtgtttctctgattccctttaccccctgcttctcttcccaatctctgctgctagttcttccaatatgtatccctgaacttaatatacagagttggagaggatatattgctcctgtgcttgtgttcaccagtgggattcatgtgggatcgtgacacacggcgaacggcgagatcaacggcgaccacgacaggcctcgggtagggcggcgtcggcttcacaggcgcggatcagtggcttttgcagcattgggcgcagacacggctttttgccacggcttgttgtgctcatcggctcagcctgcacgccaagtgcttgttgaaatgcctgcaaggagggagggagagagaaaggatttcaaaggaaggagagggagagatggggcactggtgcggttggcatgtggggtccagagctcctgggctcaccggtcagagagagatagggagaggacagggagatgcattctaattgctcgagtggacgtccatccgtttattgcatgttaactagatggttatgaaaaattttcaaaaaaaattgataagatagatcaatatgtaatatatcactccacaaatatacaagttcaaattcaacttctataagttgtaacaaaaataacaaatttaattgtaaatatacatatagtaatttaagttttgtttattatttttgttacaacatgtagaaattgaattttaacttgcatgtttgtggattgatatactacatattatctatcttgttcatattttttcaatttttttcataaccatttagatgacatgcaataaacgggtggacgtccattcgagctattaaaacagtttcccgagaggacatgaggagaggtgaggatgaattttctggaaattttggagaaggctgagagtttgattattgtttttcggatatgctacaccgctcaaaggcttgtgcaaatattactggaagtttgtgtggtcatgaacttcatttggtgagtgtttgagattcttctcaaggttgtttatttttgaagattcaaagaaaccttgcttttttatatttttaattaattgtgaatgtttttcacatttgtaactgacgcgcaacactgaattataaatttaaacctttcctgtacattattcaaggtgcctaatgtttatcaaacaaattctttttttgtcaatcctctccacctatttgtttatatctatgcaaatacatcatgagatgcatggacaatctaacaacaccaaatgaattcaaaagacagagacaaaatcaaaataaaaaatttactaattatttctttattttcttttctttgtttcttttttttttacttcaaaattccaggtatgttacatttgatgcctcagttttggccactcatcaaccccattcgagtacttctgtcttcttgagagacaggccaataatcatcaatggcggccacttactgaatgaagaacatcgtgtggcatatgcatagtatttcactgtgttaatattctgtaagtggtaccaccaatgcaaatacagtttgttgcattattgtatatatataattgattgatcggtgcccgcttatatcccttgaggacagattaactattcctcacctatgccattgcaggtgccaggggccgatggctaagattgatttttctcgtcaggaaaagtcgattgtctggtaatgacacttaatttttttctccctgaggacgagtcgacggacgacagtgctgatatggtacgtctagctggtagcctggtaccaagcgaccgtatatgtagctggtgtgtttagtgtgcatgtcctataaactagaaactgggatatctcgttaataattgatagtttgatactgcatcaagagaggagtcgttgattgcatcgacagatgtcggcccaggtgttcctatgatcgtgtatctattattgcatactggtctctcgatccatccacgaagtcaaggaggaaagaggaccacacatcagtcaattgaaactaaaaggtaatttatctatctatctatcttctattatatactaaaagtccattaaactctctacaaacgctcttaaattgccatgtgactctctcaaaacgttcttgtattgccacgtggcgtaacagagagaagttgagaacctcctagggccgacgcgtgcaatacatggatttatcgtgaaacttaaaccaacgaagattatagtttcataattgactaacaaagattagtcccataaatatatgtacgtaaggcaagatttaaaatcaatctcaaagcaaattttaggcacgtgcagcccatatatttgtcgtgaaccaagagattctataattgtgtacgtgaggcaagatttcaaatgtctcaaagcaaaatttaaattacatatccagtcaaaataaattaaattacatatggcaagattagtttcacgaggcaagattgttaattacaccaaaaattagttctatacacgtgaggcaatattcctaaggcttacatacatatatatatatatatatatatatatatatatacatacaccccgccagcaacacgatcttgggacattagtcaattccggcggacggagcagaataggtctgcggcaccttgcgacattagtcaattccagcgactcatctttggcataagaacacaatcatgccatcttctattaattagggctacatgatcttgcaactaggaaataacataagcatttatacagttttgtcataatattttcagcagaagaaactaaaattgcacctacgaaagaacacaattacgatatcctgtattagttacatctacattatgttgcatctatgtatactgttttgtcacattctttttcagcacaaaaaagtaaccttgcacctaccaaagaacacaattatgatgttttgtattaattagttctataaaataacataaacacgtatgcaattctctgtcaaatttgtttagtaactatatgcaatactaatcatctgcatataacatggcaccgggcaatttgaatactgcattaacaccaaagaacgataggtggagaatcaaagtagaagctattaggctatgcgaggcggttaatcctacaatggctgatgatttctatggtatacatatgattgtactagatgcagaggtatgattgttgtataaacatgtggtttaatatattgttctattatgtaaatacaatctttttggtgcagggcaactcaatacatgcctgtatctcaaagcaattggcgaaccacttcaggccaaaaattaagattaactcaatatatattttcaaaaatttcaaagttatggaacatgataagtaccgtgtcctaaaaaaagtgttgcaacgtataaaaacatttttggatcgcacacattatacgctttgttttaggccaaaagctcatttattccttccttttcagtcccagcctagcccgctatctctctgcttagcctacctctctttgaaatatcaaaatctgagtgaatctataaaactcggaataaaaacggtgaattttaaatggtaattagatccggtaaattaaagcataattaaaaggaaaaatcataaggaaaataatgaggggtagtgggaatcgatttttgcaatcaattagaggaggaacgcatgggaggaagatcgacgtggcggccgcgctagggtttggccaggctaggcttgctagattggtttcagttttatatatttcatctatgctggtatcttggtataaggtggtatcgaagtattagacgatacgcgttaggtttaccccatcggctatgctagcatcatacataatccctactttaggacgcatttagatattgtgtaatttatactatctcaacgcggtgaccgatctatcccaatcaccctatctaaatatgtcccatttgatggattacgcatcgctaacatctacagccgatcaagtataccgaacaatctccaagtttttatttgcctctgccgatctgacgcaagttacgtcggcatggcctcatacgatacgtcatcggcaatcctaccgatcagctatcgttgatggatttaactctttgtccttttttctatcttgttggttgcaggatcaaaccagctggcacgctcagaatccgaaggcaattcttttggacgtgcattaaagttaagcagatctctcagaccagtgcatgttttccgcgtcaacactaggacaatgaatctggataaagggtagtctagattcgttgtcctaggagggatcacatcctctcctagattgatttttttttcggagggagtacttcgtagcagctaacatagtttcaagaaaggatgacagttgtagcaggttagtgggtgggtccaatcatgatttgaccgggtcgaaaccatcgaagctacgtctgggggcagtaatggacaacctgggagtactctgtactccctccgtccaaaaaaagacaaaccctggtttttgtgtccaatgtttgaccgtctgtcttatttgaaaaaattatgaaaaaaattaaaaagacaagtcacgcataaaatattaatcatgttttatcatctaacaacaatgaaaatacgaattataaaaaaatttcatataaaacggacagtcaaagttggacacggaaacccatggcctttttttttgggacagagggagtagcagctaacatagtttcaagaaaggatgacagttgtggcaggttagtgggtgggtccaatcatgatttgatcgggtcgaaaccatcgaagctatgtctgggggcagtaatggaccatcaaggttgtgtttagattcaaaattttttcttcaaactttcaactttttccgtcacatcaaatatttggacatatgcatagagcatttaatgtggacaaaaaagagccaattgcacagtttgcatgtaaatcgcgagacgaatcttttgagcctaattatgccatgatttaacaatatggtgctacagtaaatatttgctaatgacgaattaattaggcttaatagattcgtatcacagtttataggcggaatttgtaatttgttttgttattagtctacgtttaatacttcggatgtgtgtccgtatacttcaaaaaattttggcacacaaactaaacacagcctaagcttatagtgtactcccaccatcccataaacatctcatatcaaaagttcatttgacctaatagcatcatcaagaaaatgagaataatccattcccacaattttgttattgggttttctagaatgaaaataggaattgaaaaaactcatcgttccaagagaaaccctaaatttaattcccaaaaattaaaagtgagcctttccattaaactaccaacagaaatatcccgttttctatcatccccgcaagaaaaaagatcgcgcggcccatcccacgcgctcctccctgccctgacgccgcgccttttgtagcaagccacaacttaccttaattgtgatttggcaatgttagccactaaccaaacaaccccctagacttggtatagttgaattcgatgagaccaaactcattgatcaaggtacataaaagagagtagaggaggcaaataattacactttttttaaacttttttccactctttatcagatcggtctaatctctttcacaacaacactctttctcataaagtggaaaaagttaaatatttcctacataaatgatgaactaacatagctgaaggcaagattttcactgggagtgctcatgtatccttttaccaagccgaacatgcacatcaatcgccgttattgaagacgttgtaactaactattccctccgttccaaaataaagcaacttttagagtttgaaatttgcctcaaaataaaccaacttctaccttcttacctaacaccaatccataaaacgagaaatttcattactttaatacccctgacctacctatcaaacaataaaactttcacattaattaaaggcattatggtttctgttcttaaaatcttctttaaggccttgtttaatttcaaggggattgagggggaataattgcacatcacaataggtgtagaataaattccctctaatccatttctcatggggattaatcgatctcgcattaagggtttgagatagagcgagggagtaaatcctacgagtagtactccctccaggttgataatacttatcgttttgaacaagggcatggtctccaattaaaaaaacaactttaaccattattttttattataatatgtataaaagggttaacaatatatgatcttattaaagtactttttaagaccaatatatatatataaatatatatatatagtcatcatatttgaaagagaaatattttgaaaatgattgataatcaaagattctaaagtttgacctcacccttgttcaaaacgatgagtattatcagcccggagggactatctagtagtagttgttgcctttttctaacagatccaaacggtttctcacagcggttattattcattggcctttctggcacgtctatatatacaccggttgaccgttgacactgaaaagcgaccggggatgggcgctgcgtgatacggtgatagccgatcaagatggatgcagtgcagctagcactcgattggtagcacgaaacaaacactgcaacaagccaacaatgcaagtaagtcgacgtcggtcgacgcagattaattcgagcgatcgatgaatgtacccatgccaattttatttgcactgattggatgtcagcgcagacaactaagggcctctttgattcggagaaaaaacatacaaattttagagaattttagtcttataggaaaatttcctaagaaatcctttaaaacaaaggattgaatcctatctaatcctttgaaattcttgtagaatggataattctatagagattttggaggaaatttagtaagagcttcaacctcttgataactttcctttgagtccatctctcccatccaattcctgcgtttttcttaaggttcaatcaaacggttattcctatgattttcctgtatttttacaattatttgttttacacttagatttctatcaaaatcctatgtttttcctattcctacgtttttctaatcctgcgattaaagggacgcttgtctacgaaacgctcaaaaaaaaaaaaactctccgagaatcaagctcaatcgatcgctagctcgcgcacatggactcgcatatcgatcggccggccagctagctgaacagcacgcacactggaagctagcagcaaccaagcaggcaagaaacacgcatggttagttgtattccatggttattggttggagcagagtcgtcagagaggtaagcagtaagctcgatatccagtgagacgaggagcccacactttggcgcgagttgcatgctttggaggtattagctgccccgtttggaggtttgcgtgcacgaggccggcagccgggcaccactcgcagaagcaatccaagcaacaggccgtgactgacgtgtggactccaacacacatacaggcaatcacattctatggccctgctatgagatgaacacacgcgcacaccagcacactctaccctttacaagcaattccgaaagactgacactactacaaaacatcaaataggtgtcgacactaaagataccggaagtgctaaaaccaacacctatagaccttttcccacctccgtagtctaaaaacacaaaaaaccggcacctttaagtgattataggtgtcgctctataaaaaaccgacacctttaattcattataggtgtcgatttttttaaaaaaccgacacttttaataaattaaaggtggggcccaccggtcaaccgagccgagcctaaactggaggtgtcaacttttaaaaaccagccgagccggtcaactgagcaggtgggacccaccggcgctcttttatctctacctctctctcgttattatctcttcctctcgaactctctcggttcttctctctttctcttcctcctcattcctctccacttcttccttccctcccggcgcgacccgacagcagcagtggcgtgtggaggtgggaggcggcgtgcagcggcgggagggcggcggcctcaggtgaaggcggcagcggcgggagggtggcggcgggatgggaggccgggcagcctccggtgaaggcggcagcggcggctgcaccctcccctccgccagatccagtgggagggaaggcggtgacccgacaacggtgcccgctggtggcggtggtggcggtgtcgacagtggtggtggagactggcgcgggcgaggtggcggccggcggcaaccgccggatccggcgatggcggtggcgttgctggtggaagaggctggcacgggcgaggtggcgaccggccgacatgaatttttctctttttgagttcttgagttcttcctctcttttcttctcctccatgtccaatttgttgagttcttgagactttgtacatgtagtggtgtgctgttcaattttggataaggttgatgtg

SEQ ID NO: 20712 - DNA, 14768 bp, Oryza sativa
ggttgcaaaccccacaactggcacctatatttgttataggtgtcggtttacaaccgacaccgataacggaactcatatgtgctatcctcatggtagtagtgtgagtcgacatatcttgagattgacgaagtcaccacagacaccgggctgtcaatgggtatgtcgcctatcactgaaagaataattagccgtaaatgtgagcacccgtgtcaaatctaggatttgaatctgagtgggatagattcacacttccaccacaaggaacggttgagctacgctcacttcgcatgagacaaccttttaaatttcatcaaattattgacacagattgtatatttgattaacattataaactaatattttaaaaattaaattttgcaaatagcttagaatatgtggtctaatcaatcagtaaaaagaatgttcttctaagaatcctatctttggaactatggacgaaataatccgtgttaaaaatttacgattttgttatatatttgtcaacaatttttttctaaaaagttaacaaacgtaaatatagtacaatcacaatgtaattacattgtaacttgcatgtaactacaatgcaattttgagccgttcagtttgctttaaaatccatgcagggaggtagaaaatgatgacaaccttggtaccattataccttcattttatgaaaaatagcatgttacctagcgatttttaaaagttacatataagttatactacaattacttacaacatacaatgtattacatcatgattctactatatttatatctttcaaataatttagttaaaatttgactataaatgtatagctagtctaagatatttttcacaaataacccttgtgaaaatatatattacaaatacacccctagtgagaaaaatattcccttaagaatagaaatggagctttctaataggtagaaggtctattttcagaagaagaaaaaaaatcagaggttcattgtttgctaaaaatggttttaaaaataggaaatttgtgaataaaactacacgttaccattgatcatttttttttcgaacggtcaggccgttgccgacattttatataaagaagaaggtgtctcattttaaggagaaaacgagaccaaaccttacaatgcgtagttaattagggaaaactgggcgaaaaccacaacactcaaacctaagctaccaacaccgcgaaaaaagaaaaaatggcggagcccaaaacaaccatcgataaagaacttgttgaaagcgacacaaaggcttcgacttctcggggcaagtgttatcgttgctgagcttgttgcctagcgatacaacagcttcgactccacagctatcacatcatcgttgccaaaggcatcacagaaaacgagcaagacaccgaatgaccactttgaacatcagcccaagccacttgagcactactacttgtacacagctaacaccaacctccctcgaaaactacaacgtgttatcgttgccaagcttcatcgcatcccaataaagcagctccgacttcacctagaagaaaacgaagaaagttggacgcttgccacatccaagagcagcacccaggagacgaaggcctcgccaaatagctaggcttatagagcttcgacatgggggatccacgaatgaccatccttgcatggaaaaggttcttggtagcgagagagacgccataacgacgcctccaaggaggggaacgacgcttaatggcgtcgccgtcgtcaagccaaccaaaggctagccaaggctttcgccagcgtcatccaaaaccacacaacccacccgcataacgtacatcgctggaccgccacatcatccctctagccaccaagcctagcccaccacccacaacataggtaggctcgcgagtccgccgtggcaccaacctgtcagcatcctctactgcactgacaagatctggccaaggcggccatggatccggccgtcgaagctcggcaggccaacgtcactgcgagcgcccacactccactgcaccgtcgccaccgcaaccgccggtgggcgcagccggtggctgccactgtctccgcgccgacaagggcctgccgcaaccaccccctccgtcacacgcgccagactccctccgtggccagcctcccgtagctgtccccgcgccagcgaggccacgccggcccccacctcacccttggcagctcgttgtcatcacaggcggcggatctggcaaaggggcgccagaaccggccgtccatcaccgggccgagggccaccgtcgccacggccttcccggccggatcccggcgcttggggcggatccacggccgccctcgcaggggtgcgccgcttctgccctcgccgagccaacacgccgccccatgcctcctccggtcgccgtcgccacaagctccactgccatcggggaggccagatcggccgccagagggggcggatccgactccgccgtgcccggagccgccaagccgtccgccgtcttgccgccgctgagcagcccctcggtgtcccgccgctgggcttctcgtggggagagcgccccgccgccgccgtccttgcagccgtccggctttgctgacgagccactcaggcggcggcaaggcgaagggggggagggtggggaggggcggcggcgaggttgctgtcgccgtccgtgtcgcccctgggacgggagcgacgcggacgaggacacagtctcaccttctgaaattactgttgatcaatttttagagcaaaaatatctgcttggtccactcctcttcttggtccactcctcttcacagttcacagtacacaccccatgtaccttatcgctgatcgtcagcgtcccgtgacgaaaattagaggaccacattttagaagcacatacgcatcatattcatgtcacctttccttttcctctggtgatgctggactgctgcggtctctgcagctgcaactagcaagtgctacgtcccaatcatctctttgtgaccatgctactacgcccgtacatttaaccagaagaagaaaccaattgtaagacaaatcttgaggatcaatctatcatcttatactaattacagtacattagttataatttttttcgctaggagcctaggattattgggaattagtgaaattaaacagctaggataggtgggatgtttgtgagaaagaaggtgaaaaaaattaaagagatcattggttgagatgattttttttttttgataaagaaggaaaacggatgaatgagtagttggtgtattctcagataaattttaaacgatagaagttgttttttttaagacggaagaagtacaagtatcattggaccatttggacggtagaaaaggagaattaggttcctttcgcagttgctttttttaaattcacagttgctttttgacgggttaggaatttcgccacattgatcacgagttcacgacaacaaggaaaacggatcacaaatgtaatcgtgttgtgaacaatagtactccacatgtttgtgagccacgcccttgtttggataagaagacttacctgcaatccatttagaatgcgatgaaaattaaataatggatcaaacggactgatctgaaggttttttttttgtccttttgccaaacaacccctaaataaacggatgatcccgaccattgcacctccgtatcagaaagtaatactccgtaaaacagatgaagaaatttacacctcttctctgttgtgtgttagggtgcattcgagttaggctaatttatttcacgtaaaatgagacatgtcattatcaaatgattaattaagtatattacctattacgctccccgttcatgtttgatcatcgcatttgttcatggcagcaaaaccaagaaggagaagaaaagacgtcatagggtctgtttgggggagcttctaactgctacaacttctcccagaaccagaagctccctaaatagtctagcttttggtccagattttgagaagctgtagttataaaatccagaaaatgaactagaagccagaagctggaaacccagcttttccagattctcagaagctggttaccaaccagctgcttctcgaaatcttaagctctcctaaacaggacaatagtctattttctgcaatcgttcctttcccgggcttttcggcatgtactactccgtccaataaaaacccctatcaggctagtcccaacccaaaacactagatatatagtttccataaactccacatcatcaagaaactaggactagacactactctttcaatgcaaacactactcttccatacttaaatttaatggtacttatctcacatgatgtcttagatgttgtgtagaaactgttgtgaaacaaatctctaggagataagttttttgtgggccaatccgaaccggagtagagataagatctatctcctcctaagacccctatatatacagaggcagggtgtgacatctatggctaatggctggcttttactacagatgagatctataatgaagagagagctccaccctacatctgtgttcattgtctacttctgcaatgttcttgagggtaaagggatgggagcgggtgttctacatcatctcacgcctctactgctgtgggagggacagggaatggatccggtgatctgctaataggcgcgttggtttacaacacgttatcagcagctctgccatcaccggcttgccgttccaatctaattgtcgttattagattgttaatcacagattgatcttttgtgtttttcctgtatgattgcatgtagcgcagccgatagtggagccgccgccgtgcttgtgttggccatcgtccgttgggtcgacaccgacgccagcaagcgtacgtgcatcaggaaagccgatgctgaacggctgtgtcgcacctcgcacgcaggcatggagtccaaccaccttcgtgcgatccaagctgcacttgcacgagcggcctcacacgtttgtgtggctccttgccgaatgttctgctaaacaaaggtattggcaaaatagcatgaaattaaatatgcatttaacgtatttgggaaatccataaggaggtcttgaatagactccgtcgtgaaattgcagcatgcaaatctcgtaccaataggtattccggtaagagtaccatctcccgttgggagaaaatctcattgacggaattttctctgagggtgagacctcattgatgaattttcctctgagatacaaaaattagtaagtctgaacacatcaaaaattgtgtaatcccttggagggatgatgacccatttgtgacccgataagattacaatgagaaatctgatgagatcaaacagacggggtctgtaggcacatgtgcttctcacgattatcactggagtatgtacactcgtgatatctgttctacccgatggtatgaatggtggtgtcctctaatacctgctaaggtatacttggtgttattggctgtgtgttatcccccacagtgcttgagtttttcagactagctagttactctaatcgttacaacatgtctttggaagacttgttgatgaggacatcccttccaacgatacaaccacgcctattgcacagcaaggaccagtgactagagctcgagctcgtgaacttaattatcaggtaaagtcattcctagctaatcatacaagttcttctcagaattgggtgctactaagttattgttgtgatctacttgttgttaggaatatgggagaggaaccagatcgcaagcagcactagcagcgctgatttgatgaagtcaatgctcttctctccggagggcaaatggggaaaatgagtacttgttggaaagatctcgtcctctactttcagctatgtgtggtctcaccatcagatttgacccaggctggtcagaatgacgaaaatagtttttcacattagaaacttgggcttgggccttgtatctttaaagcccattagaggtccacaaaacctagggtttgctcccacctcctctcctggtcattcctccacctatataaactcctagcagccaccattttgcattttgggttttgtttggatgtaagtttagctgcagctacttccttgtactcgcgtgtgtcggctagaccacccggatgcttgtattcagaacaccactttggtttgtttcaatttcatcatttgacaagtactatgagctgtttccttgtcaacttgtttttgcttgtttttcgattgcttgcaggttcaaggttgttcttggcacgacaagaacagcaacaacgtggagtcggtgtaccggttgctaaggcgcagcacccctgtggtagttgtagtcggaccgccaacgttgtgtcctctcccaaatcgaagtttatcctcctctcatcaaaagatcgggaacccccgttgctgcatcacttgtggttgatcttatggatccccaatttttgttgatactgtcagagagagttgcaataatcaaggcttagttcttgatggggtcatgcccaggaggtgcgtgccgttgtgaattatttatcccctaatcctttggaaggatgaaacagattgtgttgcacaacagtatggtattgtggtacatgatagtgatggaatgcattactctctatgttccctattcttactttaatggtgaaatgagataagtcttttaagactaatggtttgaggatctgaaggattcttgcctacgcatacatctgagagatgtttaatgctatgggaacatgacatgtgacaatagttgttgtcagggggagtatgtgctatgtgttgattgtcatttgcaagacattgaaatgtcttaagagtatgcccggggcattgactcgatgatgatcacttagacctatttctaaggtcctatcataagaagatttgtctttattgactgacaccaaatacaagtgggctacctcacagactcttgaggcaaggtgaggtgagtagcaattcaagttgagtgataatctagttgattgatcacctagtttctcccaactgttagttctcggaagctgtccggagaattgggatgagaagacttgaggcttgctaagttcagggggagagcacccgagaacatgacccacaatatggaccggttagtccatagtgttgtactccttttcccttgggtgagtggagctgttgttcctcacataaggtttttaacgaggcaacaacgtgcaatgcatgagcgataactatgtactctttctcctagcctttttcccattgggttttggtaggagtgttgatgaggcatgagttggtcgcggattagtccaagggggagtgttgtaaaataaatctctaagagataagtttcttgtgggccaatccgaaccggagtagagataagatctatctcctcctaagatccctatatatacaggggcagggtgtgacatctatggctaatggctagcttatactccagatgagatctataatgaagagagagctccaccctacatctatgttcattgtatacttttacaatgttcttgagggtaaagggatgggcgcgggtgttctacatcatctcacacctctactgctgtgggagggacagggaacggatccggtgatccgctaataagcgcgttggtttataacagaaaccatgtctcatgcaagacctgatttccttctcttttctcatttattcacttgccacatcatttttcatcctaggtggcaatttatttatggtaaattggaaccatgccattataattttgcagagtttgagatatgcccccggtatatcaataacatgtaggacccacatgagtcaatggcatgtgggtcaggatggcatatcccaaattttgcaaaattataatggcatggttctaattttcctatttattttaagagagaatcccttatatactactctaaattaaccggctcccttatatgccactttaaattggcttctcccttttatgccaccggttcaagtttctcctcccttttatgccattgccgtcagtccaccgtcagttgaccgttaactttattgtaaaaagacgtatttgccctttagaattagtatacaaccaataataggtattttagtactaatatagctattggatataacatatgaaaattgattttttctgcatcacatgcaattttagccatcaccatcacaaataaattttcaatgtaagcatgaaacatgcaattttccaacaatatttttaatataaagagcatttttcactggttctgacaaaattttgttcactcaaaaaggatttaaaataaattagttatgattttttgaagtttacacattttttagttgagagggcatattggtcatttaagaaaaaaactaacctttgactaacagtcaactaacactatagtggtgggagtggcataaaagggtggaaaaacttgaactagtggcacataaggaagaagctaattttgagtggcatataagggaactggtcaaattctagtggcatataagggattctctcttattttaatgctatagacaccattctagtcattgggttaaaaaatggcctcatagttacaaatctgggcacacatgtgtctagatttatgattaggattgatttttttttgacggagcgggtatgtgatttttatgcaacggattggtcaaagccttcgcatgccaatagaatagctagcgcatccttgcatgtgaagcaataaaggccgagtttagttctaaactttttcttcaaacttccaacttttccatcacatcaaaactttcctacacatataaatttccaacttttctatcacatcgttccaattttaaacaaacttctaattttggcgtgaactaaacacacccaaatccgcattgccgaaatctgcatacaaaactagacgcgacaggtaaataggctgatcaattttgaatgttttgtttttttaacgctatgatcaaacatgaacagagagagtgttgatggtcgttatcgatcagtttcgaccgtcaatattaccaaaatagaggagaactagtaatgattgcaatgcatacatatgttagaataataatatttcactagtattaggtatactaacctcttgcagggaatgatactaaagtggaggagaatcgacatcaacatagacgataaatcaatcagacgatgtcgataatcagacttatgaatgaaagggccaagaacgcagaattgacacgatgaattaggacaaaattcacaagtctacgaagtgaagcaacggaggaggccaccagccgaaattgggctagattgggccggccccaggttcggccgaacctccctcgcctccgttggatccaggttttggctggacggttgatataaagccccaatgacggttggagggtattaccgaccattccaaccgtcacaatcgtcatagttcagctataaaaggacttcaccttctcatttcactcacacaactcaagcaatagctctctcatttctctcaagtttagtttagtagtatctagctggtggaataggaatagagtagaaatcaggagtccgaaagccgtcggaagagttcgggtatggctctagcagctttcttttcctcttttgtaagctttgtacttttattagaatactcttctaaatacatttatggtattggaatactttctaagtatatgagtacctactttatattatgttcatgttatattgaatatacggctagcttatctgggagatgctttggtgcgagtatagtgtttgcttatgcaattactctatgtcatgacgatgatattagagtagtatctggtagtttagacgtggtgtctagattacgggatatcattatttggggttatatattgcggatgagaggtgggtcacttttggtgacagctcagtacgggtattcctccgcgccggtatataatcctaagttaattccctggggagggtattcctccgtatttagccctggtcgtatggtcatgacggactgtcgtaaggaactcggcagtcaggggtggcttctcgaagtaccaggagggcatcggatagagggtattagctagtatatcagttaactagaatgtatgtatactatgtatattagaagtataggattagattttctttctcttttcttttccacttagctcagataatatattatgagaatgagtagtaatgcttgtgtgtcactctacccttagattatcttaacccctgcttaggatataattatcacatgtaatatataaattattagttgatttctctctacatgatcttccacgggataaaataaatacgatacccttggaatactctcgggtgaaatgctacaatggtatatccgtgcgcttgcagatgaactctgtaaccataatataccaggagtatttctatgccatttctagggattatatttctagtaatgtcgttaagaaataccaacagggagtataatcttgaaaactgaatttatttgatttatttaaaacattttatatataatgtttttgcacgaaacacatcgtctaggaatttaggaagcatgcccttataaaaactgaggaaatagaatagctactaagtagctgaatcaaactcagcctcaatgtcagtaaggcaattgctctgacaccctacaaattgttgttttagaaggtagaagaaaaatatgcatgtaaaatatagagagttggattggcatctgtataccaatataacataaaaaaaatggactagttttactaaaactggccatctatcatgcaaaccgtcaagtcatccattgtattagacgatgaatgcacatatttaaggccctatttagatcacacctcaaaatttttcaccctatcacatcgaacatttgaacacctatatatattattaaattttaggcttaaaaaataactaattgcacagattacgactaatttgtgagacgaatcttttaagcctaattgctccatgatttaataatgtggtgctaaaataaacatttgctaatgacggattaattaggtttaataaattcgtctcgtgatttactgacggattctgtaataagttttttttggtagtgtccgaacaccccattcgacaccctatataatacccgatatgacacgctaaaactttacacccctggatctaattaaacaccccctaagtataaatattgtgttgatgtagtaagcccacgtattctttgctaatagtataaataacatgcatcttttaatagttaattggctaaatagttaaatgattttgtgataactatccatagtacaatgaagcgaattaactcagagtaaatttcataaaccacgttttatagtcaaagtttcgtaaaaccacgggtattataatttttggcacataactacaagttttatgatgtaaatgttttataaagctccacttttattaaaatttcaaattttcaattaattttagtatatctaaaatattttttttaaatagcgaagagttaaaccgataatcaataactaaaagtttcatatacattctatgctttaaaattttaaataaatatttatcaaatatatataggagtctggctttgtgaaactttaaaaccataatagttgagattatgtgtcatcggtcataatgtgtggtgttttatactactttaaccataaaacgtgagatttgctgatttttttctcattagcttattatgaaatcgaaaaataaattaaaatattattttaaaaaataatatatatttttattaaaaaatcgtttataagcttggaatgcatgccggtgaattaaacagtcattataaaaaaaagcacacccgagtgtgttctatgtataaatgggggatgggatacatagctcacggtcttgtcaggtttttctagtttcgatagattccatgctgattgttgcagctgctgactggattctttctcttaccctgcctatcacattatccaaatccatcgattctgctagctactgggagaagtcccacagggttagttgcatcatcacgtcaagcatagcagataaacaatggtatgatattggatttatccctctgatgattttatatctgcaaattaagaggtcgtttgagtaacctcatggctcacctttgtgtgcacctttctaaaatctcccattttccatcgttcttttgatgttgcaattgtctttcgtttcgggttatgcgtacatgtgcacggttggtaagaaacaattcggaatgagcacaaagaaaagggaataaggccatagctagctaaatagaaaaattggcatgattgtatgaattaaagacgtacacacaccatcatgtacgcatatgtaattaagtacacgtatataagtacggctccttaacacagaccgaaatgggggcataaatcaaagacaatgaaattcgatggtgaaagccatatctgattaatgagagaacagattcgccatggccacaagcacgcattagtaacagggaacaatttggttccagaagatcatcatttcgtccaccttttcagaatccatttgccgactcaaattgccaagcttaattaattatgccaaagaatcatcgcactataccattaccatcaatcatgcaagggagagagaagaggtggaatcgagcgcaacaatatagtacgatatgctacatgcggccgcatctgtcaaactgtcaatgtgtcattatattgtgtgtgggcttgaagcaggaaagctaccgaagcactgcacagagtcacacaccgtcgatccagtggagactcagaagagcgagacacacgatccacggcttaaatcttatcttagctaaagctacgctttggtaacagctgaggctactccgaaatctgaagaatctgcactgcagcagtgcattgcatatgcttggccatggagatggccagggccagggccaggcagcccgacagattaacagcacgggggggccgggccatacgtactgcgtactctgaatttcacgaaaaagcaagcaacagacagcacaaaagtcccaaagttagggaagaaaacaaatccatgtgaccatgcggtttccgctctcttttatctccctttcccttggtttaattacccgtaagccatcgcttaaccacacaaacaacaatacttcgtctcacatttctctctttcttttatattgattttcttgctctttccgggcttaattaagcttgcacgcaccaaccgtccctctttcgctcacactcttccttccactctcccaatactcactcactctctctaagtttttgtgtataaatatgtacacgtcgttgtagtggctctgtgctcgctagcttcgtcatctaccactgcaatttacacgacggccatgatgaggctgctgctggtggcggtggcggtggcgatggcggcggtggttgtggcggcggaggagagggcgacgtacatcgtccacatggcgaagtcggcgatgccggcggagtacggggacgaccacggcgagtggtacggcgcgtcgctgcgctccgtgtccggcgccgggaagatgctgtacgcgtacgacaccgtgctccacggcttctccgcgcggctcaccgcgcgggaggcgcgcgacatggcggccatggacggggtgctcgccgtcaacccggaggcgaggtacgagctgcacaccacgcggacgccggagttcctggggatcgccgggaacgacgggctgttcccgcagtccggcacggcgggggacgtcgtcgtcggggtgctcgacaccggggtgtggccggagagcaggagctacgacgacgcgggcctcggcgaggtgccgtcgtggtggaagggggagtgcatggccgggacggggttcaactcctccgcctgcaaccggaagctcgtcggcgcgcggttcttcaaccgtgggtacgaggcggcgatggggcccatggacaccaccagggagtcgcgctccccgcgcgacgacgacggacacggcacgcacacgtcgtccacggccgccggcgccgccgtctccggcgccagcctgctggggttcgcgtccggcacggcgcgcggcatggcgcccagggcgcgcgtcgccgtgtacaaggtgtgctggctcggcggctgcttcagctccgacatcctcgccgggatggacgccgccgtcgccgacgggtgcggcgtgctctcgctctcgctcggtggcggcgccgccgactacgcgcgcgacagcgtcgcgatcggcgcgttcgcggcgatggagcagaacgtcctggtgtcctgctccgcggggaacgccgggcccggcacgtccacgctgtcgaacgtggcgccatggatcaccaccgtgggcgcggggacgctcgaccgcgacttcccggcgtacgtctcgcttggcaacggcaagaactacaccggcgtctccctctacgccgggaaggccctcccctccaccccgctccccatcgtctacgccgccaacgcctccaactccacggcgggcaacctctgcatgccagggacgctcacgccggagaaggtggccggcaagatcgtcgtctgcgaccgcggcgtcagcgcgcgggtccagaagggcttcgtcgtgcgcgacgccggcggcgcgggcatggtgctctccaacaccgccaccaacggcgaggagctcgtcgccgacgcgcacctcctccccgccgcgggcgtgggcgcgaaggaaggcgccgcaataaaggcgtacgtggcctccgacccgagccccacggccacca

SEQ ID NO: 20713 - DNA, 12398 bp, Oryza sativa
gaggagcgcgcacccggagtggagccccgccgccgtgcggtcggcgctcatgaccaccgcctactccacctacgccggcgccggcgacgccaacccgctcctcgacgcggcgaccggcgcgcccgccacgccgttcgactacggcgccggccacgtcgacccggccagcgccgtcgacccgggactcgtctacgacctcggcaccgccgactacgtcgacttcctctgcgcgctcaactacacgtccaccatgatcgccgccgtggcgcggagcaagagctacggctgcacggagggcaaggcctactccgtgtacaacctcaactacccgtccttcgccgtggcgtactcgacggcgagcagccaggcggcggagagctccggcgcggcggcgacgacggtgacgcacaggcgcacgctcaccaacgtcggcgcggcggggacgtacaaggtgagcgcggccgccatgcctggcgtggccgtggccgtggagccgaccgagctggcgttcacgtcggccggcgagaagaagagctacacggtgagcttcacggcgaagtcgcagccgtcgggcaccgccggattcggccgcctcgtctggtcggacggcaagcacagcgtggcgagcccgatggcatttacgtggacatgatgagcgccgccaagtcagagtggtcaccacacacacacgcacactaccacggttaaagggctggagtgtaaaaaaaatatttgggtggatttgggagggggtttaaaaatttggtggtatttcgaagtgttcataatgctattaatcttaaagtttagatggtgatttttgagagtgaatgttgatgggaggtcttgggtgatgggttggatggatgttgctttcttggaatcaaattattagagttaggttggaatcttggggctcttggctagctaagattggggccagggcagggctggaccagattgcaacttttgcaagggcagctacacactttcactgtaacaagaggaaacttgttggggggggggggggggggctaaaacataaatgtcctcaacaagttcccagcaaaatgtttcacctaaattattctttgttcaatggcatttcctggagtgttaaaaggtgattttgcttgtgtgatgattgtttttttcttatgggctgctagttactctcagcaaaattactacacatctacatcaaatacatcaatgatgtaatgcagtggacagcacgatgtaatggtgcctttggggcgaagcttttgtgacgaatttcaactcaagtggattgaaacaggatccatgctgtgcgtaatcgcactagaaactctttgctgtttgtcgcgtccacgatgttttcttggctgttatttatttgagcttgtacgacccatgacgtatgcttgcataatataaaaagcatgtcatacatgtgtttgtgtactcctatatacatgtattttttttatacttatctgtactgcatattttttttcatattttggccaagaatcatgaatatatgcatggatttgccctgaagagtacaatcatagtatcctaaatctattagattttataatattattctaatacaaaattgactatcaaagttttaaaaggtctgataatatattgtactactaaatataaacactaagtaattatataaacattaaatacccctataaatcatttgttgtcacgcttttccttacaacttaactttgtactccctccgtcccataatgaggtatgtccagattcgtagttctagaatgggtctcatcccattctagattgcaacattacgggacggagggagtatataattaacgctcccacaagtcaatttctcttccatatttcccttcaatatctcgtgccctagtaaatctccaacatggcatcctacacaggaaatttgccttaaatatttcgattgatcgatatctcaatctgtttacatgagctcttggtttccagttttttgatatagagacatcgtctcattggaatcggagcagatgaacggcgccggtaggaggcacggccaacacaaggccttcagcagtagtggcagcaccaatttggcatccttaacacctcagctgcggcgacaagtgactaccatcacatttcatcaagatatggattaggaagatactcgtagatgtggtgtgtttctctgatcttagccttttgtattgacgcacttccagcgatcaacgttgaacgcttactagctactctctccgtcccacaatataagggattttgagttttcacttaaaacgtttgaccactcgtcttattcatttttttttgcaaatataaaaaatgaaaagttatgcttaaagtacggtagataataaagtaagtcacaaataaaataaataataattttaaaattttttgaataagacgagtttcaaacgttacgtaaaaacttaaaatctcttatattataggacggagggagtagtaggtatgagaagtttgagtcagccataagaaatcaaaagaaacaaagagggaagtggggtgatggaagagaaattgacttgtgatgagtgttttgtatatatagagttaagttgcagggggaaagtggagaaaacaagtcacttgcagggatactgggatcgattgcttattattttatagcctatctctagaataaataaagtagaggactaatgggggataagtttgacactcgtgtgcgtgctagctctagcacattctaacacacatggttggagtgtttggtaggaaaaaaatatacaaataaatcagaggtaaattcttttggaccttgtatagtcgtactcttaatttgagtccaaatttgtcccatgaattaagaaaactagctacaaattgggtagggagagaaacgtcaaggaaaaacattgttcaaaccttaaaagaaaatatgtctggctgccagaccttgacctgctaataaacggcggcatgacagtcgacctcatggatcaactcatcaccatatggaatgttgtgcaacaggttcattttgccgaaggaaaggaagaccagataacatggaaactcataaatcacggtgaatacttggcagcctccacctaaaatgcccaattctttggctcggtccaaataaagttcgagatgctaatatggaagccatgcatgggcactgaagaaatgcaagtcctttacatggctagttatgcaaaacaaagtatggatatttgcctaacaacaccttttgctcgctatgccggcatgaacatgagacatcctactaggctaccacctcctcgccagttgtaggaaaggatatggaattatggagcatgcttgctgcctggacagcattcaggtcactagacccgtcatcttggaagacgagaatgcatgaccgtgcacgagtggtgggaagggccgtcaaatgtggaaggagtgcctaagcaagtgctaatattgtccttacctcgtgggagatctagaaagagagaagccaaatagttttccaacataaataactctcaacgctagctatcatagcaaaaattaaagaagagacaagaacttgaacttggacactggcagtggcaaggtgattatcctggactaccttaggcgctcatctcttcctttcttctgtagaaaagtctttattaccatatgtgtataaattttactttatctttattcaccgaaattggcgctagcttgttcggataaaaaaaggccttattaaataattttcataattttaaaacctgacaaacaataccatatactccgctactctgtcgtatcaacgtcaataattttcattggcatgacccttattaaatatttgggatcatttgatatggacttaatcaaatgacatccacaagaaaaatgtgttgttttttccagctttaaacattaaaagcaaatgtgaattcgggaagtgtttgttgactgaaaatactagcattatcctaaattaaagcaccataaagtatcaatttggaagcacaatatgcaagaaagagtaacttaacgtggaagtaaacaatgagatggtgtggcattaaagatgcaggaagtctataccaatgtctcagagcatggaagaagataataaacgagtcgtcttaaagcacagccattcctaagatagagggaaagcaggaggggagggagagagagagacatctcttgatgaacagacatcttggacgcaacttaccatacaatatatgtacacatcatattcgttttattagatgacacatgactcatgagacatattattgcaataattctttcagtacaatccatatataatgagaagcacaatagagacagaaattatccaagctaatattgtacatgcttttaaagcctgtacagtgcaccttaaacgtatggcaatttaattatatttaatttttctatcactagatgcagtctatcagcaatcatgtcttccctaattaagtgcatcattaaacaagctgtgtaaggtaaagagaggcaggagcagagcaggccagtgaggctatgaaaagaaggcgaataaaagccggaccgctggttcaggtggtgagaaagcaggcaacccaaaaaaaaaagattaaaaccaattaatggcactgtgacagtggtcactttaataaaagcctaaagtgtgcagcatcctcgtgacatttgccgcttaaacaacagagagcgatgagtaaagaagacagagtcagagagaaaaaaaataaagatttgctagtagaaagatggatggatacgacgaataaagcaaagcaggggaaaacaattgttcgtcgtcacgatcttgtgcttggaatcgatagacatgcatggccccgtgattttaacaaataatgcagggctttgatagatccccagctggaccagtgtttgttgtgccttttgatagccttctagagaggccaagttctttttaagatcagggggttaattgtttgttgggatgaaccagaaatgtgggcgatggtgttgtttaactatgaacaaaaatctattcattgtattattcaggttactaagagaagtctgaatatttgctgttgaagtgaagaaattaccgcattactttattcttctttcaaaaaaactagtggtggacgtgggcggtgaatttccccctacacccacaaactccctaccgtttttaacgataaaaaaaaagtgcctgggtcaaaggcttcacttatcagatcaaaggtataaacataaattaaagagatgtatgtatataagtgatagtaaaatggattgatgacattctacttttttttttgcaacacataggtaatatgatagttaaggggaaaaaattaatgagaaaaagttgttccatcgatcgtatatggttttggtctaggctatatcacgtagatgctacatatggatgcaaaagcaaaacaaaattttatttttaaaacaaaagtataggtcgtatatcagaaacatttgtattttcaactgttaagcttcacataatttaccccagcggctttgagtttggaagagagttaataattgtcaaaatgtcaagcccacatgcacatatattcccactttgttactaaatctctttctccaaagtcgcaatgagcatccactcaaagcatggggtacaagtgatgagaaaaaaaagggtgaggagattatgtttgaagcatgtgacaagggcacgacttaagccatgacatttaaattctagtactatattcactcacacgctaatatatattttacgagtattataacattcagaaatctatttgtcgatcactcaacctcgttaaatgcctcctgaacttttacaaatgtggtgtttacgtgtggtggtgacgtggtatgtatgtacgtccatattcagttctatttagtagatgagaaaaaaaaggcgagcagattattttaatgtaactctgttttcaacgaacttttaaggtaacacttttatgttgcaaagaggctaatggtagaagaatagcaagagaactagactcaaaagtatacctgtagagcatttcggccccatcataattttcagactgcatatgagcccaggcaaggttacccaacaaccttcaagacaaataagagcatcagaatgatatgtttactggttgaataacaatgtatgaaagattttaaataccatgctttttcatccctgagagacaaataaactactcttccatgagatttagacaacttagttttccaccggccagaagctagctcctcatcaacaaatatcaacttcaatgtcagcatttcaatctgctcttttgtcctgtcgcatttctggtttcacattaaaatgactagtatcagaacagaaatggtcacatcttcatctaaaattaacatgtcatcagtgcagcaatttagatgtgtttaggatctactgctatagacctaccaaatcacagaatttctttacaatagaaagatttagctcgtaggttcttggtttacaggccaatataccttgtataggtcaagaagaatattgtcaagagatttctaagcttcatttgggcaacgatcatgaaaggatcttattgcctcaatagcctcttcagctcaatttgcttgtttcagtacagtagccatatccttcagtgcgctctcaattcgatcaccactgtttatagccgcccagaacaatggaactgccttgtttgggtccttttcaatcacctgcagataaaacaagacgagaaaacaaaaacctcacagatctagcttatgaaaatttctagattcaggattattacatgcattttcgttcacaagactgaaagagctatagaaaaagaaacgccgtcactttgcaaaaatgcaagtaacatgtactgaattatttagcatgaatatgttgaagcaacacttaagggaaaaattaatacccactacagttactagttagaatagcatgcatagtggcaacccaagtagtgtggctggtgtctattcaatcttttttgagatggtctgttcaatcttttggtacaatagatttctggtaacaagggaacctagtcatgagaacacaacttccatgtcactttaagatttacactaatactggttttgttaaagaagcccagaagtagttttgtctgttcatggaaactaccttcgtattctctcttctggttcaattaaaagtgttttttttttttttgaaaacagagaagcagagcttcccctttccattactggaaacacgttcagattacagagttctagaaagcagaaactaagcaaaatgctaataagcaagaaaagcttcacaccaaaacgatgccaatcccatcgctttttgtaaagtttttgccccaggatatcctaaattcatttcaaacatatcatgaatcaatggaagatactgtaagtctgtaactaaaaaaagccacaaaatgcttttgcccttcctgctcccttacaaactactcattagctaaattaatctagcacacacagtcaacatactgagaatgcttaagtcaccgaatttgcagcctatctatctccagagtaaacgaaattgcatcgtccacatgatgggttgcttccaattacctgagcctgcttcgcccgcacgtagggcgaatccaccgacgacggcggcgccctaggtggccgggaacacccgccgctcgtcggcggcgtgacgcggtagccgtaacacccgccaccgccgctcgctgggggcgtcacgtgggacaagcacccgacgctcaccgggcggcgtggcgcccgcaggtgtgcaggggctccacctcggcgcggcccccctcggcgacatccacggcggcagccgcctccctccactcggcattgcggaattccgtcaaacacctggcacgcacacaccaaaatccaccaaaacgaaccagatcaaacataaccaaattaaccccgcatgcggcgtcccccacctcgatcgagaagacgagaacccgccgcctcctccgccgcgctgtgctcgggctcgacgcggatcacgccgccgcggagtcgaagcgagtgggagggtgacgcgaggacggaacggcggcgcgcgcggggaaggaggatttcaaacggggaggttggggcgatgacgtggactgggaggtgggccccacggatgcctacgtggacgtcgtgtcacgggtttcggatgaaacggcagagtaggtgcaggtgcagctcatgtggctcctgtgatgtgagattgcgtttgtgtgaaccacgcatacaatgtgttgcttctggcttattattgataactttgtgtgtgaaaaaacacaaaacaaatgtgctacttactgcatgcattttcaaattggaatttcttaacttactgcgtgcatttccaaagtgaaatttcttaacttactgcgtgcatttccaaattggaatttgtttttgtttgaaattgctgtgtacatggtgactgaataaggtgcgaaagaatctgacaaatgaggcacgaagaaaagaatctgcttttccgttatctgaaaatatatgtgggttgtagcttctgttgaagcaaagaccgggtttaatatccattatctagagatgcatttgatagtgcaatggtaaaggatatatggttccaaccctaaggtctcgtgttcaattctcaacacgctcacaatttcttattaagtaattgtttggatatatacatgcaatatgtgttataatgtacaatattttgaaacatatcatatactaataataatgaaagagtgaaaaaagtagtgatgacctcatgttctattaaaaattactagtaatatgcccgtgctaaacgctacggtgcaactctatttttctttaataatttttaaaattttcatgttagcaaaaaaaaaatattatatgaactgtgcatttgagttttaattcaatttatgtcatacatcaaatatatttcgcgtaaagtataataatatgaaataccaattcatgcagatatataatgcatatatctataccccatgttataatacataattatatgatattaaagatatatgataatgtgtatatctatgccttaagtcatattgcataataatatgatatataatgcatatatccaagacacgcaaaataattcacaatagcattgatatcaatatttactcatctcacaagcgttctttttgtatgtagcgtgcgtgtgtgtatatatttgcgtaattataatgcctcacaagtgggtggtagtttttatataatatagtgcattttcatattataattatttttatattacatgcccatgctaatgctatgaggtggtatttgatagctcaaaatgaaaaggatataacaccacaatgactttaaacttttgatattttaaaggcattacatttccacatagaacggatgttattaaggttgaagaaaaaaacataaatagttactccagtgacaatcacgtggtaccgtatatgtttctcctgacgtgctatacaaaatgaaatgataattgtcagcaggattcaaatttttaatttatttttctaaaacatgaatgtaaaccatgaatattgaaatgatcttttacaacaaaacttaaaagcatgtgttattacccgtcattgttcaccaatccagaacatctttatacacgatatttcttgtgctccttcttgtggggtccaccttttttttaaggctttgccaaaatctttgtcgttttccttgacacccctcttgataatgcaacataaagctgcccttgcgagaatacaggctctagaaaatagataccgacatgtgttaattttataatatggtcccaatggccccatcctccttttattcagcatcaatgctcgagacactaatgtgaagggacaataacaatgcacattttagtgctctacatttcggacaacttaatgtttattaaaaattaacttgctctgtacctcctctcggtggcggagggaatttgggttggctgtggtggcgcttgaggcggaggaggtggcaacaacgtgttggcggagcagaccggcgagggatgcaatggagttgcggtgcggagatcagattggcgacgatatgcaccagaatccgagcgatggcgatctggcggcgtggagatggagatgaggggcgagatcgatctggactggatccctattggtaattgcaaggtgcaaaataataattaatattctagggatcagagaatcaagagaataatttaataattactaactggaaaatagctcaatttggaaaatatctcaatttggagcagtacatgtacagccaaaataacccatgcatggagttcccctagtcattcatgagtagtacacaatgcgcagctaatatatatagttccaaatggacccgtgctaacgctacggtgacatttaaaatcaagtaataaaaaaaggcgtatcctccaacaatcaggatgacaagacatgttaggacaaccgaaaattaaccatgacacgttccataatagtaatcattccataattcataatagatgcacaagcaatttaatttgtaaaactctttttcacatcgtaagtgcccagataaaattaatgtggcaccaaatgaaaactattaaacatagttatgagccaatggcattaaatacacgatttcctccactgcatttacactcctgtcactatgtttaaactcaggactaaaagaataactcaagagcagattcaaccacgtgaatgatgggtacaaataactctcctatcaccaaacacatattatatttaaatgttataatacaccacaatatggttgtgcagcaaggtatcttctatactctcattactgaatcttgattattatctactgtacaaaaccatgtcaaatatatgagcaacaggttctgttgaagagctaattattagtaaacgatacatctgtgatgggtcctccctagtagcaatatattgaagaggatattttttcggcccgtcagagatgactcatctttgacgagttgtgttggcccgtcacagatgacccgtcactgaagcccggatccgtagtagtgctatttggtttcctgcacttcacactatctcaattcttatcacagtacttgggaacatcaatctccaattcagtttagtcttgaaaatagttttgcagtcgagtatgtcagtatttctaatatgatgctgctcgtaaattgaaccaatttcttaaatttgccaaattcagatttcttaaattgaaccaagccaaccctgcccatctgattaggtggacttctcatctgctggaatagatgtatcagttgatctcagtttggcagtaaccaaataaaccagaaaatgttgtaaaaagtacttagagtgaggataagagcatgtgcacaataattcagatgtttctagcaccacagaaatacaaataaacagtaccagagggacataatcaagcacaattcacatatatttgagagatgagatatataacttcatggaattgacacaagagaaggtttcttggactcaccttggagagagcggatagtaggacgatcctgatggagagcaacactgatagggaaggtagaattttgctttggtatatatttagctcagtatctacctaaatgaaatgaaacaaaatcagcgagggagttttaaaaataaaataccgctgacctcctaaatgcagtaatcacagctacagcaaaaccaacttcattcagcttggatgttttcattagtaaaatcacaactcagacactaccgcaaaaaaaagataagaaccaatgttgaaatccaatcatcagaagaacaaaaacgatggagtatagtataacagtggaagtacagtaaatatatatgcttaattctctgatcccatacttcccctattgtcacatcaataccgtacacttgatgatttgaaattcgaatcgtcatatactgctatacatgtggcaaatgtgaaaaaataactgaaagatcaaaaatctgattttggagatcttaacaaatgtaaattgtctaaaataccctagaaagaaaaagatgctcccacaatcacatggtcactcattgaaagtcacaatctgattaggtggacttataatgtactgcaatagatgtatcagttgatctcagtttggcagaaaccaaataaatcacaaaatgttgtagaaagtacttaaaatgaagataagatcatgtccacaataatttagatgtttctaggaccacacaaatacaaataaacagtaccagaggcacataatcaagcacagttcacatatatttgagagatgagatacataactgaatggaattgacacaagaggaggtttccaggactcacct

SEQ ID NO: 20714 - DNA, 2584 bp, Oryza sativa
gagttaagttcagaatcatttattctaactatcattataatttttcatctgatttacaggaagaaacttttgccaccttcatgtagttgttatccatgttttcttcatgcatattttcaccagatactggttataatgggttgcatggctgttcttccgagatttccaacagtgtgcagagctgatataactcaatcatgcatggtattattccatccagaccaatctgaattatatttgttgaatcgacaacccaattgagaccatatgaatccttgcaatgtggctttctattggtaaattagagctaaaaaacaatatcactacgataggaacgtttttttggtcaaactgaactgaaaagaatttgtggaaagtcagaacataattgaactacaaaaataatatcactacaactgttttaaccataattgttgccctatgatggaaagtcagaactattgatatggcatgtcagcaagatttgttttcttttcagcaacagagaaactgtcaaataaaactataaggagtcacggaacattcgctcatttggaataatagatgaatctgttacaaagtaataatatagtctaatatgatacaatcagataagttttgtacaggttgaatctcagttgatgaggagcagttgataataatatgttgttgatgatgtgttgagctataccgtgaaatgagatggcagtgagatgggtggcgagcagggacagcggtcaggccatcaggatcgtgttggcgtccttataaggtcaggccatcagggtcgacggttggtgaggcgttgatccagggtcgtgtcggcgtccggcgttgatcggcgtccggtctccaggtggtgcagcatgatggcgatggcgaaggtagagccgtagaggtgcgggcgcggcggcagggagggatgagggcggtggcagggaacgttacggcggcaggggagggatgcggttcagagagagaggagcggatctgggagagcgagagacgagcggatctgagagggagagagagagagagttgcgtgctgatttagggtggtgggaggtgggagcgatctcgatcgttgaatctcagcaagataatctcaaccgttgagtgatgaatgaaagaatgaaggaatgattgaaaccatttgttgaactatagggtagaagatcattcgtccagtatttcttaaaataaaatcttcaattatatcttcataattaatcatgtccaagatatcattttcaagtgctattgttgcaagcagcaagctatatcaccgcctccccgttgccgcgcgtggaattggatcgatgtctcggtctcggcagtcggcgcagcacggaattaggatcgtcgcgcagcagcaggaggtacaaattatgcgatcacacaacctaatagtgccacaccttgtctcggccttgttggtccatctatctattgggtttgcattgcaatagctgaacaattggaagtggacattcatgtttatatagggcccaaaaaacacagaggccatgttcgatcgcctattggcacatggccatcaatgggcctgttcttttttgcgctgctaggctgagttcgaatcctttgaaggcatgttttctcaccattttcctagggaataagttcatatgaggtcccttaacttgtcaacgaatccgattttcgtccctcagccgtaaaaccagatacaacgtatccctcaactatcaaaaccggtgcaaattaggtctcagggcggttttggctgacgtggcgtccacgtggctaatttgactcatgtcttaatctgacgtgacgtttaggtagcaattcaattcgaaaaaataataaaactagtgggacccacatgtcagtctcacatagaaaataaaaaaaaaatgtgggacccgcatgtcagtccaactaaccctcttctttttcctcctctctctctccccatctctcctctcttcatctctcctctctctcttctctgccgacgggcggcggggagacgggcgggcgactagcggggagaaggggcggcgccggcagccgatgaggatatggcgctccgggacaggcggcgaccggcggggagaatgggcacggggacgggcagcgaccgacgggagagaaggggcgccgagacaggtggcggccaatggggaggacgaccgacgagcggcggcaggcggggagaagggcggcgcacctcaccatcgcggcccccgccctcgtttccaccgtctccacggccacgcacctcgtcgcgttcgagctccgcccgccacggccacgcaccagcagctgcaacgctgtctcctcctctactaccgccgccgcatgtttcccctcggcgaaggcgggcctcacgggtggaggagcatggccaccgccaccgccacaggccccctccctccgcggcattcaggtcatcgcctcgcgggcggaggagcatgcccggtgccatcgcctcgcgggccgcagccgcgcggggcctcgtcccttccgccgccgacgccaatggacgctgctgccgtcttcctcccactcggtgtcaccgagtggcgcccgagctcctcct

SEQ ID NO: 20715 - DNA, 16459 bp, Oryza sativa
acctccccgttccaccccacggttgatctcacctccatccccgccaccaccgagttccccgccgccaccagcccttccccaaacccaccgccgcccatggagctcccttcgccttcctccccttcattgccggtgccgcaccgctgcgcctggctgcgccgctccctcctctctcgccggcagccggccaccgcgtgccgctgcctctccgtcgccgggagagaggagaggagagatagatgaagaggggagatgtggagagaggaggaagaagaggagggtgagttggactgacatgtggggcccacatggatcccactatttttttattattttatgtgtgagactgacatgtggggccacatgggtcccacaactttttttattattttgtatgtgagaccgacatgtgggtcccgaggattttattatttttccggctcgaattgccacgtaagcgccacgtcagtaccacgtcagatgaagaccgagtcaaattagccacgtaggcgccacgtcagccaaaaccgccctcaaaaccgtcgagggacctaatctgcactggttttgatagttgagggacttgttgtgtctggttttctggttgagggacgaaaatcggattcgttgataagttaagggacctcaaatgaacttattccttttcctggcagcatgctggcctgggcctgagtttgaatcctttgaatgtaggttttctcaccattttctagccttaaatttagagttgattttgagattttttcatcatactttatttttcagtctttacttttagatcgctaagaacacacatataaaagttttatttaccaattttttttcgtttgcaactatgtcgtttcgcttattccgtcaataaacgaaacgatggcctcgagacatttttttacttgaaggcacatgcacgaatctttaaataataacgaatctttaaataataacgctgtcagcaaatcgacttatttttaacgaaaatttcaacagatatatagcaattcaaatgtgacggttaggcaacgatatgttgcatatgcttgttcaaactcagcttgatccaagaaagtccaaaaactttgagaaggccagagaaagcctcaagaaacctaagggcatgttcaatacgtgcccctggagagtatccctagcccttcgtcgacggccgtttgctttttcgtccgcggcgtcccccgcaatggaacgtatccctctgctgggggacgagactctcttcgtgcctcgccagcttttcgtggggagtcacagccaggcgccgcgttgagcatgtgtggagctcgtgggcacggcgtcgttcccccaaattttcctttgcaccctcgcctcactctcgctctcccctcggtctcattgtgccgcgcctccttctctgcctcgccatccgccgtcactggggtcggagccagatgcatctcccccgctagatccatccgcaccgccaccaaccgatgcgcccaatgagcttgacgaggagctgcggggttgaggggtcggcgccgcgcccaccattgctggcaccgccatcgtctccatcccaatctggccgcgggaggaccaaatccgctagctttggcgctagatctgctgccctcggctggcgacggcgtgaggcggaggaggccgggaaggacaacgacaacagagagagggagagagagcggtggagctcgcccgccatcagtcaaccacgctcgccgtcggccaccccgcgcatcgcttgccgtccgccaccgcgctcggcaccggcgaggtggatggtgatgagcggcggggaagagagggggagatcgacgacgaatggtggcaggagagagagagaggcctaggagagactgacggatctggtgaggcaccggtgagacggacggcgacgagcggcggtgggctggcgacggcgtggagtagagagggagaaatcaacggagtggaggagaggagacgagaagagacgaggagaggggaggaagaaaagaggagcacgccggtgggctgatgggcaagcagggaggggtactttcagaacttttcacttaggactaccttgggccgggacacccattgtgggctaaagtatcttcatcaaatggcctcagattttgaagaactcattaggggtgtcctctattgagagatgagtttcctaaatagtgtctttagttagtgagggcactttaggagtggctttggttgtataaccttaataaagcctggcctagaccaagaaaggcaagcttttttatgtcaattcaaacctacattttctggttccctcatctcttggccttagccaaatagaatcaatttagtcctaaattcaggtatatcagctcctctaaatattaaaaccagtacaaaacgactctctcggtgtcaagctctccaccactagcccgcaattctgcatgggcatcgaactcggctcctcatggaaccctgccacggctccgtccgggcgtccccgccgggcggccgccgggacgaccccacgcccgcgcctaagctgctccgggagatgcagccggcgctcaagcccatcgaacggttccggtggtcgcgtgcgcctattgcggcggtgcacggcggtgcaggccggcggcgtcgagatcgtggccgcctgcgacatgcagtgctgctctccaaggacactacgtttgtgctcaaggtggtagacatggccatcgatcgtcgccgtcgtcggcctccaatggcgggaaagcttggctgtacaagacggccccgagctagccggctagtgcacggatatataacttctcccagttcttcacctgcttaaccatgtgttgcacaccatgtgctcgagcacgctggcgatcgatgctcctgaaccggatggatgtcaagtgaaaaaggattgcttcgtttggtcgcgtctccgtatagaaatggcaattttcggttcactcggtgtatgatgcgattgtgaactctagtgtgacggtccgcaagaggatctcttatataggaggttgaaggtgccactgaaaatcatagtatttatctagttgtttcatatcaaaataattctaacaaaggataaccttgcgaaaaagagttgcgaggtgataagcaatgttgttttttagtgtgcaagagacaaccaacccatattctttgaatataacatagcacgtttttctcggggatgtgtattctttgctttcaatattactagttgtggagattatggataccccatatcaacataacagttataatttagtcggatatacggtaccaaatatagatagaatatctttatgaggactcgggttagtttctaacttgtatgtcaaggaaatacccgagatcttagtcggttacgattgtattttatttgtaatcgcatattccgttagggatatggactgtattttgtaatacggatcccttcccctatataaggaggggtctgggttcctctcgggacgattctctttttcccaaatcatacgatcaataacatactcggcggaatcatccccggacaggagtagggtattacttcttgaataagaaggcctgaacctgtataaaattccttgtctccaaacccatccacttttctagcttgatagccacccccttttagtattgtcgaaatcttgtttcgacagttggcgcgccaggtaggggtagcatcaagttcttcgccgattagtgcgatgggttccctctccggcatcgacgacctcgtcttccccccgggcaggcgtttcggttcagcagcctcgacttcatcaccaacgacttcggcaagatctctctcctcgactcggatccaaaccagtcgggagagaaccaggtttcagccccattcggtattccgaactcggccaagatctgctccaagcttatctcgatcgagttggcttcaaaccactcgaacgagatccaatatacttcaacttcaccagatcaaaatgatggggcctacccgccaatcctgatgaaactccacgacgatttggctgccgtcttcactacaagggcgtcttctccccgtaggcctaggcggaagtcggcctcaacaccgatcccgcctagctccagggaagtcggcgtcatactccagccactcagcacgatttcgacggatcaactcgaagtctaccttagctcccccggcgtcgactcacgaccaatagagatcgtggaatacgacgaattcggctaccgctatgacaaccacaacctcgatgacttcgacgagagctttgaagacaattacacccctctctacttcggcgtcttcatggccgacaacgagacggaagaacaacgccaagcccgagaagcagaagcacgtgtacagtaggaagccgagcgacgccgactggaagaggagcgccaagcgcaagaacaagaacggctgcggtgagagcaacaagaacacgaacgggctgcaaaggaggccgaagaccgacgacaacgagccttggacgcagggcaacaagcacgagatcttatcgggcaacaagacgttgaggggacagcggtcttccgcaccccccaacagaacgccgtcgccgcgatcacccttctcgacaccctcctcaaggaagacgcactcaaccaagccgatcacgtcgtcaacattttgaaccagaccaagaccatgatcgccgcttcagttccggttaactccggcagcgttcgcacgccgactggtagccgggttccctatctccgatctcatgattatcatcagccaagcctcagcatcatcggcacaggatccaatcgcaggagcaggggccacgacgaacgatctgttcactcgcgtcccgaacgtcacagggaacgccgagtcgaacggcctcgctctccacctcgccagcgtcccgtcgatcttcgcgacatgatcaaccagcgccgtgcagcatgaggtcaccgccattcaccagatcgctacgacgacgacgtggatggagtagctgccttcactaatgacctgcgtcgagtggattggccagccggcttcaagccgactggaatcgagaagtatgatggcaccactaatccggagtcttggctcaccgtctatggactcgcaatccgcgcagcaggaggagacagcaaagccatggcaaactatctacctgtggccctagcggattccgcccgatcctggctccatggactaccccgtggcacgatcggatcatgggcggaacttcatgatcacttcatcgccaacttccagggcaccttcgaacgccccggcacacagtttgatctctacaacgtcattcagaagactggaaaatcccttcgagattacatccgatgcttctccgagcagcgcaacaagatctccgacatcaccgacgacgtcatcattgctgcctttactaaaggcattcaccacgaggacctagtcggcaagttcagacgcaaatctcccaagacggttaagcagatatttgaaaaagccaacgagtatgccaaagccgaagatgctattattgcgtccaaacagtcgggcaccacttggaaaccgaagaaagacatgccggccgcaggagagaggggaagtaacaatcgcaaggatcgcaagcgtaagcccgaagaacttgtggcgacaactactccatcttcccgacaacgttcccgcgtcaacaccttcgacaagataatgaactcccagtgtccgcatcatcccaactccaaccatgtggccaaagattgcttcgtctacaagcaatttgcggaacaatatgccaagaacgcacataagctttcagacggagatcaaggcacatcaaagaagaaagatgacgaagacgatgccccgactggttttcaggacttttgcaaggagcttaatcacatctttggcggacccctagcttacgaatctaagagaaagcagaaactaaccgaacgggagatcaacgcagttcagcccaacacgccccaataccttcgatggtcagagatagcaattaagttcgaccgctcggatcatcccgaccgagtggtccacccgggccggtaccccctggtactagacccagtggcttgcaacgtcaagctccgaagaaccctcatcgatggtggcagtgcgctcaacatccttttcgccaagaccctggacgatatgcagatccctcgtacggaattaaagccgagtaatgcaccctttcacggtgtcatcccaggattatctgctacaccactcggccagatcactcttccggttactttcagtactcgggagaattttcgcacagaaaacgtttgtttcgaagttgctgatttcgagacagcgtaacatgctatactcgaacgaccagccctagccaaattcatacctgtccacactacacctacatgatgatgaagatgcctggtccttgaggagtcatatccctacggagcgacatcaagcaagccgtcacatgtgataaagaaagttgcgagatggcccagacccgcgagatcacactcgcccaagaagagatccgactggctgcaaccatggcaagcgaaggagaagtgcccgcaaccaagatgcccaaaagcggagaaagcgatgccaagaccaaaaagattcctttagatccctctgatcctaataagattgctgtaataggcgctgagttagattgtaaataggaaagcgcgctcatcacctttcttcaaaataataaagatatctttgcatggaaaccatccgatatgcctggtattcctagagaggtgattgagcactctttacatgttaaggaagacgccaaactcatcaagcaacgactctgccgttttgcacaggacaggaaggatgcgatcatggaggaattaaccaagctgttagcagcgggcttcattaaagaagtcctttatcctgactggctggctaacccagtcctggttcggaaaaagacggggcaatgacgcatgtgtgtcgattataccgacctcaacaagtcttgtcccaaagatccttttgggttactcgcattgaccaggtagttgactcaacggccggctgcgagctactcagttttttggattgctactcgggatatcatcagatccgactaaaagaatccgactgcttgaagacctcatttattacgcctttcggggcctactgctacatcaccatgccctttggattgaagaacgcaggagcaacctaccaacgcatgattcagaggtgtttttcaactcagatcggccgcaatgttgaagcttatgttgatgatgtagtcgtcaagaccaggcagaaggatgatttgattacggatctcgaagaaactttcacgagcatccgcgctttcaggatgaaactaaaccctgacaaatgcgtcttcggagtaccgtcagggaagctgcttggatttatggtgtctcacagaggcatacaagccaacccggagaaagttaatgccatcctcaacatgaaactgccgagctctcagaaagatgtccagaagctgactggatgcatggcggcgctcagccggtttgtctcacgactcggtgagcgggggatgcctttctttaaactgttaaagaaaacagacaatttccagtggggacccgaagcacagaaagcctttgaagatttcaagaaacttctcactactccaccagttttggcctcgccacacccacaggagccgttgttactatatgtctcggccacccctcaggtcgtgagtgcggtcctggttgtcgagcgagaagaagaaggccatgttcagaaagtccagcgaccgatctacttcgttagtgaagttttggctgactccaagacaagatatcctcaagttcagaagctgttgtacggtgtcttgatcaccgtcaggaaattatcccactacttccaaggtcactcggtcacggtggttacatcgtttccactcggggatatacttcataaccgcgaggcaaatggacgaatcgcaaagtgggccttagaactgatgtcctttgatatatccttcaagccacgaacttcgatcaagtcccaagctttagccgactttgtcgccgagtagaccgagtgccaagaggacacgcccgaggaaaagatggagtattggactatgcactttgacgggtcgaagagactttcaggcactggagccggagttgttttaatttccccaactggagaaagactgagttatgtgctgtggatacatttttccgcatcacacaatgtggcggaatacgaggcgctccttcacggactacgaatcgcaatctctttgggcatctggcgactgatcgttcgtggagattcccagttggttgttaaccaagtcatgaaagagtggtcctgccttgacgataacatgactgcttatcgacaggaagtacgcaagttggaagacagattcgatggactcgaactcacccacgttcttcgacacaacaacgaggcagccgacagattggataatttcggttcaaagcgagaagcagctccttctgacgtattcgtcgaacatgtttatgagccgactgtaccaagtaaagaaataatcaaggctacggacacccaagatgtaagcatgattgaagccgactggagagagcccctcataagatttttaaccaaacaagaactccctccagataaagatgaagctgagcggatttccaggcgcagcagactttacattattcatgagactgagctgtacaagaaaagtccaacaggaatactgcagcgctgtgtgtctttggaggaagggagacaattgttgaaggatatacactctggtatttgtggtaatcatgctgccgcacggaccattgtcggcaaagcttaccggcaaggttttttttggcctacagctgtgtctgatgctgacaagattgtgcggacatgcgaaggttgtcaattttttgccagacaaattcatctgccagcccaagagttgcaaaccatcccgttgtcctagccgtttgcggtctaggggcttgacatggtcggcccgtttaaaagggcagtcggcggttacacgcatctctttgtggctatcgacaaattctccaagtggattgaagctaaaccggtcatcacgatcacagcagataaagctagagattttttcatcaacattgtgcatcggtttggggtacctaatcggattatcactgataatggcactcaattcactggaggagtgtttaaagatttttgtgaagattttggcatcaaaatttgctatgcctccgtagcgcaccctatgagtaatagacaggttgaacgagccaacggcatgctactccaaggaataaaggcatgagtttttgatcgattgaatccctatgccagcaaatgggtggaacagctgccatccatactctggtccttacgcaccactcccagtcgggctacaggccagtcgccgttcttcctggtttatggagcagaggcaatgttgcctagcaaggtagaatttgaatctttgcgtttccgcaactttcgtgaggagcgctatggagaagaccgagtagatgatctacaccgactggaagaggcccgtgaagcagccctaattcagtcggcccgatatttgcaagggttgcgtcgttatcataaccgtaacgtcttattacgagctttcttagtcggagacctggttttgaggaaaattcaaactacacaggatcgacacaagttatctcctttatgggaagggtcgtgtataatctctgaagtaacccggccaggttcttatcgactaaagcgtgaagacggtacacctgtcgacaattcttggaatatagaacatcttcgtcgtttttatgcctaagttcatttctctatttccctgttttgaccgacaacatcaagctttcccttgaagttatctgtcgggggctattatgataataatggagtgtgatttttatcaattcaatttgcttacttgatttatcattgccctgcttggtctttcaacttagtcaatgaggactgaaggtttttaatagcttttgcgggttttaggttcaataaggcttgacaaaggcttttaagaaatcagaagctaagtatggaataccaagcgtagcataaattcatcagtattgtacaaattgtgcctccatcatcattaatcatcaaaatcattgttatatcaaccagtatcagtcttttcatcatcagaattaccaggaccagtcggtcggagatcgatgtcctgaaatctttcaactacatcgattgctatcttatcggcagatttttgcgcaccactgatgaggtcaagagcagcttcttcgctcgtcccgtctgcaaagccatcaatggcatcaatgtcaactcttggataaagggatttggtcatcgccaacgccagacttgctcccatacttccagcttctttgatgttcttgaaatatgtatccggagcaactctcagcttgtcgaagatttcagaagcattaagtgtactcgagccattgttattgaagaacatcgcttgaacaagtggggtagcagcgttagcgacttcatcccgagctccttcaagttttttgatcttgccaaccaggacgtcgaattgagcccgcgacttgatcttgcggtctgcatcaacagattcacattaataagtcagcatatggaagataatggcttttgaggtattgattattggtaccttcaacctcctttaaagccaagtccctctgtcttgccagttctgccttgtcattttctagagtttgaatctacttctccagttgagatatcttggcagcttgcactacattaactctggttaatcaagattacaaagataacaacacaagttagttgggcagagcttgtgcgtaccttttgatgagccgctcagttcaaaattggattcctggagctcagcaatccgatccctcagatcatgttcattcttcctggcaagttcttttgtttcgtgcagttgattcctggtggcttcgagggttctgagatgagggactaacctctctaaggctgtcgttttagctttgttcctaagatgaatcctctacaagacagtttaattagcgcttgaactaaacaacagacgaaatggttgagatcaggcgccaaagagcttacatttacaatgcaggttgcctgaccaagtgcctttttcagtaggcataactcttcgtcctctttttgcttgtttattacgattccttgaggctgcatgttgtcatcctaccacttgactagaatgggagggcgcgaatcctcagctgctcgtatccggaggatttcttcttcctcaccaattattggccctagtgtatccatgaataaagatgaagcaatcaaataaagtctgttggatcgtaatgatttcagatagcgtgtttacctgtgatgattcccggtcggggacgagtagactcttgtgtcttcgcaggagatctgatttctgagtcattgccagcacccttcccgggaggactgtttgtttgagcttcaacctcgggaatcttttggcttggccctgtatccgattggtttccagtcgggggctcctggttaactccgactccagcttcggccgactggcttgcagtcgtgggttcgtcgctgggttctacattgtcgctggcttgcggattatcactcgggtgatcttttgcagacggcccggtttcttttgaggaatctgcttccaagttagttgggtcagagtctttctcagaaggatctatgtcagatggtttcctacaagttttgccatcagtgttattttcatgatgggagaatattgatacaaggaagattgttatatgatttgtacctggaagactttctgatttttgggaaaggacgactggaggttttcttcttcggattagttggcttcggaggttttccggtcgttcctttatctttgagctttccggtatcatcgccttcatcgtcacttggaaccagcttcctcttgcgagaatctgactggccgactggatcagaagcacttggttgggtttcagaccgaattcttggtcccccgcttccctgaccagtttggcggtgaggtgattggtgctgggcgattggaggatttgacttcatcaatgcgaactcctgagcataaatgtcgagcaattcaacaagagacgaaatcatgtttttgaggaaggttggaacgttagaatacataccggtggaggaggattgaatgcattgaacggtacgactggcagcaagtgtgaatagctgacaacgatagcatttgagaagatcttatacatcctttccttcatgaccttgaagtcaagagaatctggatcttcacggtttgggtcatgcttgccgtcaaattcgaaggctgtgcgagatctctctttgattggagctaaccgacacttgataaagtgctgggtgatctgttctccttgaaggccttgttcttttagctttatcatcctctccatcagttccactgcttgcgcagcttcatctcccattgccagtgagttccaagtatcccgataaactggaggaagacaggagtactcgggaagagcaggctcagggttttgaacataaaaccaatttgcgtgctagcctttgtttgaggttttgaagggcatagagaagtatttttggcttaaggttcccctgagttggaaaccagccccccccccccaacaacacatggtttgctcttgtttggctgaggcttaaggaaaaagatgcggtggaacaaggcgaaatgtggcctaatacctaaaaaggcttcacaggcatgaataaaattggcgatgtgaactatggagtttgggttcagatgatgcaggctaattccatagaaattcagaattccccgaaaaaatcttgaggttggaagggagaaaccgccatagaagaaatgagcaaataccacgacttcatgcgtatcgggggtcgggaatgcttcaccgaatgccggtcaccactcgatgatctccttcatcggaagaacgccatgcgccaccatctccttcagattatcttccgtcacatcggagggcgcccactgactctcgaagctttctctttcttccgccatgaatgtgaactggatggtttaatttggtccgagatatggctggaaagagatggagaatcggagcagtggacgtggggggaaatttcgtgaagtttttaaggatggattggagtggattgatgaaccctagttttgccggcacagttttgtactgtagcaggaaatggggaaaatggcgagagtctcggcggggaagacgaagagacgtttcattttacttcggtgttattagggtatcaggagtactaatgggcttgggcctaaacacagtatttcggcccaattttattttcagcatgacccgttgtgatccctagggatttaggcgctttttgctttggcaatttgtgctcacaatgatgtggcccaatgctgttaaaatccttttaatgcggtttgataattctttggaattaacacgatgcaaacaaaaggtgcccgacaggaaggtgttatactatttttgtaagccttatgaggttgcaaaagctgtttgggttgattcgagatgactaatttattaagggtcattctcttagcatgttatatgcttaatttggttatggtgagagtcatagcttaggctattagactcgttgattaccatgatttttatcatgtttgatggatcattttaagagtttcttactcggattcatatcaaatatgtctatttttggaccttttaagtgtttattactcggcccttttcctattttttatccttgatatgttcaagttgagaagaagtcggctgagtattttattgagtaccatgcatgcttcgttataaaaccactcggttcttgactacatgtttagtttttcaactaatcacatagtcaggggctacacctaagtaggtgcatctactcgatgcaccatgttttatttttgcccttcacagtcttttagcactcggcaagctagagcaagttaaattgaagcactcggattactgttttttgtttcgagaaggctattttgtcaactgcgaaggtctcgggggctactgtggagattatggataccccatatcaacatgacagttataatttagtcggatatacggtaccaaatatagatagaatatctttatgaggactcgggttagtttctaacttatatgtcaaggaaatacccgagatcttagtcggttacgattgtattttatctgtaatcgcatattccgttagggatatggactgtattttgtaatacggatcccttcccctatataaggaggggtccgggttcctctcgggatgattctctttttcccaaatcatacgatcaataacatactcggcggaatcatccccggacaggagtagggtattacttcttgaataagaaggcctggacctgtataaaattccttgtctccaaacccatccacttttctagcttgatagccaccccttttagtattgccgaaatcttgtttcgacactacttctcggagcgccaaaaatatatttggaaattggtttatgggagtgcccagcttaaacaaaatggttttatttgggggccagtagtctatgatcaatttggtattactgaaatgataatattttttataataaaggattggctaatctatacatattatcttcacatctaccagctagctccacatttgatctttgacgctatcataggagaagcagaatattatgcgcactagtgctactcttatatataattgataactagagtttttttttcatttttgatggcatagcccctataaaattacttgcaagaatatatactggaaaacacattttcacatacaacaaaaatgccttttctcatgcgggttcagtatgctccttgacctgagatatgggcgcgtgcacaacgactgccctctctgctgcttgtcgccaccttcgatcggtggccatcgccagcagatctgctgctaccgacagagacgtagccaggaaattttccttagtagtcctagttcgcacggtatgtcacgtggtaaaattttcttttgcaccataaaactgatatacaaatacaaatttagtgaaaatgtgatagaaataatatcttccaacatccataagcagcttacttaacaagcaagttcaaaatgtgcaaatattcacgtactcactaatctctagtcacaattcacaactcgatttaaccatttaggcagctattcgttaccttcacaactcgatttatccatttaggcagctattcgttacctgggctgagccacggaggggaggggacggcggcgcggtgcggcgtcagcgtggacggcggggaggccggagagaaggggactgtgcggacggcggcggtggcgccggcacggagacgcggagtggcggcctcgcggggaggggaggggacggcagtggcagcgctggcgtggagtcgcagaaggaggggaagggatggcgcaacgccggcgcggacagcgggggagccggccagccgagacggcgccggcgcggagtcgcggaggctagcagctggcggcatcgggctcgggcgaagtggcgctggtggctgagacgctgactcgctgagtggctggaagtccctcaaccctaatgtttctgggctatttgggccaagcaacctatttgggcctaatttttttttggggtctgtgggccaaatttggggttagtcccgaacccaccgggactacccctagctacgcccctggctaccgagatcatgtttatcattatttgaataacatgcatgcaaaaaatgaaggatatctatttttttgaacgcgtaaaagaattatgcgtcaatatattagaagataagagtttttgttatacaatacagtccgccaaatcgactatgtcagggaaagagagaaaaggcagaacaaaagctgtagaaatgaaggatatccatacaagggacaatgatgcatccatacgatgagaagctagcacaactgtatgaatgcatccattacctggacaatttgtacgtatcggcatatttcgcatccacaggatcgctatctctccacgtacaataattccgtttgcatgcatccatagtagtatttgtttggagcacactagtgtaccatcattcacacacctcccccacgtacgctgcaactgccaactacgaacagataatatgtttcttgctctcgtgatactcctcgccgtggcggccggctcgtggcaacctgcggcgacctccacgccggcgacggtgagtcctgctcctgccgtatcaccggtggcggcgccggcgggagaactcggcggcggcggcgctggcgcgcggcgagatcaggacagggagttcgtccgcggctgctgcgctcgcacgctctacccgcgcctctgcaccgcggcgct

SEQ ID NO: 20716 - DNA, 6940 bp, Oryza sativa
ggcgtcggcggccgacctggcggcgcgcgcggcggggcggctggacggcgtcgagcgggccgtggccgggcccgaggtgctgtggcgcgtccgcgacgcgcagacgtgactgagcgccgcgatgacgtacgagggcacgtgcgccgacgctctccggccagccgcgtccgccccgacgccggtgagggccgagctgcgccccggggtgcgccgcgccatgcagcacaccagcatcgcgctcgcgctcgtccacatgcttatccgtactagcgcctgaaaatgaagcccagctgtttgttcagctacgggttccgtttcttcattgcttttgcttgggcagtttgaggacaacacccacctgtgtacgtatgatctgaagcactgtcaaatttcgtaaaacagaaattttacttctcagacccacagaaacgcgtggatggtacttctagcgtgtgtttggttctgggactaggtgggatgggatgaaaccatccctgattttaggattgggatgattccattcgggtgtttggtttgtaaaataggacgatcccagttttttgtttggttgaaggaacaagggagggatgggatgagcgccgtttgcaaccaccgacaacgccgtttgcaacaacgatggctgacgccgcacctgccctcacctccggacgtggtcgccgccggcctccttgatggcatcgatgagcttggtctggtcggggacctgggtcgcgagcaccgcggagatgacggcgtcggcatcgcagacgagcgggcggaggagcgcgacgacaacagacgggatgacccaaccgagcactggcggcgatggtgtcggccttcgcgcagagcagccgcggctcggcgacgacgacggcggcgaggtccgcgcgggagagggagagggagaggccggtggagaggagggcgagcatggccaccatcgtggtcgggcgggcggagaagcgcgacgacgcacggtcggcccgccaccgagttccccgcctccggatccgtcgccgcaaccctccccatcactggatccgccgccgctgccttccccaccactggatccgccgccaccgagccccccaccgccgccgtcgccgagcccaccgccgccgctgtcgcccaagccgtctactgccgccgtcgcccgagcccaccaccgtcgccgtcgcccgagccatctaccgccaccgtcgccgagcctcccgccgccgccgtcgccgagcccaccgccgccgccgtcgccgaggtccgccgctgtctctcgaggacgagcgcgtgagcagggcagcgagcgtgctcgctcattcacgccgttcgctcgtcccacttgggacgagttcgtccgccagttttggccggatcggttggtcccaaatctgagaggaatattcctctctagggaccaacccatcccactcacccctgaaccaaacactcctaaaaatgggttcatcccatcccatcccatcccatcctatcctagtgtaacgttaagtagtcagcagtaatggaaactttaatcttttggtgtgatggttacactataactacaggaaaaaaatgcagtaacagccaacataattttttttttcttatattgatgttttagctaggtttggttgctttggtgataaaattgaacaggatctctgtatgctcataattcttagggcatcaccaatgtttactacctactttaagaataagggtgggccatgtgtcagtggatattagttgttgttgtagctacaatggtgaaataacaaaagtgggtagtaagctggaccccacaaccattatccatgagagagggatgagagaaatcatttgtttattgcttatggctaggtagtaagcatattacctagtatttgttacttactacttccacaatgtatacaacctggtagtagtagtattttatttcttactacccactttatatgcatattgtggatgcccttactgcatgtcatctctactcaatcctccgatctatcactgttcaagtattcaacaattaatgaggatttcttatttacgttttgatttgtatattaatttatcgttttatgtactctgacttgattcctaaacagggatttatacacaaaatagtctaaaaattaactaaagttttgggcgtaacaacggagatggcgacatggcggtagagcttgaattgttccagaaggacagcaaaggcagattcccttgggggtaaatggaggcggcgaccaagggcacagcacgagctcgctcgaggttggtgcgatagatctcgaggttccttagcaaggaggacggtaaccagcaaaatgcacgagctcacaaagggagtgggcaggaagagggccaccaccattgcgagcttctctttcaagttatggatccgaaggttggtctccatggcgatggatctcgaggttggtcgctgcattcgcctccttgacctccaaccatcgcatgcttggtcgagctcggctagcacgaagagggagacactgctaggagagagccatatgcaaagatgagagaaaaagaacattgttgatggttcttaagtaccaaattcaattatcaaataatacataaaagcaaatgaaaggatacaaaatggtataccaaacttagagttagtggttattactaaccattttcacgagatgtcagaaacaaaccttttcatttaagatcgttttcatgtccaaatattcgttgtaaaatctaaaacctattttaacaacactacattttaagcgatatcagataaaaataaactttacatatcatcgagatcaacaacattatggtttattacttttctatttaaaatcagttggagtgtcgaacaagcattactagtttattaaacaattaaaactagcgaaaagggtttgaatacaaataaaaaagtttacatttagatccttaatgtcctgtggaagggcgatttagaaagaacgtctcaggttcaaattctagattagacatgggtgctcgtatttaagactaattattcttttaatagtatgcgacgtatccgttgatagcgaggtgcccgtgctgactttatcaatctaaagatataccatcccagccattcagaggtgcttacaggggcaggtgtgtatgtgtacgttcataggtgtgagtgtgcatacgttgtgaatacttgcatttatattgtgtttctataaaaatgaagcaattttttttaaatatttcaataaaaaaagggatttgctagacaactgcctaaaaaaatgtaaaaataatttttttaaaaaaatccgattttcacatgacacgtggacaggtcggctggtttgaaaagcccgtgaacactggagttagttgacccggcccatgtgaactactccaggcccactaaaatctggcccacgtggaggagaggcgaggcccatctccatgcggcggcgcccctgcctaaccctaaacgcgatgcgataaccaccaccaccatccgcttcttcccccttcggatcgagaaaaaagcgaaaggacctcttgaccccccaaccacaccgaggccgccgcggaggaggaggaagaggaggagatcgaggatgtttttcagccgcttcgatccgtggccggtgttcttccggagggagtggaagcgctgctggcccttcctcaccggcttcgccgtcaccggcgccatcatcaccaagatgaccgccggcttcaccgaggaggacctcaagaactccaagttcgtccaggcgcacaagaagcactgatctgatccgtgcctccatggtaaatccccccgcgcgcctccttcctcgatctcgtctcccctccggctgagatctggttctttccgctgtcctgcggtagatctggtttgtagaaactatttgggggttattattgtttgttcctgctttaagctgggcatggtatggtgtgatttggtttcgatttgaatcgaatcgctaggattgcagcaacatcacttcccgcgaaacgggagagtaatttggggggaatcaggagataggattaggggggaaaatgtaggaatcttctggcggcacattctctatgatgtgattattaattagtccatgaaggtgaggattaggcaactttgctcatcgatattgctccgtgatcaagatagcctaagttttctgaaaaatgcattaagggcatagcaagtggctaattcttaaagcatggttgagagtacaattcaacttcttttttgtagacagatgtgcttttgtagcctgtttccttttgaagggtagcagaaagtcccgattgttcttagtgtgctaattttaccttctaaacttggaagaatggaacatacgcaaatgataaatgtgcttctttacatccaggcattcgtaatcagtatgaaaaggatgcagaatacattgacgctacattttataaataaggttttcttttctaagagaaagaagggtgcgaaggaaaataatgctgcgttccaatcctattcataatattaggggaatgctacaggacggtatcccgttcggacaggatgatacctcagaggtatcgtctgatacccaggtatgccaatacctagtaggtattggcgataccttgaggtatcatcatgtccaaacggggtatcagccgataccttagatgatcatcccgtctgaacgggaaaccgtcccgtagcatttccctaatattattgtgatacgtcttggaacataatgtttgggcagtacatagggattactatttaataatatacgaatgttgaaaaatagtttcatgcaaaagttggaaagggtgtatgaaatgctgtaatacggaaggaaaggtggttcttactccacgaacgcattttctagatatttatatcaataaaatttcctcaatcaaggtgctcatgtacctgtagatccgtttattgttgcttcccttttatttttcaaacaaaagctgatcacatatcaatttctaaaccagctaactgtgatttaaatttttgttgagtattgcacaagggattccaatcactaatgtaaatgtcttgtatccttgtaattcaaacctatctgatgcttcagagcccaactaattatgatcaaaccactgtttggagttactgtatatggttccttccacatcaatggtatttttgccactcatgggtgttgtatactttctggggctgggagtattatctcagaaactgttattgtattgacctggctggctggctatatgccctactctgtttgattttatcagcagctcatattaccttcagcacgctcaaattgttaacatctgtgaatgtgtatttgtttattgaggtacttaaggattcattgagcaaatttgttgtccattggacacaagcttatcttagtgtgcttccagaaaaaaaaatgttttgtcaatgtgaactttttttgtgaatgttttgaattgtgcatttctgctatgcactgcaatgatcaaatcaagctgtacagctgctgcttttgtttgtaattgttttgaagccctaagggaattgctgttgttattttttctagaaccataggtagcaagtaaaaacatgaaggcaacatcattcatactctttgcttgatagtcatttggcgtattttgtaaaatttggaaacctttctttgcatgcatgacatgtcaaattggagttcctaatttcaggtatcctgtttatggaagtacttactttgcttaaccttaccatatctgcaggtgaaggaacagctggtattgcctaagtcttcagtttggcctatttttctgttccaaatgaacctacctgttttttgtttatccatttgggtggacaaccgctccagttgtatctaataagaggcgtttgaatctttggaccaaaaaatttgagcttctggtataaacctgtaatactcttcaagtgccatcctgcttcctgatttattttttgtaaaagcttgtatcgatggtaagtatacatcgaaagggctttcctggctggttgccaaacgttgggcttaggcacgacatagtttcttgggcaagacatttggttcattgctgtaacttccgcacacttgtcttaggcacgtttcttttgccaaactttgtctaaggtgaggcgagtaaattgctagacacaccgtagacaagatttggccgagaagtgtcgtgtcgaaatgaaccaaatctgcccgtaaaacttgcagcgtttgttccattcccatttaaaacacagctttgggtttatttgtttgtgtgaagcccaatagaaaaatttcagtcttccggcctagctacgtaccggtttcagccctacttgtaaaagttcttgttatgcatcggtttgcacagcaacagcaagactacaaatgcaaatagaacaaggctgcagagttaagatcccattatttctgcgtggtcttgatcgaacaaaccagctcatagctcagattactctcgaaagacaaatccagcgtccgtcgaacgttgacttgaaaaaactggctctgcagtgcacttgtatattagaaaatgcacatgctccagttcccataggaagaacaagttaaaaaagaaagagcgacaaaagacgtcgacggaacggacactaaaacaactccaaaaccctaacgaaggcctacaatggtagacaggataactgttgccaagctccagaatatacaacagtttgaccttgcaggatgggtgtgtgtgagttccaagttcccaataggtgaggaaggactaagacagtggacttgagaatattagtattcctcaatcttagacagtggtttcttctccccacgaagaacacacacccctaagaataaaactattgctcacatcaagaaataagaagggagtgcaattccattaatgccaggggcaagaaggtatcaaggttttg

SEQ ID NO: 20717 - DNA, 1784 bp, Oryza sativa
tcgcttcaagcattttgcctgctgggtagtgggcggcactggtcagagagctgaaagctgatggagatatgccgcggaaacgcgagacagcaaaatgttgagttgggctaagccttcggaatttgcgagaacttctgaactccggttttttgggctctagttggactatcgcctactgggcctgtgggccatggcaaggcaattctataccgatgcaatattccatttgcacattatccggacctttctcttcctggaacaagtataccgaaggtccctcaacttgccatcgagttacaaaatagtcccctaaccgcaaaaccgcgcatcccccaacttacaaaaccagtgcaaactaggtccctcagcggttttgaccccagttttggctgacatggcggctgagtcagcgtgggacccacgtgggccctggtactccttgagtttttttttttttgacgaagtgagtaggagtatgtctgattgatgttggcggatcggggatctgcagaggatgttagggccttgggcactgctcttctaatcgtctttgcctggcagatactgctcgtacagtagccccacacagaggacttgggcgagtaattggtttgttttggaccgtgttgctctcttgctttattttccttttgattttttgcctttaagcttcccactatgtttttctccctctgaaagcttcacggttactgttcttttacactcttttttaaaagcttcgaaagctttataattgagagaacgatctaatgaatccgaaccagttgaattgaaaaacagaaaaaactactaaacggtgttccgtggcgacggaatagtactactaccttatctccttctcttcccctccactcgctcgctctctctctctctctgtctcttcccctccactcgctctctctctctctctgactacccaccatgagcacgaaggcgacgatgacaatggcgacgacgacgacgacggtggcgacagcgacgacgacaacggtgccatcaccaccagcccccgcggacgacctggacgacagccggcggggctcccgaccgccacaggcgacggccgccgtcgagaagcctccccctcaagctcctcaagccgctcctcctcttcgttgttcttgccgctagcttcctcgccgctactgccctcctcctcggcggcgctggcgcctcctacggccggggagcggtggacgcggccatcggggcgagtgctttggcacaacatgagcgatgaggagctgctctaggcggcgtcaatggagccacgggtttggcggtttggagcgaggcacgtcaatgaacgacggaatggcacaaggtaggcaccagatctgtcacttcctcttcctcttcctccgtcgccgccccgctgctcgacctccccgacccgcgactcctcctccttctctctcttggggtatcacactgatacccaggtaccaaggcctgatacctaggtaccagctcgatacctagggtaccaggtggcctgatacctaggtaccagctcgatacccagggtatcaggtatcagtcgataccagggtaccaggtaccagccgataccaatgtactaggtaccacctcggtaccttacccaaggtaccatgaggatatggcggtgaggtagctgctactctgggtgctcaggagcgacgacgccggcgaggtatggcgcgtgaggtagcttctactctaggtgctcaagggcggcgatgacgccggcgaggtaaggtagccgctgctccggcaacaat

SEQ ID NO: 20718 - DNA, 950 bp, Oryza sativa
tatgtaattttagtacttacatatgtaattttgagacttacattgtaaatacactaaaattacatatgtaattagggacttacaatgtaaatacatgtcgactattttttttgatggaaaatatggcgccataaatatagcatctcctctcttgcttctgatcaccattatttttcaggtctcgaatacccagacttcgagagatggcaacaactaccgtcaccacaccaattctctgcaacctcagcgccaagccacgcgacaccctgcgcctgccgacgacgcgttcgccgaacgacggcacgaggcgaacgacgctccacctgagctcgtcaagagcccgcggcgacttgatccgcgccgccgccgccgtctacacggtgaagctcatcgggccggaggggcaggagagcgtgatcaaggtgccggaggacacctacatcctggacgcggccgaggaagccggcgtcgacctgccctactcgtgccgcgccggcgcgtgctccacctgcgccggcaaggtcgtcgagggcggcgtcgaccagtcggaccagtcgttcctcgacgacgcccaggtcggcgccggctacgtgctcacctgcgtcgcgtacccgaccgccaacagcgtcatccagacgcacaaggaggcagacctgtattagttagctagctgcgttgcacttgatgatttgatccatcactttcgatgcaatcttgacactgtggtttgcacatgcacttgccgttgaaactagccagaatttatcgtcatcttccacttggattgagttaagtgtacgttcttgtctctgcattgttctcaatggatatctcggaatctgtcaagcctgtcgtgaagtcgatggccggggatgctgcattatcagcaatcggtttcagttctcgccgccgttctcgcggcgtccatgagaaagaatcaaaaagggatg

SEQ ID NO: 20719 - DNA, 1180 bp, Oryza sativa
caaccactaggaaaatggagccaacatggtaaaacacaatcatgacaggcacaatccaaaatagagagaaaaaacgtggttcaccagaaattactattacctccgttgttccgccctaaaatataacaacatttagctatgtgtttaaatttatagctaaaaatacttatattttaggacggagggagcagtaagcagccgatcaaacatagtactagtagaaagcatactctttctcggtgttttgaaatttgaactggtactcgagaaaagcaaacctgaaccgtgtgcctcatgcctcatgcctgcactgggctatcgataaatgggccgtaagacaagtctatgggccactgtttaggcccatatcttcgttggagaaagcccacaagcggcaggagttggggaaacctgagccgtaaaccctctctcctcctccggtctccttcctccccttcacctccgcggcgcgccgtcggtcgccgctcgccgccgccttctggttcttctccggtctatttccccgcgggattcgtcgcggacactccggttggttggtgtatctgtatgtgattcgtcccacgctgctccccgtcgcctcccctaagacgaatcgaagctgacattttctggtgtttttttttccatgattgttggctgcaagaagtcggttcgagttgccaaaatctgattgttctccggaggtgaaggtttactaggcaatcatggatggtacgcacgcgctggctctgttgcccattcccatttcgttaagctttgtttattttgtgtcagttggggaagtaaatcttaacaaaacttggtcatcctctcttgcccaaaccgcctaaaaagtttggaggatcaaattgtgttttagcacataggttgtgcagttggttgttaatgcaagcttagtggcgattgtagttgcctgggcttgagttaattttgaagttcgtaatggcaactgtgaggaaataactctcttttttttctctcgatcataaaaaactgatgacttttgctgatcatgcaagaaccagacctatgctatcagcaattcagcattaataaaccactgtggcacagtcaggaactaactctctagtcagtatcatgcaggataaccagcatgccagagaacctgatcttactttccaagttcgtgcatttcaag

SEQ ID NO: 20720 - DNA, 2049 bp, Oryza sativa
ttattttagttacaacttttagaaatcgaatttgaacttgcatatttctaaagtgatatattacatattaatctatcttgtaattttttatgaaattttttcataatcatttagttgacatacaagaaacgagtggatgtccatccgagatattagaatccatcacagtggagtaactaatggttgtgcatccctcggttacttaattgttgtgctacaggggatggaatgtttgtagtcgttaattccacaatcgttgcatcaacattttttttagactaagggcattaagcccccatttccattactagaaatgacagattacaaaagcaagtcttacaaactgaaacaataataataaaaaaaaggaggccaacacactggctgttttttccagactagaactgtccagaagacatagaagaacacatccccatcctcaaacttgcataagagcaagtttagggcctgtttggcacagctccagctccagctctgtcgacggaggatactcgtagaccagatatagagggtattggggtacactggtacgaggatctacgtagtacgacatcaaggaaacggaaaacatggattatactggttcagtccccttgataggtaatagccctaatgcagttgatatgagattatatagtggaaaccacagattacaaagggaatagcagaactcgatgataccgacgagaccatagtcaagttgattcgactagatcacccggcgatttggctcctgtaggttccggcttcgtaaggctgtggtggttgtcttggctatgagatttgatgccttaggtcctaccagggggtcccttttataccgcaggtcagttggtctccaagtagaactcggagacatcggatcctacacaatacaatgacgacccagttctattcgagtaggactccttccgtctgtggactccgtgatggatttccttaacgtgtacataaagcgtccgtatacgtgcaggtataccatatcaatacacgacatatatccaagggtagagggtataccttatccgtaaccctgacaagctccacccctcctggagctggagctcagcaaacagtttcagctccaccaaaactgggagtgaagttgggtggagctctctcacaaaatgaactaaagttgtggagctgggtttagacagctccacaattccactcagacccaactcctggagttaaattgaggagttggagctgtaccaaataagcccttaatagtatatcccactactagcaccaaatcatctatagccaatgtaatagccaattcatacaatagttatttactatactattaatacctggtcccacctgtcatacacacattacgtcttggagtccgtgctgcagctggctactgatctgtagcccgctgctcttctctctcttcatttatctctttaaaatatgtttatagctggcttatagcctgctattgtacctgctctaacaagacttcagggactaacaaggaccgaaaacccaacagcaaaagatcagcactgcagcctccccaccggcctccatccaaatctggagttgtacacttcacttgcaatttgtcttatgagcttggccccaagagcagccttctttgatctgcctccagcttctacaaaagagcccatgattccatccagtggcaaaccaagaaaactacatcagtgggatcattaggcaaatttttatcaaagcagactttattcctggtcttctaaacagtccagattacagcagcaataccaatgacaatcagatttttggttttatttgagaaagcagaaagccaagtcccaaaaagatgttggcaatctttagccgttttgaggtcaaaagcacactatatatgatgttccaaattaatctgacaagagagcaacaatcgttgcatcaacatgtttccgttttgtcccaagtgaaatgcagctgtgatgaatggcaccgtctgacgctaaatatgtgaggtacaataactgcatgcctctccgaagtccaagtgaacaagtgacc

SEQ ID NO: 20721 - DNA, 804 bp, Oryza sativa
acccagggcagttctcgcttaggtacctggcaggctgaccggcacgatcaggtcctcggcgccgtgccacaggtgcaccttccctttgccgccggcgaacgggtcctcgagctccagcgggctccagctccacttcccgaatccgaccgtcatgtcgcggtgcaggcagctgtactccccctgctgccttatctgcggctgcgacgacgacgacaacgacaacgacaacgacacgcaaaccgatgagcaaacgctagttacaactaaatatgcaacgcaagtgatgaagcgatccggtgatccttaccatgtaggttcggaaggcgaatttgggcatgatgagcttgtcttcctcagagaggagggccgggttgtaggcgatgacgctggaggcagggaagagcttctgggagttccaccagtaggtgagccacggcaggtggtgggagacccagaccgcccacttgtcctgcgggagctgctggttccaggcgtgccacgacacgttcgacggcaagccggaccaccagtagttgcccacggggccaagaatggccaccccggcgagcctgcatgaataaacacattggtcagaattcagaaacaagcagtcctgcactcctgccatagattttccggagatgaaaatggtgatcgactctacctgtgtgagatgtgcttgaggcagctccacatgatctctccgcccatggagaagcccatgaggtagaacttggggcccagctgcaggttgtccgcgagctcctcgacgtccagggctatgctcttctctgtacttgccgg

SEQ ID NO: 20722 - DNA, 3764 bp, Oryza sativa
ctgtactagacattccaagagtatgtccttgcgcctgttttcttgtggtaatacgtaaggccatatattttgatgagatcaaacgaaaatggccatttagactgcataaagaaaggcgacgtaaataatttatatatactatactgaatttcagattgagattcctagatggttattgtatagtgcttaacctaatgctctgtgtaacacttataattgcctgcatctgctctggggatttagtggcatatgagagaactacgtggttcctgcctgatagactacaggcaggatcttcctaggcctcacaatccacacgcggttgtctgttccgatgagttgtacttgttcttgtgcttgacagacctatgagtctatgagtatcaccaggaataaggccaaacacttgtaagagtaccttgtaaccataattcagcaccatacaaaatgaatcattggattttctgaattttctaatgatttatccacacgatttcatcagttttgcttgtatgtgctttcatatttctattataggcgcatgattcttgctagtggacttgagggcatggaaggatttcgccaaagatggagcttacatggacagcttggagacacaaggtattaaactttgtattggtcatgcgttgtgatcatctatgtcatagttgaaactcgaaagagctcacttgtaatttgtaaatgtggaatttgaatattaagaagctagtgggcctatggtgattaaccatgtttttaactattcgtatgcatttgaataatttattaattcaaatccagatggtggattaaaattgcaatatatacatataaaaaacaaggcttgtcattttttttccttccgtgcagttgagattaaatttacatctgaagtatcattaatgcattatgtttttggtgatgtggaggatctgcttcagatgaaatgaagctgttacaaccctagtctcccatgtgtaggcatgggtgtccttttatgtggttgtctgtgctgagccttgtgaagggttgtttttcaagcactgtgccatccttcatcctttttatttctgggatgtcttccagtcatgatttccccattataagcataaagtactgaacaaattatatacaaaggaattgcattcaaaatttctggtcactccagttgaacttttgaattatttgagttcagaaatgaacttaattcttcatattgcatgccaagctgttttttctctgttattccattttgcatgccaagttgttttttctctgttattctattttgcatgccaatttgtgtttttgctgttccattttacattgtttttttttgcaggaaaaggttggaagcgctgaacagtggaatcgtaaaaagagggagccaaagttctccagtgcaagagacaactcctgcagtcaggaagaggtggttcctttggtaggttagttttcgttttctgatttgcaaaccagtgtagcatatggtatattattggccatgggcatgcactcgttcctttccacagtatgctgtctccaaaccaacaatcgcacctgctaaccagtacaatttgcatttatacataggctccacccccaacttccaactttccatcacatcacatcacatccaaaactttcctacacacataaactcctaacttttttttttccaaactaccaactttccccaaactttcaacttttttcagtaactaaacacagtcatagctgcgagtctaatgtgagatccaggaagtcaaaaccgtggagccattgctcctaatacactcatacatcttgctgtgccttgtgaacttaccatagccaaccaaatgatctgtaatttttccactattgcctggattgttttcgttgtcagtagagtaattactaattagctggtacactcaatccagtacggtattgttgaagtacattgatccagatatccggaatagcctattagatttcttggagcaacatcctgaagcaagatagcaacttgagatctagtgtgttttcatggacaataacacgtgcgtcccaggtcatgctttacgcctcacgatgaagattacaccgtactcgtgtcttcatcagttattccactcaaaaccgcattcctgaagattcgttgaacctttgtggccatgctcacttgggttaggacatattctcggcgtttaagtctagtgtggaaagattgttcaggtacccccccccccccaacccaacccccccccaaaaaaaaaaatggatgtgagtattggaagaatgggagtattggatttacgtttttgcgttagaatcaagatggacaagcagataaacactttatttttcgttagggaggaaaggaaaatataaataactatggaacaggctgataagggtgagttagggagaaaaggaaaatataaataactttggaacaggctgataagggtggatcctgcggttgccataacgtagagaagattgtactcgaaaccaagatcaagaacaagcaaccgcattccgttggccgggatgtcaagcgtggaatcgtttcatgtggagctcgccgcgcgagtgagagagaagttgacttccccagacttgattggcgaaaaagccatgcttaattccaacgacacacgcttggtcagagctcaatatgccaccaatagaccccgcctataaaaaagcgcgcgagcctgttccatcgtatcacaaccactaacgtgcgttcacccccctaacaactatctcacccccctaacaactatctcaccggctcgatcaatctctcaccggagatggtgcccgtccggccgtccgcggcggcgctgctgctcccgccaccgctttcctcgtcgtcgcggtgggcgcccagccgctgagcccggacagccccatcctgagggaccccaacgtgatccccatctacatgacccccggctcgtcgcccaccgtggcgagctgctacaaccagaacaacacggcgtcgggccccgactgcacggtcgagccgcgcgcgtgcccgcgcggctgccgcgacatgtgctacgttcactgccccacctgcaagctcgtctgccgtaagaaaacgcatcaaaaagttcaaaacagaatgcatatcatgcatggtaatagtaggtaggcgcgttacgtttggggtggtttttgatgatcggttttgcatgtcgggttttggactgtgactggtgcatgcagtgtgtgagctgaccggcacggagtgctacgacccgggttcgtcggcggcgacggcaacaagttcctgttccacgggcgcaaggacgccgacttctgcctgctctccgacgccaacctgcacatcaacgcgcacttcatcggcaagcgcaacgcggcggcggcacgggacttcacctgggtgcaggccctcggcatccgcttcggcggccaccgcctctacctcggcgtcaggaggaccgtcaggtgggacgccgccgtcgaccgcctcgtgatcaccttcgacggcgcgcccgtcgagctggacgccgtccccgccgccagctggagcccagcctccgttccggcgctctcggtcttccgcaccggcccggccaacggcgtggtggtgcgcctcgacggccggttccgcatcgtcgccaacgcggtgcccgtcacggaggaggactcgaggatccacggctacggcctcaccgccgacgacagcctcgcccacctcaatgtggcgttcaagttctactccatcagcgccgacgtgcacg

SEQ ID NO: 20723 - DNA, 672 bp, Oryza sativa
cgtgacaagcaaattaagagcgctatcaattaatttgttgaattaatatcaagcaatgtgcaatgctacaactcgtcgttctgagagtccgcggcggcggcggcgctgctactctgctggcacgcgccgttggcagccaggcttccagccagatctcgtcgcgcacggtggagtcggcgtcgtcgttgcggtgccacgtccagcgcgcggcggtcgcgttcaccacgctcagccgcccgtgcccgaagctcgcctccctcatcaacgagagcggcgccagcttgtggttcttccgaaagctgatatccaaccagatttagccgtgagctatggttagctatcaagatttgtaagttattttgccggtgttaatgtttagtgcttactcaaatgcgaggccttccctgttgccgccgtcgcctatggtgatgtgcaccggtccacacgggttcgcctcgttgttatatacccttgtctgcagcgacaaagtcaagacgtgcactgcttagttgagaattgtacgtgtgatcaaccgttcgagcaatggcgctgatcaaaatcgaactcacgaagcgttcgtaggcgtggacatggccggcgaagacgatgtcgacgcgggcctcgtagaggaggcgctccatggctttcctcatggcctcgccctccccctcg

SEQ ID NO: 20724 - DNA, 634 bp, Oryza sativa
cacatttttcacttatatactgtgacacatttctacataaccttttagtctgaatatgtttgactgatgctgatgtcattttcatgcagtgatgtcttcgaatgactcaatgggtacagtctttaagtgtttgtcaaaaggagcagttgactttctagtgaagcctatacgtaagaatgaacttaagaacctttggcagcatgtttggagacgatgccacagtgtaagtttgtttttttttgttggcctacctttaatgtgggatcaagtccccaactctccgtgtaactcatagtattttgattctaacttctttgtctgaatattttttatgtgactaatctgaatataatttgtctatttgtaattcagtccagtggcagtggaagcgaaagtggcatccgaacacaaaagtgtaccaaaccaaaggttgatgatgaatatgagaataacagcggtagcaataatgacaacgaggatgatgatgacaatgatgaagatgatgacgacttaagtgttggacacaacgctagggatggcagtgataatggcagtggcactcaagtaagagaccgtttactacttttcgaaacagtgttactcttatgtgttatgtctatcgctagatatatat

SEQ ID NO: 20725 - DNA, 5043 bp, Oryza sativa
ccgcaaggaggacacggtggccgccgtccgcgagcagctggagggctgctacctcctcgccgggatccgctacgagggcctcacggtgaagcagctgcagggcatccgcgacaccctcccggagacctgccggctgctggtggcgaagaacacgctggtggggaaggccatcgagggcacgccgtgggaggcgctcaagccgtgcatgaaggggatgaacgcgtggctgttcgtccacaccgaggaggtccccgccgcgctcaagccctaccgcgccttccagaaggaggagcgcctcgaggagaccaacgacttcgtcggcgcggtgttcgagggcaagttctacgcccccggggacttcaaggcgctcgagacaatgcccagccgcgccgaggtgtacgccaagctgctcggctcgctgcaggggcccgcgacctccgtcgtcaccacgctgcaggcgccggccagggacgtcgtctccgtgctctcggcgtacgtgcgcaagctcgagcaggaggtcggcgccgcctgatggctgttgagagatggttttgtggcttcgtttctctcatctcactcatttcttgtagaattcctgtacttttactgcctcacgtttgaattgaatcacaaaagttttacctcttacaacgcatgcctactggtctgatttcataagattaccgagttctgatgttattaggattacgttgcgtacttagagggaatgcttgttccacaactagtgttttgataatttaattttacctgtagagactacagagatcaaagtttagtaggttgaggggcaatggcaatgcacaattagaatggtcaataactactagtgcttgtgtagttgtaccatcaatcagtgtatccaggtttacaacaaagttgttcaaagcagtatgatgagatgttttaaaatcatgaacttaactgtgctctttttgttaagagcaaacctccttgaagtgaacaaaattaaatgattaattcatcttttagtaacagaataacactaattagagttggaaattcttctgaattagcttctgaaacttactgttggtcaccagctcaccacatacctaatttgtatcatttctgtctgaacgcgcagtggatcaagaatagaattggcaaaattgatgatcacatggtcacttatttgtttgatactgatttcttctgacagtcatggtattgtcctaggttattgtacttgagtgatagttgtagttttgcaggagtgactaccaggcatgtcaatatgccaatatcattcgcccaatggataaggatgtgagaggctcttgagaatatagaggaaagcttgttaggaccaagttgcagtcttacggatgtgaaattgctttggtatgggaaaccatttctttggtccattcctgaagatcgtgttgtttggttataaaagatacataaaagatacatatgtctctagcaacatattgtgatttggctgcttaggatctattgcaagctaaagtggaatacgtgcactgccaccaagcggttgtgaaataaagtatcatctggataagtgctttcctcaatctctgaattcttcaatggaactcagcaacatgatcttgtttgtctttaagcttttacattaatttgaaatttgtttgcaatggcatgcttagacacaatttgaaatcatagttattccatgatgtataataacaaaccttcttgtacagtaaatttagtcctgattgatgtgtaaaagtaaatacactgctacagcctcattatataactggaggggatttccatggtgcaaatgtgcatttgcttgaggtctaaaaaaatggtgcaattcttttgacatctaactaacatcagagttgtattcaacacatcattgcatctcagtgacactgatgaatattttctttactttgtgggtccaaacatattaatgccttgcatgcactactttattcctgcagtgctgtatctccaaacagataaacctaaacaagttttcccttcatgagcgaactgttgctgtgttggtccttttgaatttggtgatgcattttacgttccttaattaggtctaaatttactttatgtgaatattactattatatgtaagataatgtaagcctgattctgttcttgtgttgataaagctgggcaccaccatgtgagcgcctgattggcttcgaaagctcacacctgttttttcacctaacttcgatgcggggtttaccacttgactgatgaaggaatgttagcaagttgccaaacactcttgaaaaggagcagattcttgcacagctgctttgtgtgatggcaccggcgacctagcatgagcacatgacacttcctggtccaggttcttcctactcgttggtgtttcacgaactcaatagtcctactttttttcccttttcttaaacgtgttcgatatctctgctccttcaatatgcccgtttggccgctggcaaggtgagcagacggcttcgatcacagctgctcgcttgatcggacggtccgtttgtctcgttggacaatctccaagcgcgtaccagtgtaccaccggattgagactctgtaacttacttttctttgacatgtgaaccctctatccagcgggtctatatgtcagtgtctcaaaaacaaaggaaagtaagccaaagatcatcttccgtgtaccactaatgtatcagcagtaacaacataggcgccgctctcagaaaaggaccaaaggggatcgctaattagcgcacgtacattttcagtgtacatatttttctccttcttagtagcattctcatataaaactttcaacttcaactcaaaatcatacgacttttagctcaaattatatggaacttccaaatgtagatttttgtttgcaaactttttatatgaaagtgtgccttaatagcacacgtgcactaattagtactaatcctaaatacacagaaagctaagggtgcatcttttttattatggttttaccggattagtggcacgcgaaacgagaaatataattagcatatgattaattggtattaattattaaaaacataaaaatattttttggtttttcaaaaaaaaaattttatataaagttttcacggtaaatacattatttaaccgtttaaaaagtgtgctaacgaaaaataagaactaagagcagcttcagtgtagggagaaatcgaacaatgagacagaaaaatcgaatagaggacactgagacagtcgactggtgcatatcagacgaaaaaatggactccaaagaccgaaccatactgaaatagatagatacggatgtcaggccaagcatagcttcatctgtccagagaagaagcagcctagatttattattattattatttccttgaggccaacgatcggatgcagcactatagctctagatcaaattccacgtcaaaacgaccttataatcctctaaaatcgagttagcaatttaaaacgcgccctaagtcccctttaggcaaaggtgtgatacacaattcgtcttcctctccagcgctctccctcccgccgcaacgaggaaaccaccgcctcaggatggccccgcggccacgtgaagcgccgggccggtgcgaatcagctagggctacagctcatcatctcgccgaagcgatcaaccaaattattacgcgcgattggagacgttgttcagccgggagcaggagcagcagatcatctgattgatgccttccatgctgaactttttgccagtgctgtggctatcaaaacggcaaaggagaagggtatggcgcgagttgaactggaaacagattccctgatgctgtgcaatgcactccagagcaactctttcaacttatcagtgatgggtggagtaatccttgagatcaagcatgtgattgctagctgttttcattctttctctgttagttactgcccacgaaactgtaataaggtagcgcatgaattagctgctttgggttgtaacctttcaggacgcttcctcctggacaggctgcccgcctgggatggaacgactggtgaccagcgatttagctggatcagttatataaagtttcggtttccctaaaaaaaaattattacgcgcgatcgagcaagcgagcgcgcgcgacgcgacacgacgccctcgctaatacgattacactaatacgcgtggcacggcgagcgcgcacggcggcaaaaggctcggaccgcggccacacaaggaaagcgcgcggagggtgggggtgaaagatgcaaaggcggttcagacgcgggagtcgcccaaaaaaaaagcaggccgtctcggccacagccagccgtccgggggggataagcgaaagctggagcccgtcgccagcagccttgtggtttgatcctgataccatctcgctctccacaaaagcacgagtagcattcgatcggtcactccgttccctgcatctgcatgtgccctacttacatttcatttcattcacctgctttaattttgtctctcgatcgcttgattcagtggctaattatagctccaaaaattaccgggtaatcctagtgctcataacgaattagtaatactctaattactccaattatcaagatcgcagatttcagcgtgtatcttggttaatggatgggcagttcgtgttgctggcttgctgctactttacaaggaacatgcgcactaagggcgtgtttggttgctgccctggcgagtatttgcctggcctagagctagctggattggttgctttcctgaatggtgtccatgctcaggcaagggtgccggactcaggccaccaaaaatgaacacctgagtcaggcgtgggtatgtgtctgatcctcccccattgattcttcattgatgtgactgctattaacacttgtcaatatcttactcaagtaaacaaaatgtttatatataatatattcactcaggcgtaggttttcaaccaaacaacaaaacatcacacatgcctggtcaggcacaataaaacacagcttttctaccacacaggcatagatttttctcaggcaagtcactca

SEQ ID NO: 20726 - DNA, 5885 bp, Oryza sativa
ttcttgtcacatcataaaagatatattgacatgacaccctatttagtgagaatggaactcttattaggaatggtctaacggtgattggtgaatcttctattaggctagacatgcaatcttctaaaatactcactctgtttattaataattggcacgatacactattctctttcaaacactcatctttctaaaaaatatttataaacactaaaaaccatgtcatgtattaaagtgggttatgctttaaatataagtataaaacttttgttcactccggtctaccctctccatcttaaaataactcaacctaatatatggtgagatccatcctagtgtacaatgaatctcaacaaaagcttattcggatttcttgtattagaatggattacagcatattctaggctaagttattttaggatggagggagtaacaatttaagagtaatcaatggtcaaagctttaactgaaatattaaaattgtaaccccgattaacaaattgtattaagatggatcacatcacattctaggttaaattattttaagatgaagggagtaacaatttaagagtaactaatggtcaaagcttcaaccgaaaaattaaaattgtaacccttattaacaaataatcctttctaccacctataaaagatatcctttcaaccaccgagagaattaaatgatgcttcaggagaggataactttgcaatgacaacgttgattttatcatgattccagaaactagtcgaagcagacatatctcatcatatccatgtaatgatcaataatacttctccccgtcccaaaatacttcctattctaaatagtttagcataaattaagatttaagaaaaaaactataatgtctcttatttaataatgtacggttagaagtgaaataataattgaggggtataatcagaagaaatttgaactgacaacaagtattttaggacaaaatgtgaatttagtaaagacaactatttcgaaagcaatgtagtataaagttaagagtacatcattcatgttatcattatttagtaattactccattactccctctgtttcatattataagtagttcgactattttcctagtaaaagttatttagattcgaccaagtttatagaaaaaattaaaaaaaatctacaatataaatatattttgatgatatgtttgttttatgttgaaaatattactatattttctaccaacttgtttcagacttaaagaattttgacgaggacaaaaatcaaacgacttataatattaaacggagagaatactccctccgtaaaaaaaaacccaacctaggacagatgcgacattttatagtacaatgcagggtgtatttagttcacgccaaaaatagaagttttattgaaattgaaacgatgcgactgaaaagttagaagtttgtatgtgtatgaaagttttgatgtgatggaaaaattggaagtttgaagaaaaagttgggaactaaactcggccgcatattcattgtactataaaacatcacatctcatctaggttagtttttatgggatcgagggagtaagcaataaggtccgtatccttttcaatttaagacctactaccataagacgtactctcttcgttccataaaaaaccgatatagtactagatgttaacacattgtagtactacgaatatggatatgcctatatctagtactaggttaagttttttgaaacggagaaagtatatgttaagggcccctttgaatcgcaggagtgaaaaaaacagaggaataaaaaaacacatgattctgataggaatgcaagtgtaaaacagatgattgtaaaacacatgaatgaccgtttaattggaccgcggaaaaaacgtgggaatcaaatgagagagatagacttaaaggaaatttttcaagaggttaaaatggatgttaatttttttacatttttcctctaaaatagtaggaataggaaagtttcctatgttttttcttttctcattcctacgaattaaaggtatggatagtgtaggatttcagttttttttcctccaatttaaaggggctaagctttggtggaaagatggctatttcccaggcacaaaataatgataccgaccactatagcgaaaaggcaaataaaaagatagtaataataatgccaaacaattccagctccggaagaaggaagaacgcggcggtgctcttgctcacaaatcactctcaaggccccggcttaaacgccgtcaaaccatgccgtgacgatctttcccaccggagcgtgggccccgccgcctcctggccccacacccaatcctcggcccaaccagccccacaaaggcccagtccgcagcgacccagcaaaggacgcggccacgtggacggaggcgatctccgctgcgggggtggatcccgggccaactgcgggagcgcgcggctttagatttcgtcggatctcgggcggagcgggccccacccccacaccctccccacctccacttgctccacgtcacctccccccgtctcctcccccgttatctaccgcctcctctcaccaccaccgcctcctcctcctcctccgccttccgcctctcaccaccacggcttccagctctggccgtagcagcagcagcgcgcgcgcgggtgcctgtgcccgccgctgctcacggctcctcgccgccggcttgtgcctccgatacgtgagctccccacggtgcggcgccccgccgtacgtcgccgcgtgcgcgacaagagctcggtcgcgttggggtttggggatcgattgatttataggcttttttgtttttgtgcggcagggggtgcgagggggtctggaaaccggcggatctcggccgctcgccgccggagtccggcacgggtggaggagtacggcgacccgcttttttcttagcgattttctttcctcttctctcaggctgaggcatgcttcgagcgcttcgtccgttctgattttttttttagcccgactgtttgagaatcgtctgactgacctgataaagcctaattttactgccattttagctccccaagcgccgtgaattggtaggacttttgtgggaggcgctggtttctgctctactcacagcaagtttctaaagtaggtgaatcctcacggctccggatctcctcttttgaggatttcccccgaattttgatcagatgttcgatgcttttcaggactcggaagcaattgattgtgaagtattcctttcagttcggcttgaagtagtcctctcagaccattgccgcatataagagtagcttattaccttgtataggaaaaagtagaaagcttattccgagcatgtcttgttcataatagactggactctttgattcctgtgtgtttctggcagatccaagtagctgactgggtgcagcatatgctttttctaacgttgggcgtatgatgcaccccacaatctgtgaactatccctagtcactcagatcaacggcgcattatctctcttccaatctggttgatgggtagcgcctgcgaagctggtacggacgagccttcccgagacgatgttaaggggacagggaatggcatcctggagaatggtcatagtcacaagccagaggaggaggaatggaggaatggcatgggagaggacttacccaatgggcacagtacaccaccagagccccagcaaacagatgaacagaaggagcaccaagtgcagattgtccggtgggagaggttcctccctgtgaagacactgagggtcttgctggtggagaatgatgactctacccgtcaggtggtcagcgcactgcttcgtaagtgttgttatgaaggtatgcactgcaaattgcaataccaatttattgttaataagtttttctattttccgagggaagttaaattacttttatgatcacatattcgtattggagaatggagattaagatgaagattttacctcggttttccttagcatgcttttcaaactactaatgttgttttatgtgaaaactttgtatataaaagttattttaaaatatcaaataaatccattttcaaatttgaaataattaaaactcaattaatcatgcgctaatgactttctcgttttacgtgtacatatttaatcttcatgtttagcatgttcaaacggggactaaaggtttcctaactacatatttatttctcaattccagttttatgttgcattcagttgtgattttttctatacaagggaaaatttgctctctccactatataaaaaatatgtattgtgcattgtaaaaaagaaagtgcggttgagtcacatttttgaacttagacgcggtaaaaattcaccatgctatgaagctatatttagaaaaaggcattttttgtctaattatctcgcttaacaattagttgacttgcccttttttccttaagaagaaaggttccaaatattgaatatcactatctttatgcatcagctgattggtctcattggcatggtcattcttggtaaccagaggggtatagcgcataggcctgcttccaatacgcacggcaggcactatagttagcatagacagcagacgagtgcatattccaacacatggcagttgaagatagactagtgggccagatgtggactggggatattctggtgattttttctatatagtcttgaatttagttttaagtactcatccacattcctctcccaatgaagaaaaaaaaatggaacatagtgcctctacattttactacaggctgcccgcaggaccaatctcttcagtatcctggatcaagtaactgacatgaaaagacctgctataggcatcggtgttattttctgttagcaccacgttcccccaattttcaaatttgccataccatcaagtcatctcagcatcactactccctcctccctcttctcttgttaatatgctcaactaccttattattggcgctggatccagggtaaaatgccactagggtcactctacttacatgatggtagcattgactatttacaagagcaatttaccataccgaaggagcattgactatggacctgatgcttgcatgctggacctgaccctgctgattgtgaatgcttgcattacatgatttttcttctgcaatttgattgggcagattcaagagggttctgcgcttccagatttccaagtgcaggtgctgatgcaccaactgccattttcagataagagtgtgatctggtcacataggtgtgacactggattcctgtatttgccatgcaatgcaccatggctttgccctggattttatcattagataactctaacaatagtgctattcctacagtttcatttttggtttgttcttttgtcaatcttgcttccactctcttcttttaaaattttttacaagacctgaaccaagcccagacattcatgtgctaaaggcctgctcgacattaagatggtttatgaatttatgataacctcagggttgtcgataataatagttccatgacaggattccctatgattctgtcctctccatgaaattaatcataatattacacatatttgaattaaaaacagcatacatagataatatactcctagatttctgttttctttaagattcctaaacctgtttaaacttcaagaatggggagtactggatgcaacacctactactactacctgctagacaattagattgccaatcttggtggcaattgtcaaaatatcgaattatgctgaaggaagcattttggaagttacatgatcaaggccagtagatccaattgtttctctcttttttttcatgttgaactcaaccacatctattatttagttaaccttattacactaggtagaagaagatttgaataaggtgcactgactgatttgaacaactcgattatggtca

SEQ ID NO: 20727 - DNA, 623 bp, Oryza sativa
aagtcaaaaatcgtatgaggggctctcgccagtcggcttcaaccatagctacatcatgggtgcgcgcaacttgagtagcatctttgtgaggtactgtcggcgagtagaggtgttcgacgaaaacatcagagggcgccacctcgcgcttggatccaaaattggcaagtctgtcggcggcttcattattgtgtcgaagaacgtgactgagctcgagtccatcgaacttatcttccaatttgcgtacctcttgtcgatatgccatcatgttgtcgtcaaggcaggaccactctttcatgacttggttgacgaccagctgtgaatcgcctcgaactattagacgctttatccctagggaaattgcaatccgcagcccatgaaggagggcctcatactcggcgacgttgtgggacgccgaaaagtgtatccaaagcacatagcttaatctttctccagttggggaaatcaaaaccactcctgctccagtgcccgaaagtcgttttgatccgtcaaaatgcatggtccagtgctccatcttctccgcaggggtatcctcctggcactcggtccactcggcgacaaaatcagctaacgcttgggacttgattgaaattcggggcttgaat

SEQ ID NO: 20728 - DNA, 2521 bp, Oryza sativa
ggggctatattctactcagttagcaaaaacgagtggtagtatattctaatgattgggtgaacaaaatgacaattgatacaatttcttcgtacggatgtgaacactactttagaaaagagtataaaaaagtgttgtttcttccaagggtgggccatactttaataagtaccaggatcgaaccagtgaattactacattccacaaagtaattcataatgtctaatgaggggagtatgatctttaggcaataatcggttttgacactgttgtttcacttttgaggaaaaagacacttttttcttgctgttgtgcctgactaaggttagcattgaaccggtatctttctgatggctttgtccgcctattttcaggtgcgctatcagagcagaaagaggttggctgagcagcgccctcggatccgcgggcaattcgtgcgacaatctggacaggaagatcaggcaggccaagacgaagacagataactaagaaccacctacatatccaacatggcatctgctttgacagctggagagctacgcaattcattccatagctgaaagcagctcatcgatccccacattggagtgctcaataaataaaacccatatgattattttctgtgcctgactccagatgaaatttgtgctatggagtggaccacgcatttaattttaatatggcaatcggtaacaacttagatgcgatggttatttgtgacctccagttcccttgcagagatccacttggacactttgtcgagtctaaggaggagcaaaccatctgacgtttctatcggatcatgaatgctaaatctttactctactactacatcgagctgacatcagtgagggttcaactattcattgcgagacattattttcaagtcaaatagtacatacttttctgctggctgcatttctttttcatgttaatttccgctggctccaattttgtggttgactactgttatggagtaatggcaaccccagtgcagtaatgacggtttctttttaagttttgctttagctttgtcttgtaatgaacctctgtgatgtttgggatttcttacaaagccggatgctgacgatctttcctctaaaaaaattgccatggtaggctggttcagataactttctggacaaaatgctttcgtcgttttgaacctgaaaccagttacgctatgaaatgatgcaactaacgtagtgtaacgatgcctatctagcacggttgagtaaagacaatgctacatgcgggagaacctcagcttactggttcttcccaataaactgaacctactggtttagtcctcaattgatacattctgtgaaaacatttcatgaacatttgcctaaaatacaggagcgacacgcattacaacttccattgcttctgtgattcccgtgtctaccgaagtgatacatcaatatgcaagctaatgtctgctcccagggtagaaaaagtcagcgccgttttccttcactctaaaatggaagttccaaattctctgtgcttttagcctttgctccctgaatgtacacttgtttaccactgaaagctgttgaaaatgtttgagcaacttcaatagttattataaatgaaatatccaaccctggtaataagattctcatgcaagtttatcaacaattgctacattttctacagcgtggactaataagggcaagaacctacctgtccatgaacatcagcagctaaaccagtgctcaaaggtgcagctctgatcacaagatctgcaatgtagcgcagatgcaaaaggacccccacaccttcctcactcgaatatatatcctcatgaataaggaagaccaacgagcaattctgccaagtcataaacaaaaggcaaaaaaaacatgagtgcaaggcaaaaattacagagatctcagcaacttttaatagatctaacatttaccatctcagaggtaagtgtaacacaataatgcaagaagtccaacacatcatctacagaaccacctgctgcaacttctaacagtgaaacatcatcgatcatgagagtaaagcggcctgtattatctcctgtcctgctagcgtcgatggctctttgaatgtcaccatacagtctaacaaaactatcagaaatggcacctccctttgctccacctgcgtacagaagcaaagcaaacctgtaactcagtaattatgcctttatgcaatatcatttggaacgaatacaaggcattgatgtgattgcttgcctgggaaggcctgcaagtcaaaaaaatgaagcctctcactcttcctatgcaaggataggttacagccctggtaaatttgagaagaaatcatattacatgctatatttcaactaggaaaggcatccattatgcatagcactgtatagcagcttgtccaaatcaaggttcataataacggtagtggaaaggaattcatgatttgtaataaaacggttatcccattcccaccctccagtgtaccagtagaaactttactaggaaatttatcccatctcataaggcgcaagaact

SEQ ID NO: 20729 - DNA, 3110 bp, Oryza sativa
ctaatgtatctgggtgaacattacgggtctcaggtagaattgaagctgttagacacaaaaggattgctgtagtatttcctttcatgtatattattcctctcgaattcatgctattgttaaattgataagaacagttagggtttgcttaaggaaaatgtgaaagtgtttgatgcatgtatcatctacgggtgttcggcatgcatttcggcgtagtaacaaggaagatgtccaagtcaatcattatcctctttattatcctttctgttatttggttttgtccttcttagtcagtttggtgctcttgttagaacttggttgctgttctttcttctgttgcagctcttttgtggcaacttgatctctttgtggttgtttgtactttgctcttgtagcagactactctctttatctccaattgaagtggcctcctgtagcatttcaatttttttgtctgtgaaaattgatagccgtgactcgtgagaagatcttgtagggtctaattcacttgtgtgccactctaattctcgaaccatgcaattggacaggaggtggctataaagattcttaatctacaaggcaatcaaggagacagggagttcatcaccgaagcttcagtgttgagtaaactacatcacacaaatcttgtcaagcttattggctgttgtcaggatggtgatcagaggcttttagtttatgaatacatgcctttgggttccctgaaaagtcatctccatggtatgttagtatgttacaaactagtaacatatatagttccctccttcattacactgcttctaaataattagaagtttgtctaatcagaactgggtcttaatttttccagatctttcccctgataagaagcctcttgactggaacacaaggatcaagatacttgtcggggcagctaaaggcctgcagcacttgcatgtcaatgttgaccctcccgtcataaaccgcgacgtgaaatctgaaaacattttgcttggagatggatatcatccaaagctttctgactttggcttggcaaagatgggtccaactggtgatgacactcatatttcgactagagtgatgggcacacttggatattgtgctcctgattatcttgagagtggtaaactgaccgtccagtcagatatttacagctttggtgtggtcatgttggaggtcatcacaggacaaaaggttatagatgacagtcgagctaagcctgagcgaaatattgttgaatgggtaagccatttcttcctgttttaacttaattgtgttatttgcttctcctgcatgcacaagtctgctcatgaaagagcacataacactatctttatataattacttcaactatttgatcatcttagacttgtgtgcttctgttatttttatttcgtctcatcattgcagtcgcgattttttttagtcttacatattatgtcatgagagaagtagccagtaaagatcgattttagattctagcttcatccagggtttattttactcccccacattcaacttatatcctttggccgaaatctattttctttgtgtaccttgaattttaagcaaaattggaagataccaactgttaacaaaggagacaaaacagctgatatgttaactgcttccattatggctcttacatgctttgttacgagttattctttcgccattaatttgttgcataatttcaggccatccccaagatcaacaaaaaggattttcccaaattagcagacccggtgcttaacggtcagtaccacatgaggtccttgttccgggcccttactgttgctgctctgtgtgttgacagaacagccaaccggaggccagatatcacagcagtagttgatgctcttactcagatctcagagtcacaatccagcagaaagcggtggtcatctcgtctgcaatcatctgtaggttccagtgcatcgactgaaccgaggatagaagattggaaccaagccaaggatcagggagaaggcagctaggaagcccaattgcagaacagcaacatggtttccctgtcactattagtctcaagccttgctctttgtgtcgtgagccgtgatggttactgcctgagagtagtagaaactgaagaacagcgctgttccatttcggaacatatggttgaatttctggagggaacttctgttccttttcttctgtacatggatgaggcttgtcattttgttgtctttcgacatagagctccatactccgaaagcatctccagatggtttcatggcattgctcctatgttgaaatcaggatgagatgggtctcacgtttgcttccctttgttgtatggatgtacttaaaagggattaaagttttttttgtgtttggatacaactttgttttaaggttacaccgaagtgtcagttcaacctctgtccatttgttgtatggatggacttaaaaggggttaaagcttctctctttggatacaactttggttcaaggttatacccaagtgtcagatcaaactcagtccatttgagtatggatgcacttaaatggcgttgaagtctctctttgcattcaactttgctctaaggttatattttgttttcagtattcctcttctttcttgttttggccaattggccgcgtaactcttgaccagccatcaataagatggttataaggtagagtctctctacctttcagcgtcaaaaaaatatctaagtgcttgttcaacctgcccattccgggcagtgcagatgcttcgacttgtctagtttgccaagtcatatgcaatcactacaatgttaagagtgatttactgtcgttaacgaggtaccggttttatactttgtagataccttgaaccataaaatttctgtgttatggcagtgacagcttgcgcataaatggatatgtctggtatagaggttcaaggaagaaataggcataatctcaccaaaattctgaatgaccattcctgatttattatatgatccagtggttgattattattatttatttatttattttaaaaaagagcattctcagtggagactcggtgtttacacaacatatgaaattaatatgcttaaggcactcgtgtgaaagcaagtcacatgaataaaaaaacatcattt

SEQ ID NO: 20730 - DNA, 2848 bp, Oryza sativa
aatgaacaattgtacctcaagtttgtatcatcttcctagagccatttggctcatcatgatgttaatattttttttcttttccaaatatgaaataaagaggatatcccctttttttttactcaaattaagtcgtatcttgaagcattaaacaaatcaaggtaccttgcttttctctagccaaccaaggcccctagaaagcaagcccaatctcctgttaggtgcatcctggttaggatcttgatttggcttcccagactgaggggcagcacgaggtgaactacaaaagaatcccgagtaaacgaagtgtcaccatgcaaagacagtgttagaaagttgaatgttaaaaaccaacaagaaacatcagtaatatgtcatttgtagctaaggatgatttatgttaataaatgaatggagtactgagaaaacgaaaaggaactatctgaagcatcaccactagcaagtatgatacgatgcaacaaaagcaaattagtcatgcccactgctccctaaatgcttaatgtgtggttttgtaaaactttaggaccataaatacctgggattatgtgccacattccgaaattcctgtggttttgtgcaacttataccataataagtgtgttttatgaaatttacttaattaataattatcatttgatcagaactcatccatgatactggacatatagcataggagtttaaacataccttggattgaaggactggttggccttaaactgccctgcctggtactgctttgtagcttccaacatagtttcggccattacagctctcttctccatttgtcgaagtgctgccatcgctgcgtcatacttctcctgaatgtacgaggaacaaaaaggttatgcaactccctttttacagatattacaaattgtacgtgtaaaactagcagtttgagagaacatcttgaagcaacctggagcaactgagcagcatatttcttatcagcagcatctctctcagcagctatgcgggcatcttctgccactttctgttcctgctccattcttatcaaaacctgcaggcatatgtaaatatgtatatattttagccaaccagatggcataaagcacaggcatactaagctgtaagatagaacctgaagcattgcctgctcttgctcttgcttgtctgcaaaggactttcgcaactcagatacctctgcctccaatttctcaacctgagaatcttttctaagtcaagaatgaatgtgcccaaatttaagcccgaaggacaaaacagatttaaggactataactacactactactaggtaatcttcaagcaattggttcaattataaagaagtcttggattgcattaagttgtgcagtcctggaggggaaagagaagcagttgtagataacatcttaccttagcactcaacatatgtctgttgtcctgcttgaccatttccatcaaagcagtttccaactcctcgcttctgagagcatgacatgtgttaatagatcatgataggagttggacacagtacaaaactaagttaatggcccaaaacattacagcgacaacttagatgaaagtatgcatgaatttgacgaagactttaccaattattttagatgcaaaaattatttaaaatttactgtgaaactgagaaaagggggaattattcttaaagaactaattactcttgaatgctgggagctggcctatctggttggaaagaaccagacacatctttgatggaatgctccaaataagtttagatggagaaattccctccttaacgatttatatttaagagttccgagttttgcaggttgttatatctagcagtggctgggatagcttccgtactattgctattcttctttgtaactatacctgtacaatttaactatgtggataaatagatccagaatagaagcacaacaaacctgagttcagctgatcttttctcctcgagcagtttgcacagctcaactttcaaccatgttacctgtgagcattgcttgagtagttgagtatagaaattcatcatgtttaacataagaaaaggtaactaaaaattccatattggcaaaaaaacatctgaatattaagctcagaaaggaacgtaaatattgataggaaccattcaattatacagaaggaccgtgacacaaattcctgaatgtcaattatcagaatgaccaataaatttgaatgcatattataagcacattgtttttttgtttctgttagagaaaacatcagctcattcagtacaaataaatcagtacagagaagttcttacctgatcttgaagatcaatgccctcttccaactcattatctagagctgaactagtaaggtaggtttctagatttgctgacccagaatctaaaaattgcatttccccattcacttgcaaatcatcttccccttccttggaattaacttgtgggcatagaggatcatgtttaaagctgtaaagtttagttgctaaacccttcttatctttccaagaatggcggtcttttgatctttcctccatagcagatataatatcaggcctgtgttttttccttaactcctgcagccctatttccctgactgcttgaaaacccatacaagctgtcaacacaagttgactgctgtcaaaagtagagccagcaagagattgcaataatgtaattgcatctccagcatcctttgtggtcaccagggcaggccctacaaatcaacatacaaagacaacagtgtagattacacttacacatcaatgcttattagaaaagaacaaataataggaaacaatagctttttcagggattaagttataccatataagtcgagcaaagcaagcgttgtccggaacaaca

SEQ ID NO: 20731 - DNA, 60734 bp, Oryza sativa
  unsure (1)..(60734): unsure at all n locations
tgttttttttaagataatgtgaaatgcagaatgctacaaaaggacaagtgtagtaataatatcattgaaatacaaaccaagttttgggaatctttctcgtacaacttcctcaagaacaagctggtcaacctgtaaacgggcagtaacattaacgaggattttgggaaacattacatgtatcatgaattaagaagtacctgagattcaatcatttcctcagtgtaataaccatcaaaatactcatcaatgacccccaccagagccctgaaaattcaaaatgatgagcgaaaacgagaaaaataaagtggaattagagttagcatacaatcttgaaaatacaaagaaaaattatcaatcaagtattttttttcaagagacaaggcatttaataaaagcataccagaatgcatgctcttcaggcatgaataataaaaataggccagcaaaaaagttcatggcctgcaagaagaacaatgaagatataaggtaaagagtaaaggcactctagttatattgacaaaagaaaatgcaacagatgtttctgagccagattaatggtgtctagcatatagaacatttaatgattttgccagccttgcaaagctagctaatagttgaattgcatatttggaacttgggatagacttaattgattttaaccttgtaaatcacctctgaagttacaatattcataattcgtttgtcagcgtggatgattgaaaagtgacaagtttcatagttcacgatggatctctcagtataaaatacagccctcatcaattcatcttttactcaaaggtatacattatttcgcagcacatgcatatgattataaattgggtaattttaccatccttgagaaggtaccacattttctagtgtaaaatttggtacctctaggtactaggtactaagtaccttgattcaaaaaaaattgaatcagacgagtggtcaaacgttgcaagcaaaaactcaaaatcccttatattatgggacggagggagtagattacaagaggttaaaaactaacataaaattatccaatgagcatttgttcacctggcagtatccaactgatgggttatgccttgcatatgctgttaataaccgtcgcaaagcatttctcccgtcctcatctagtgcagggtgtcccggaaatgttcgaggcaaatcctataatgataacaggcaaatcaagcattcaagtgtgtagagagtagagacctagaacagtagaacttctaaaacatgacattagttcctcccatttcaaatcagagagcaaccttctctatctgtcccttccacttctctgggggctttttctgtgcatttgtctgatctttcaactcttggtcctcagggttcttttcatccaattcctcagtaccttcatctagtaatttgttgtagtacccagtaattttacgagcaccaacacccacaaatgcttgccacatctgcaataaaatcaaccatatgtgagtgtaggtatatatctattataaggatataaaaacagtacagataattctggttacagttgcacctctcctctaagagccattggcacacctccacggaccaagctctcgagttcctccctccaagggaaataagactcgccattgcctccctccaaagcagcactcgcagaatcaccttgttccctgtcctgtgcctgctccaccttatctggattagaagattcctctgctggatcccctctacaactcttatctgctgccctttcctcctcttcaattgatgcaagctgtgcttcaccatttccacacatgtcatttgcagtgttccttatcttgcccactcgagagctcatcattttctcaatgattctgattgatgcccgcacccgcttcccagactcaactcttataggcttcagttcatccaacaaccccttatccaagaaaagctcttctaacttttccgagttgtcgttgttcgcttcacctaatccttccaaggcaccatgagaatcttttaatccttcagaatcaccattctcatcatttaatagttcctctgaacacccactcacctccttcaattcttctggagctttgtccgattctacggagtttgcaatgctctcctgtttcagattttctgagttggcagatacatcattgatatcgtccgcctcaccatttgcttcttgcgattgattgttgccatcaatttccttcgaattttctggtgtatcgctcttttctgcatcctcttctccctcctcttcttcattgttgcattttattccacccctattgctattctctaagttttcagctccatcaaggtgttctccaccattgacatctccagcagcagagtcctctttggaaggtgaaatgctggttgtgatgtcatctgcagattcagccaacctgtccaagaagtccttccatctgtccgctctctcctcttcttcttcctgataaaccaaacaacagccaaaaaaatagtacagtatgtatcaaaacttaacctgaaacaaacaaaaacaacgcatttccatttctactctgcccctggtaaattaccttgtaaatcttggcatactcgcggaaacgctgcagatgctgcggccgcaccgcgaatccatacgcgtccctgcgccaaacctcaccaccatcaaccacaactcccgaaggcaattccaaccaccgcattatgccacacaaatcctaacccaaatccaacctaaacgaacaacgacgtatgcaacaatacaagacaataaatgctagcgagagggaggcggaggaaaggaaaaggaggcgccttttattgggttttaccggcactcgccgtccatggggatcaacgcgcattaaagaagaagcgacagggcgacctcggcaccgcacgccatggattgaccaaagccatactaaaccctagccccgcgccccgagatccacgcacatggaatggggaaaaaaaagaaagaaaaattccgcgaagggaatcaaagaattgcgacggatcgcggcaaggtggagctgcgcgcccgttaattgcaccacgcccctccccgcgcgcgccgcccgaggccccagacgcgaagcaacggagatagatatagagagagagagagagagagagagagagagaggaatagaagaacaagaaagagaggaaccgcagattgggggggaaccagaagacgaagaagaaaaaaaaactcgtttttcgcatcgaggctagagcgggaagcacgtggcgcgcgggacgacgatgccgcggcgagcgcgcgcgccctcgcctttgactcctgctgctctgcctgcctgcctgcaatctgcatggcttcgctgtaagcagctcggtctcggcgatttacctcttgtactcgaagtcgaacgccgccgcgcccatggcgcccatggcgggcggcggcggcttggcggcgcacgccgtgccggccgggtcggggagcaaagcaagcaaaagcagagcccttcttcttcgagcacctgtcacgtggaggcgtggacctgtatactggaaatggtgcgagccgagccgagggtgcagagattgcagcgctagtcagccttggaggggagaacgggaatagaaatcgaatcgcctggtttgacctggatttggaggttgtactactcctacccgtttggtatagggagtggttgtttacagttgtgctatattagagcaaggtcaacagtatagccaactgctggctccaaaacatttatagctaatctaatagctcattcatatagtagttaactatgaaaatatactacaccattaatacacggtctcacctctcatacacagataacattttagaaaaatccgtgttgcagccggctacaaatatgtagctcgctttcttcttttttcttttcgatatatggttacagccggcattgtacctgttcttagcagtactagttgattgatgaatggtccatggtgtcattcactcgtgtggtgtgttcttgtttgtgtcaggcatttggccatttgcctacactcctgtaggataatctttgctctcatccagcatctggctcgtcgtttggtggtttggtgaggaccggataatccgtgggccagcatcctgatgaaacatggtactagtaccaaatcggttgatggtgtcacctgtcagctcatcatgcgatgcaagcacgcccacaatccgaattttagacagccgcatgcctgcatcttgtttgcgcttctgtagttacacctgcctgtagtcctgtacaagcggaattagtacgcttgagtgtcgggctgaacaggacgcgattcctaccggacggtacgatccatctgggtcccttttgttcgttgccgcgccactcgccagcacatggcggggcgaggagagcgcgaggcggcgcggcgcctggtggatggtgaccgccgggggccgtgcaggcacgggggggtggttgggttgggtgggggtggggtgggggaggaggagctcagctcgcgcggcgcgtgcgacgactggcggagaacgagaaaatcagcggtcgtggtctcgcgtgatgatggcaaagcaaatcaacccttccgcccgcgtaccgggccggcctcgcgcgcgaagcagttgcgttagaccacgctcccccgcggcccgcgggcgtgcaagcgcgagggcagaggcgcggtccaacttgcgtgatggtgagacggcggtggggaggctcggggcccggtgattttgagcggacgataggaagaaaacgagccgggtaggtgagacggaactgtatgggcttaggccagcggctgagcggcctgctgagtaagtactttgggaaaaaaaaacaattttaaccctctttaaaaaaactagcatggtggcccgcgcagattgcgcgactagcatcattatattttctctcatataatagcatatatgttttctcattatattattcaaatatattaaaatgacaacataattttaaattttgtaataactttacaaaactactaatgtgtaatattcatattgtattttatatacgtgttaattattaattatttttaatatcaaattttaattatttgtaaattatatatattcctatatggactctagactcgtcttttaatatttctttttttttaattccgaattttctgtaaattgtatttctatatagactctatgctcttcttctaatattatttatttttattctgaatttttattatttctaattgtatttttatttggactctaaactcatctttcaatattctttaatttttaatttcgaatttcagttacttctaaattgtattcctatattgactttaaactcttcttcccatgtttttcttaatttcaaattttagttatttgtaaattgtatttttatatggactctaaaaactctaattttaattttattatatttattccaaattttagttagttttaaactcaatttctattatttcctaattgtatttctgtatggactctatactctacttctaatattccttattttttaattccgaatttctgttttttcctaattgtatttctatatggactctatactctacttctaatattccttatttttaattccgaatttcagttttttcctaattgtatttctatatggactccaaggttgtcaggatcgggatactaggtagtatcgttttgctcaaagtaatatcgtatcgtaggatcgggatactatgagattttcttttttaaaatttaattaatatttatattaattatatatagccattctatataaaaaaagtagtaatgatatatgtcatgtaaatagagacatttattaagagaaaccacgttggttttgatatatttaactgattttcatataaatttgagcatatttagttacactattttcaaaccatgttattttaaataatattttgtagtatcgtagggatcgtagaatcgggataccacctaagattttgtaggatcgtgcagtaatgaatagtaggattgagatgctatgaaaattaggatactaggtgggatcggtatcgtttcggcttggtaagagatcgtagtatcgtaagatattaggatactgtcggtgacatgggatcaggagtatcatgactagaggtttgaggcagacacaatcgcacacgtggcctggtactcccgagggacgtcgggcccgagggtgatatgttcgccctcctcttagtccccccgagggggtcgggccgcacccgcctcggccccgagggccgaggcgcccctacccctcgtgggtttttgctccgagtgtatgggttaggtgagcacagtggggctcacctaaccacatttattgtggtttggctgagcgtgtcacgccgcatgtaacgcagtgcagtgcactcatttatccggtctgtgaccagtcacagaccggtcagatcgcgggttaggtggcgacaggcgatctgacgcacgcctcgccccatcccgtcaggacgagggcttctaggcgctcgtccccagctggagctagcgtgttacctcccagagatgacacgatagtcctggtcagatatatgccaggcttcatcctaaccattacaggcaagatgttgtgtgaagaagggcgaacatgtagattgctaagctgacacgtggtggacaagaatgaccgacgtgactggtctgacaccggtcatgtcgtcagcggacagccatgattccacgtcgcatctgctcccggcgaaagtggaggtagttgtgggccgtctcatcagaaggtgactcggacggcaactatacaaatctccgtccatttatgaaaaggtggggtaagtccccacaaaaaagagagaaatggtgcatgtggtatccccttaagatataaaaggaggaccttgcccacttagaggggggactggacttttccagattgggaacccagaacaagggagaggctggctcatactttgtagctccttcctacacagatctcacaaaaacataggagtagggtattacgcttctcagcggcccgaacctgtatacatcgcccgagtcttgtgtgtttccggtctcgcgaaccttccacatacagagagcttagaatctcaccctgagtccccggccgaaccggcaaaggggggcctgcgtggtctcccggtgaggagccccacgctccgtcagatacgaatcgggatactgacaacattgatggactctagtcttctcttctaatattccttattttttaattccgaatttcaactatttctaaattgtatttctatatggactctagtctcctcttctaatattccttattttttaattccgaatttcagctatttctaaattgtatttctatatggactctgccttttctttttctccgattaatgtgagaatttctaagccatgagagcgaacgtggaggctccttttttctattcctttaataatataatagataggttgaatctgattcgtatcacttaaaccgctacaacgactcctcaaactactaaaaacactctaaactaacttccttaactggtttgagagtggtttttactaatataacatccacgtggcagccaaattatttgatgaattaaaaatagatgtgcacccatatgtaagtaagtgacaaaaaaaatacggagtccatatgccagagccactctttcttcgttctttcagacgggctggcacaagaacccactaagtgtgttgtcattgccgacagccttctcgtgccttcttcatcgccgctacatccttgccagagcacaccaagaaagatgacgaagcacaagaagcgacgagattgaaggagctcatcctctccttggtggggccgcaacccatcctacaccacggcaccgtaaaggcctcattgatgccctcagccggagcttcttcctcccgctgcagcttcttgctcaatgacgtcgcgatgacccctcctctctgacactcgctgtcgccgggcatggggataagcccctgccgcatggtcttgtccgcaacgtgggcaagtgccatagggagggatagcgccatggaaggttgtgggagggggaactcggtctcttcaatcaccaacaatggtggctcgtctagcggctccatgagagtgtcgaggttggctgtcgaggagtgtgccgttgactcacactctgccgccttcctcggttgatccgctttctcactctgctgagtttggaccaccgccgctccatccttcgttcggagcgagatataggaactggcattcttccgccattgcatcaccccaaacgcccaatgagagcagagagaggaagaaaggagatatatagtgttattgacaagtgggtcctacatctttttttattattttcttttaagactggttgccacatagatatcacatcaatcaaaaccaccctcaaacccatcgagggagtcattttacgctggtcttgattgattgaggagtcattatacccggttttgtggttgagatgtacaaatcatatttgaaaattttttcctagtactttccaccgtttggccctctttgaaaactttgttttatatactatagtagaagaacttttttctaaaaaaggtggaaccctttcaaacaggaacataatatttgtggtcatgtaggtatacataggatggtccatgaaaaagttttcatcggagtttatttgtgaggaaggaccaaaactccaaaagagattattcacgccaacgtggtatccagtccatcatatgagcttctctaatcggacagttatgtgtgtccatcgggtcatttggattcacacgtcgaaatgtgaaaaccattcacttgcaaaaccacaaacatgcgaactatatccaccaccacatgctagctcattggacattggtgttgcaaaagctgtagaagtactaatttcatcttgctttggtgccgaggctggaacgtcggtgacctgttgcccttctagctcggcacgagattattgatgcactgcaaaagcgaaaacaccatgctgccggcccggtatcaaaacaacgtcgaccgtttcatttgtggcacagtggcatagtgggttttgcgtcaatcccaaaacgccaccacactagatgcttgtttagttcttaactttttcttcaaacttttaacttttttatcatatcaaaacttttctacatacatgaacattaaatttttttcttgaaacttttaattttagtcaaacttctaattttaaggtgaaactaaacacagactaaaatactgggagacggaaggtatagacgtagcgacggtagcgtcgcctagccgcgtcggtgcgaggcctaggagtacagcattgtagcggctggctaacatcaacgtcgccgccgtcgcgttcatacggtggtggtgatggtagtgcacccgtgcggcccatgcaaaagccgcgccggcgaatcgccatcgaacgtggggacctctccgaaacgtgagggcaagagcggaagggaaggatacgatcaacccaacctagaatcgaatgcctctggctctccgtccaccgtccgccacagaaaatatcttcgtccatttccccctgaccgcagtggcccacaatacagtagtactagcactactccccggtgtccagatccagatcccggcgtccccatcacgtatacgtccgtggcggtggccgccgctatcagtcggccagcctaaccgaaacccccaagtttagccgtgcgatgcgagtgcgtaagcgtaactcctccctcctcctcctcccacgtcccccgcacctttccccccaacccgcagcccaaacaagagggaatcgaccaatcaatccatcaatcaatcaaccgatccgacccatgcccccatccgtcgccacccacgcatccctcctcctcaaagccgccgccgcagccgcgcacctccaccccaagcccttcttctccccacgcgcggcgccgccgcggatcccgtctgcccccgcgccgccggccgcaggaggcagccgctaccgtccgacgacgacgacgacggcggcggcgacggcgaccagcgccaccgccgcgtgccgctggttccggtggcccccgcccgcgcaggcgcccgtgaggggtctgtgctccttgccgcattctggcggtggcggtggtggtggtgagggtatgggatctgaaggggtcgggaggaggaggcgggtggtggcgcctgcggtgaacggggtggcgaaggacggggcgccacagccgcctccgcccaagctgctcacgctgcccaccgtgctcaccattggccgcgtcgccgccgtgccgctcctgataagcagtaagttcgagcgacagcttgtttgttccttttaactttgggaatttttttatgcgtttcttgtcgggttgtgacgcggtcgtgtatattgatggaactagtaccgagagctttgatttgttggcgactttctttcgtgtgctagtaatgtgggaaatctgtcaagatgatcagggttgtccttcgagcacaatcaagttccccgaagatagtgctggaaacgctaggaaattgtaggttatcttgctgcgagtaatgtgccggaacaaattgattgaggaatagttgaaactggaaagttttggagtaccccagctagatatgctaatcccctatgtccctctcgttcgtggtgcatatccatttattgcataaaacaattattattgtgcttaatcgtcaaggaaatggaatcagcagatcggtagatcaggtaggtaataattcctgaatcgtcagaacaataaccataaatggaattgatggtccaaaagatcgacactatcctccgttttatttttaacatgctgtgctgctaactggatgatactgctatctgtttttgtatccgtaatttcctaaattcagaacatggtgcatcgcagtagttgacatataggggcacctgtgcagatagtctttactgcctcttctgtctattgttttccaggctaggcctgtctactctacttagaactgttaatatgcactactcactagactttggagctcatctcctatgtgacacagtgctgcgcttagtctgcttagtctatttcatcaaaccttcacaggacctttttccatcctcaatttttttactgtatcccatgttgtgcctgagaattcctaagaatcctcccatatgaaccctgttgcattatacacattactcttcccacccattggggaaacgaagtggttttcttgttaatctgtgtgctaagaacatgttcatttcttctcccaagacacctacttttttatattttcccttgttagactaagaaagcatgcctcagtcactgtatttgacttttttctagaacaatagggcaagaaaaaccttttccaagtccagttccgttataatgatgctgaaaggttgtcctacgtgatgcttttcacctcctataaactgaagggatatgcaaattaaagtatcctatcagcactgcatttttaagtttctgggataatcactatatatatagaaggtttaaatatctagctccaatgtacatcccttttacaaacatgaggagcttttgcattcattcacagtttacatccattagctttatcgaaatgactagtgatgcttttttgttatcaatgattcatggaatttctgcaacagttagatggatttgtacaaacttatcatctgtagaaagtaagaaaatgtacttgtttgtttcctgaggtcaaatagtatgtttacctgacaataaccagcaggtaaggtaacatcaatgtagttgaacttatcgaatcacctttacatcctttagcagttatgctctttcttctatttggatattgtcttcacagtctttattgaacctttgcctatatatttctatcagtttacactgataaatactggttgatatgcatctggttctggtgcctgtttgtttatttttgacagactaatgccaatttgtcgctctgatttatttacattttaactaacagcttaatatttgtattgcgaccagctttctacatggaggggccttgggcagcaactgcgacaactggcatcttccttgctgctgcagtcactgattggctagatggttatattgcgagaaaggtgtgtcacaaataccgatttaataacatgccagacaaggtgcttaccagcatttttttagccctttaattgtttcctcacacaattttctgtacagatgcagttaggaacaccttttggtgcatttcttgatcctgtggctgacaagggtgcttttctctttctgctgctcacttcttaaattgcccttcccacccattttgttacttgaacagctgtgttttcgtttttcctgttggattgtttatgttcaaatgtgagctaactttgttactgccattccctgctgcagcttatggtagctgcaacattagtgttgctgtgcaccaaacctttggaaatttcactgctcagagatgggccatggcttctaacggttcctgccattgctattattgggagagaggtatttccttagccaatctacattgtcaattcatgcacatttagtgaaaatttggtttatagtaaatttttttttgttggtgagctagcataaatcttgggtaacatcttgatttcttgggttattggatctggtcagcttatcttaatctctaagtttatgtttcaaacctatgcaatatatgataagttgacaacttcccataataaaaagaagctgacaacttggtgttttgcttttgcaacgtaggttctatctagagcacagatctaagggtaagactacataatttatgatttaatgaatgctgtttggccaacctctatcttttgggattgagccaattcattctcttttctgtgaggtagagtgccaccatcatgtggcttgcttgaaacagaagtgaaaagcctgcattgaataagaaattttatctcttctttttttcatgctttaagaccctaattccatagtttcttgtcaaccttgtaattccatgcgaaggtgtgtggtaccatgagcaccattatttctattttctagttatgcaaacacgtgtatccatgtagaacaaacgtaactgacacagtgtggtggaatagtgatggttgctacaagctagtatcctaacctattacacatctatcttgtgtttatgtagatcacaatgtcagctgtgagagaatgggctgcgtctcagaataccaaagttcttgaggttcctcctgtgctcagttatccttggattccattgtcataatttgttcagccatttaaatttctacttgctacaacaggctgtggcagttaacaatttggggaagtggaagaccgcaacgcagatgacagcattgactatcctccttgcgagcagagacaaaaggtattcttgtttggtatttgcatggagttttaacattgcgcagcattctttttattatttctgtgttgatggttcggttttttgtgctttgtactttgcagtcttcctgcacaagatgctctggttacttccggcatcgcattgctttatgtatcagctggacttgccatatggtccctagtggtgtacatgagaaagatatggcggatacttctaaaatagccgtagcacatagtgtaatagaaggaacaggagcaagccagcaaggtgatattacatttcaagagcatacaatttttgaactgcggagttgattgatggacctagaattggttgagatcctcagctacttacgcattgtctcagtttggcggattagttgctaagttgctgtggctgcaagatctccgtagaaacaaaaaacatagtagcaagtagtatgttgcccgggtgattacttcttcgaaagctatttcagagcctatcacggctcgagtgttggacactgggtgtaatgatctgcaaaactgaaaaatgcagaagattgtaaccgtatacgaatacaaaaccatgaggtttgagtgtgtgactctggggtttctatagtttctaccattgtaagtttacccatatgatatgtcagaagcgaacattattctttggacaagtggtgttcttgttgtgcatttgagccatttaaccaaatctgtttgatattacacctggattgctacacctcctttttcaaagaaaattaggtgaagaaaacagctattgccgtcatatgtgccacttgctctcgtgggcctcgtggccgtttgatctgatctcaacggtctagatcacgcgaggccctgaactagtaggggtcacagccaaaagcccaaaactctcatgcccgcgccggcgggtgatcggagctgagcatttcacgagcagcggatgaagctgccggcgtggctcaccgccgtgccgccggatcctagggcgtacggtcacctcatccagctctgcgcggaatccggccacctcgccgctgcccggcagatccacgcgcgcctcgtcgccgcctccgtgacgccctccaacttcctcgcctccaagctcatctccctctactcccgcgccgaccgcctgcgcgacgcccgcagggtgttcgactctatcccgcagcccagcctcttcgcctggaacgccatcctcatctcgctctccctccactcgccggacccttccgcggccgtccgcctgttcgcctcctccgccgtctcccccgacgagatcaccctctccacgctcctcaggtccctcgccgcgtccggcccggcgctctccccactcgtcaccggggagctccacgccgtcgcgttcctgcggggcttcgggtcagacctgttcgtgtccaatgcgctcatcaccgcatatgcgaacgccggggacatgcgctccgctcgcgctgtgttcgatgaaatgccgagaagggacgtcgtgtcctggaactcgcttatatccgcgtgtgcccgtgcaggctggtatagagagtgcttggatctgttccaggagttcgtgcgggttcgttgcagtgatggtgatggtgttgggccgaacggtgtcacggtgacaagtgttctgcatgcttgcgcgcagctcaaggttgttgatttcgggattggtgttcaccgatttgctgcggagagtgggctggacatggacatggcagtatggaactcaataattgggttttatgccaaatgtgggaggttacaatatgcacgacagttgttggatggaatgactaggaaggattcaatcagttacagtgcaatgatcacagggtacatgaataacgggcatgttgaagagggaatgcagcttttccggcaagcaagtgctcggggcatcagcatgtggaattcagtgattgcgggcttagttcaaaatgggcgccagtcagatgttcttcggttgttgcaagaaatgattgcctctaaagtactacccaattcagccacactttcaatcgtcatgccttcagttccttctttctcaacactactgggagcaaagcaagctcatggttatgcgatcagaaatgactatgatcagagcatcagattggtcagtgcattgattgatgcgtatgcaaaggctggatttcttgatacagccaggaaggtgtttaaactgactgaacatagaagcacaattgtttggacatcaatcatatcggctgtcgcagctcatggagaagcagttgaagcattgagcctgttcaatcagatgattactgctggtgcgaagccagacactgtaactttcaccactgtgcttagtgcgtgtgcccattctggcaaggtagctgaagctcgtaaggtttttaactcaatgcaggctgtttttggtatctctccagtgattgagcagtatgcttgcatggtttctgcactcagtcgtgcagggatgctcaaggaagcagttaagctcgtcaacaagatgccttttgagccaaatgcaaaggtctggggtgcattgcttaatggagcagcagtagttggtgacgttgagttcgggcgttatgcatttgatcgcttgtttgtcattgaacctaagaatacgggtaattacattgttatggctaatttatactcaaatgctggcaaatgggaagaagctgaaaccataaggagcatgctgtggggagttggattggagaaggttcctgggtgtacttggaattgagggagaacaatcgcttgcaagttttattcctgtgtttgccttaaagccgaaagctacacacattgatttggttgttgaggggttaaatgggttgaatgatagaaaagatcttgacatcaacctaagagttggatgaagacaagttatgtcgatagcattcaatagagctaaaagttgaaatgtgattatcatgcctgaaagcacatcggcattttggaattatttggaccatcggattccatacgccattatgtggtcaattatattgatctgaccaattatcaaaccctaggatgacaaaggaaaatgagaactggaaacaataagagctttgctaccacaatcttcaaacctttcgaagtgtatgatcttgagctctaatttttaataaggccaacagttactacagcaacaggaaagtcaatgattacaaaaatgatgaaagcagttgcattctgatttgaattttcaggaagtgcctccacaagttaaatctcagtgtttgatgaaacaccaaaagagcagcatacaaaagttagttcagttcatcaaaagtagttgttctagcttcagtgtttttatctcatgaaaatcactactggatcatttctttagcccaccatgcttttttgcattttgaaactggaatctgtggttaatgggattgaacctgtgattttttttcaacatttttttctccgtccaaaccaaatccttgtctgctttgcatgcatgtgcccaatcctatcctgcattagaattacaactgcatagagctagcacaacaagatctgtcttttagtaccctcgtgcttgtggatcacggttcacatgcttggatcattctacctcttcacttcccaggtcatgaactccaaaaaggaaaagcacacaagcagctctccggactgtgcccaacttgctctgatcttactaccagaaagccacgactcttatttcgttctgtgccagcactcacatgctaaaacttcacaggctgaaggttgcagcgatctccacatgcactgaccgaccaaatgaagcaggggatagtattactagtggcaacattgatgtgaattccaatgtgagctccagctcatcctggagccttggagttttttgccgggtggagccttggagttcaagtgaagctaagtgagtataatcaccacgacgctcttataatacaataggtggtacaatctattcattcgcatttgaacgtatacaggtggagcgctccataattgggatcacatcatgcataggcgttgagcacttgagcctatgacagaggttgttactcatccanagagtcccaaggccagcaagacaaatcaggtggaactgtttcctctttaattttcttttggctttaccttcactgtttgtatctacattgttgcgcggttgtccatttctgtgccttgatctaatccagaatttcaaaatgttttgaatagtttcggtggtattatatatgttatatctctgtgcacgtgatacacctcccaagcctcccaggtcacggtaatgaccagcggtgggagacaaaataggccgtgtccttcagtcctttgtgcattggctgagcggtgagccggtgagcgtggcatgggctatgtcctatgtgtccctgcattcacttgctgaagaagcgtcatcatcatcgttcatcggcctgttgcaaaggctccactcttagatcaggaatgatagtcaccgttgcgtagtagggtcgtcgtaatgatgccgggcaaaaaaaaaaaaaagaaaagaaaagacctggaccagcagtagaagaagaatagtacagtagtgtacctagcagttactagttacatagcatttccagtggaatctggttggaaattcttggggcaggcaagttctttttattgttccgcttccatcgctttgatactttaactgcctgcttttttcaaagcataatttttgacccggaaagctctttgtgtagctatggtggtcgaagatcctgcggcctgcagtatcatcgctccagaatccgaagcctcagatgcctaggaaacactgtgcaccgtactgagcttatagcatgaaaaagccgcagctatctgtctactacgtaccactctactacctccagccaaattgttggtgtataatttcatagactgttaagctcgtgggcaaggaattgttgcgccaatagaatcagcaggagaatcaaaagtacactcgcagatcaccactcatccctcacatgatgttgggtgcagtgctaacttccaatctcaccaagcaccagcgaattcctcgacattcaacgtggcagatcagttcagctcagcctaaatattccttccgttccattttaaatatataaatatagttgtgaatttttattttaaatatataaatatagttgtgaattttcatgtctaacatttaactatctatcttagttgaaatatttttatgattaatatttttgttgttattagatagtattttatgtgtgacttgttacttttttaaaaaaatataattttttctaataagacgtacggtcaaatgttgaacgcgaaaactcacaaatgcatttaaaataggatggaggtagtagtttacactaatttccaccaaattctgtatatattgttttcagagttcaggctattatttttaacagccgcatgcaggagaggacagctcaaatgtcattgttaatacttttgtcctgtcgctaatctgatgggtaaccctactcaaatcatttcaaatgcagaagaacacccataggccgctcgtgactgaggcgccgcgacagggacactcgaggcgtttttgtctttgtactaccgcagtgtagccgtcctcctcttcttttttctctagaaaatacagaagtcggtggcttcccagaatttcagatgctgctaaaaaccacgaggaaaagaaaacccggcaagaggacaccaaggcctgagaagatggggcaaaacaacgagcgggttaaatgaacattgcagagcggcctttcacgtggccttctttctgccctccccttcgcttcgctccctcttacactgcagttatgcaacccccaaggtaatgaccccacatgtcccctgcgaccatctctttgttaattatactagtttagtagtatcattaccacgcttatctgtactttgcaagttaggttaggtttgagcttgtgtacagtatacaattgacaagtcttgttggcagttggctgatgcaaacttttcttaagctcctcaacacaatctctagcatgttacttctcccttctgctccagtgcatccatctcaagacctcataccatctctcttttgcaggaaactaatgtttgcgtgcagattatgtgactgtaaaaaaaaatcaagacaaatgcaagaagtgcggtcattgaagaatgtagggaggtgtaaaaaaaggaggtttctagggacaccagttatgcacctcacgggtggcggtcacggacagagccggttactgtggtcatcaaatcagtaggttcagtacacgtccccttaccgtgatgaggcgcctcacctcacgcctcagccatcagacatcagacggacgccttcggcttcaagcctccactcctactacctccctccaattcagcaaccgtctgcaccccaagcccaaaagcagaggcgcatgcagcggcagaagcagccacagccgtcacatatcgtacgcccatccctgaccccaaatcttggtcccttggatactactactaccaccagaaacgtcgacgagagaagggaagctaagctaggagaaatggctgccacagccatgcaatgcaggtttgctacaattttgcttcttgggttttttcttggatgccttcttctagctaggatcagttcttggattttctgttgatggatttatgggatcctaggatcggttccttgacatcatctgcatttgcgttgcgtctcattgattgcaggggaggtgagcgcagcgaggacggcggtggcggtggcatgaggacagtggagtgcctgagagggaggctgcttgcagagagggtagcatccaaggctgccaaggaggaggctgattcactcgccaaaagggtatcttctcttagccacattccctactgttacaacctccttgataggaagtgtgtgatactgttcttgagctttttttggtggttggttatgatttggtcgcagctggatgagctggagaagaagctctccgacgaggtcaagatcaggaacaaggcggagaggaggctcaggagggccataaagaagctggagtccctcaagattttggatgtggagctctcggacagctccatcgggtcactctcctccaatagctgctccggtcaccgcgcgccggagacggaggcggacgtgaacaatcctggctcctcggctggttcatgcactcaggtgaactcctcccaggaagggagctggtgctctgttgtgtccgagcaatcaccatctgttcattgcaaggaggaggaggagaatggcttggaccctgaagatgctaagaactgcggctctggggaggaggctggtgaccatgactcagagaggtaagcatgcggattaacaagaggtgttttattattggtcaaaagttaaataacctgcttaatgtttctaggattaccgtaatttcggtaggaactaaacaatctcgcataggtatttctgcattttaggtttctatgttgccttatgtctcgccagaactaggacataaattccctcctcctacgttttgtttttcggttcatggcggctagctccacaggcatatttcacgattattgttaggtattgaggaaacaacctgtaccctttgtgtctccacaagcagaatgattgtgtttaggatagcaaggagatggacggattgtcggtgttgtacgccacacaaattggaccaagcccacctgaaatttttcactttggtgaatgttagtaactcaactgtacgaagaactgactacgtgtagctgccaccaattatagcataaacatgtgcacaattgactccggtgttaaaaatagagcagttgcgcttgcttaaacggcaacttgatccttcaaatttgactattttttaattccttggaaaatgtcaaatgctaactttgtacttaacaatttaacaacctgtattactgatgcagaacacatggaacgctcccatgtagcagggatgatgaacctgttcatgtgccatccgacttcggctcatcaaaatcccaagataaccaacgcgacgaggacgacgacaggctagcgctggtgctggtagacccgcagccgaatgcagaaacaggcaacgaagacgatatgcgtatcgatatccaagcacggaaggctcaggccgagcccagagagggagacggcgaaatggaggaggcgaatgagctcgcgatcgtgctcgtggacccgcaacccgagcccaaggcggagcctgcggcgacggcgaggccgcgcaacgacgtgcagtccgtgctcctcgcgctgcggcaggtgaaggagcagctgcggtacacgatcgagaggaggtcggagctcgtcgcccaccaggagctttgcggccactgttgagagcgctgcacctcgtcagttttgagcagcggctcttgctagtatttgccacgatactactagagttcttgacagtgatagtgtagtagagtatttgtagagaaattggaataagattttgctcccgtggctgtgttacatacacgggagacaaactgagataattcagttgtgtacaatttgttctccatctgtcaatgttatatatgatggtctgatacgtctgttgaaaggaaagcatttcatggatttttactatccattgcaaatttccaggatatccatcggttggctctttagaagaaaaaggcggtttataggtaaaacttctgtatatatgtccataacgatttaaaagaaaaggctataaaataaactacaataaaaaagtttataaaatcaactctaaaattagttttaaaatttaaattttggcttaaaagcggttgaagaagcgaaacgatgggagccacaagcttttagtagggagatcgtggaccatgtatgcactaacgaaatgcatcatcagatattcacatgccccgctgccaagacattggcattgttgcgtatgtcattttgtaacacgaaggaagcatctaaaacttagaatacgataacgtcttaaaagctaactacaacaacataagttactactggtacatacctaaggagccatggtcattaaaagagggaggtaacaaaagtacagtattatcccaaaccaagcagcaagtcaagctacactgctagggaagtaccgtaagcaagtcaacacagtaaatagcactcaacatggctaggagaaaacatgatgccactgatgtcgttagtgttgtacaaactacggcttcaccccaaaagtaagggccatgtccgagatctgcaagaatggagtgatactttgcatgtcaagcaacaagcccttggcaatgggaaatattgtaggatgatagcagcaatatataacctcacaaaaggcagggagtgcttccattatgccgtgcctgccacagtggccgcgtcctgcgtcttgcaacacacatatgggtcggatacaaaaacacacaaaagaagcaaaagttacacacaataccatgataaacttaccggcttggagctgtctttgccattttcttgagatggtccactagatgtttctgcaaacctgggaaagtagtgaagagatgtcagctatagctgatagctaggttaagattctattagcaagaatgatatagcactgccacattcgtacctaagagctcgtgcctttcttttctcttcttcccccttgtcaacatttgtactctgaccaaatcgttctaaacgagcttttttcttagcgtcttcgtcagcagaagatgaggcaaggccaaatctgacaaagtgacaattcatccaactatgtatcagttcgccattacggggaataagaaaaatctacaatagcagagtgcaaatagtggtattaacacacctctcagccctggacttcctcttttgttcctccgccttttcatttgaagatccagtcccaaaccttgtaaacaagatgagagttagtaactgaaataagttgtttgggcaacatatctgatgcaaagctaggagaggcagaaaattagtttaacaaaggagacacttcatttagttccagtcaaatttaaatccagcaccaactagattgaaagcaggatttacttttttaaaccagtactaatacacatgattgaatgacagtctagtaaatgagctctgatatcaaccaaaggtaccattatttccatccgaataacatctaaagtagctgaattctctcaaaagcttttgatgaatcatgataaagcaaacagatggtttaattctaaaggaaaaaaaccatagcttttgtattcaaaacaccctcttcattaagagcaagaaatactatcataaaagaatagggtgtagttaacggccttttattggattcaatataagtctgtaaaaggaaccaagaaacttcttaaacatggtgtaaaatagtataaatcacagtaattaattaaaagcatgaatgccttaagagcattcagcattcatccgtacaacggcttaatttggatgtggcttgcctgtgccctctgtatgcttcaatctatgttcctcaagcaagtgtcaaccatcaaactttagtccatgccagagaatttttctcctctaatctgctccatctcagagaagatatcatggtggccagtgttggatttcatagtgattgaaagctagtcaataagggtagcctaagaaccttcctataagagaatgcacttttcttgtaagttaaaccatgatgcaagtttattgttttccttgttgtaactaactgcacttcatctaaacaatttgaactggaacatattttcacaagaatactattaacccaaaaacagatatttaattttcaaactgtggcagctagatttcagacatgcattgaacacaccattgggtaaaagctttgttaagcatctcccacctgtattcttagtgactgaatatagataaaataactatgttgccaatggttcatgggatttggtagttagtccaatgaaataaaggttgatagccaaaactcaaactgaatacccaaaactaggaccactactgtattacagaagcagtatgaaacaggacatttagtgctaaacgcctaaaccaataatatcctagacaaatgaactatggtttgcgctaggacctaggtgatgcagcgcatagagactaaattagcaagcaattgcataaacctcacaggatattgccaagggagaaacacgagcacccttctcttaagcagggaaaccttgttaaaagagactgaaaggaatacatcgtattcgcctttttaaaggctcctagccgtctggtagcaaacaacaaagtactattttctaccacgggaaaatctcctcaaaatccatgtataaatgatagagtaactaaaaactgcaacattggtgcacagttaaatcctgcatgcatcctatatattgttttctaacaatactaaacacatctgttcatggctcaatattaccaaggtctttttctgaatccatcatttcaaaagacgattaattatcccatattcaccctcaccatgaccacgaaatctccaggatctgttaggccaaaaaaaaaaatctaaaccctagaaaagaagggactggacagagcaatcacctctcggcgcggctgctgcgcttctcctcctcggacatcaccacggccgtcccgaaccgctcagcgcggcgcatcttcttctccagatccgtggccccgccagcggccgcccccgcggcagcggtagggttttgggctggcgtggcggccgacgcggggttcggagccggcggcgcctcccccgctgctgcggtggccgccggcggggacggctcggcggcggcctgcgcgggcttggtgctctgcgacgccatcgaggggggagctctcgtcggggggagagactagagagagaggtagagaggtcgcaccgtcgcagactcgcagtgggcggagtgcggccgagagtcgcctggtttctttctccttttccgcgattttttttctgtgttttttgctttgtccgcttgcgttcccccgtttcgacacctgcacttcgcatatgtgctaccaaatgggcccttgggccattgtagatgggccataatgctccttatataggagaaattgcatttttggaattttttattttaattttttaatatttagtagaaaataaattcgtattttaaaattttgcagaaatatattcctccgacgatattgtaggacatggcatgtaaattgccctatgagatggcaatttatttgacgtgacacaccacgagagatgcgtcgtgccaagtttttaggtggcctcctctgtgataaaccgctctcccctaggacgatttatcaaaattgtcatggcacgacccatgcatcatcaaactttgcgtcgtggcaattttgcagccacccccacaataaattgccctatgggagatgttacatagggagataaatcatcgggaggggggcacctacaaaattgtcgtgttacatagattgctctatgcccctccctaaggtagagcgggaggagatttttgcaaaactttgaaattgtaattgtattttttattcttttaaaaaataaatatatttttttcttaaaaaatcacaacactgttgttgtgagataaggcataaaacctggtagcacaagcatgctatctaaatcgtatggtatatggatatgctgggaaaatatgtggtggaaatcacatatgtacttatgtagggcctgttcggccgcttggtacagccgctgcgctgccacagccgaaagaaacaacacactgtgctagttggctgcagcacagtgaaaataatggcagtcgaacatagccgtagtggaaactcggaaactaccgatggattgaaaaatggacatccgagattcgtccatgtcatcacgagtaaaaatgttgctcacggatatattgcgagatttttactcgtaatgatgtggacgaatctcacaagtcaatttttccatccaatggttgtttccaaatttccactacatatgtggtttccaccacatattttcccggatatgctacctagtttttaataagatggcatcgttaatttttaacgcatgtttaactgtttatcttatttcttaaaaatatgtaattattatttattctgttgtgagttgttttattactaaaaatattaacaatgatgatttatctcttatgtatttgtataatttttttactggaggaattctatccttactcatttttttatataattgcctggcgaaattttcgtttataattagatcgcataaaacactactcactatgtcccaaattataaagcctatattttttacatggtctttaataacatattttaaccaatattttattctattatatgatcccaacaaatataaaattagcatcacatgaaagtacttcacaataaatctagtaatataacgtacataatacttaaatctagtgatataatatatataatacttagtatagatatagttagtatgattattagtcaaaatattccgaatttgattctcttaaaaaaaaagagcgtcctataattttggacggacggagtataacgctatcagtgactaagctactcaagatgacataatcagttatgtcacaggagaccaccaaacaaaagctatagaaattagaaaagggccaaaaggcaggttacattcttcagccacaaaacctaccacttaaaacataaagatgacccaatcagttgtgtcaccctgccattacgcatctcaacacaccattagtccagtcaatgattggagctaatgaacttggtttgccaagtgccctcgccgccacggacacagacgtttccaaaccatttgtccaaacaactgcgacccaataacacaatgtgttaactaatcaactcgtctcccatctcctgcaagtataaaaatactcacccagatcaaccacgaatcactcagcatatcacattcacaggccacataattggatcactcctccctctcccagctcatcgccatggccgcagctgcagcaccgcgtaggtaagccatcatttgattagtagtagtgctgtgaaccaactactgattagctacggaaaatggcaaagtttttaccctaatgacgatctctgtgattaattacggcttcgcgtgtgatgcagctccgggaaagaagcgcttcccgctgcgctcggctccgcctctgagccccctcgcctcttcgacggcaccaccaggtgaggttaacttacgtgacagataattaattaccatgcctctaaatccctttttttttcttttaacttctgcgtcgaagtaaatcttcttttgtgactcttgtgaaggctttacatttgctacttctgcccgtttgctcagcgcgcttggattatcaggaacttcaaggtgtttgtttctgaacttctctgacctttggctgcagagtttcatactccttttactcctcctgctaaaaacctgaattttttttgtacttttttttggctgtcaatttggccagggcttgcaggacaagatcgagctagtcggcattgatctgcaggacaaaccagcttggtacaaagagaaggtttacgaacagggcacggtacagtacacctgttcttccttcctgcatgtcatctgaatctcttcatgtataatttttgtcgatgaacaattgagtagtatggatgttgttgtctttctcgataggtgccttctctagagcacaacggcaagatcatgggggagagtttagatttgatcaagtacatcgacagccatttcgaaggccctgcactgctccctgaagtaaggcagagaaattcagtgtaacacgtgacagtgatgcagtttttttagggagtgacaatgatgcagttttctttttttgggagtgacaatgatgcagtttttttttctctgagacgtggtttacagcttataataatgtttggatctggaaaatgacaggatcctgagaagagacagtttgctgatgagcttattgcgtatgccaatgcgtttaccaaagcactctactcacccttaatctccaaagcagatttgtcagctgagacgggtaagagctactccctccgttccacaatataagtcattctaacatttctcatattcatattgatgctaatgaatctaaacatatatatctatctaaattcattagcatcaatatgaatatggaaaatactagaatgacttatactgtggaacggaggaagtagttgtgtcaatctagcattgcagcatctatgccatgtttgtagataaggagatttgcagttttaattcatttgcatgctgttcgagaaaattcatttgcatacatgctgatttactgaaattatgtatcatcatcagttgctgctctggacaagatagaagctgccctgtcgaagttcggtgatggtccattcttccttggacaatttagcttggtatgtcgattcggtttgttacaatgtggttcattttcctttccaatgtttaggatgtgtcgaaggtaagggttgggaacttctttcccgcgtacataaaacggagtaattcattagcgcataagtaattaagtactccctccggttctataattcttcatgttttagacaactatacggtctccaaatatatctttcactatgttttttattataatatgtaaattaaataaataaaattttacttttattatagtactttgtaggtaaatctattgctctagtgactttaactaaatatctttaaagttattgatagtcaaaggtatataaaacattgttcaaaatgtcaagagtaataaaatcggagagagtattagctaaaaatacttgaaaaatgaatcaatatgatttttgattttttaagtaactttcgacatattttttttaagaaaaaacaatgcatcctttagtggctcggaaggtgtgcggaaaaaaaaacagagagtagaagttgaaactcctacggagcacacccttaatttctcctaaaaaacttgtggccattcttcgatttccaggtggacattgcgtatgtgacaattattgaaaggattcagatatactactctcatataaggaaatacgagatcaccaatggccggcccaacctcgagaaattcatcgaggaaatcaacagaatcgaagcatatacacaaacaaaaaatgacccgctttacttgctcgatcttgcgaagacgcatcttaaggcaagaccacttcctgaaacaaatgctcagcctccgcaactttgatctgccagttttatagtcacttgacaattgcacttctttaatttccaggttgcctgaagatgttgagccagcgatgtactgaatgacagaatgatgatgatccatgccccccccccccccccccacacacacacacaaaaaatcaatactcttttcttgctactccagttgatagtacatgttttgcagcttttgcttccaataaaccgaagttgacatgtggtgtaaaagtcatgtttgagtaataaaatactggtgtaattctatgttactcaatgtcgttggtcttaaatatactttcatgtcattgaaaataatcttttgttgtcaaacttatttactagtatttattatccctacagtttcatattaataagacgttttgacttattataagcagacctctaacttaacaaagtttgtagaatagggtagtaatatttttaacacaaaacaaatataatactatgtaaatgttagatttaacgaaactaatttaatgttgtagatagtgttatgttttttttcctataaatatagtcaaacctaagaaagtttgtctgattaaaaagttaaaacatattataatataaacagagaaatatgttttttaaaagggaaataaggtttttgaattgttgagtcacatcataagtcctttcaaagcaccattagtgtgagtgtttcggtgaaatcattggtatatatgaccatacatacgatgattctggtgcctataatattacatagacttggtcttatttttttatgaagccatttggcacacttgaatgatatgaaaacataacacccttcactagaacgtttagcaacaagttaggagtttgtgctattaatagaatgtttcgtgacgttatctttccttttaacggaaaatagcacaaaagtgccttttcatttaatagagtagaagaaaatacaacctctagggtaaagcgaaaaagagagaggtcaccgtaagctatacactatacaagttgcgggacgaactcgtgcaatcttttagcccctgctaaagcccaaaggctagcctcttctttgatttttgttaggagaaagcttgttgccacctctttgtggtcgaaaatccgtcgatttctcaccttccagatttcccagacgactaacaagatgagggatcgaagacccttttttaggacgttgagcgtatttgctaggctctcccaccattgatggactgaccgagcttcctcccactgagccggcaccaattgttgatatcccacccatctagcaacgaggtgtcagattatctttgtatatcctcacatggtgacgagatgcaaggccgtctcggctttacaacgacagagagggcaatggctgttgttttgtcaactcctttcgcaagccggtcagacgtccaaactctattctggatgatgagctatgcatggaatttgcatttccccggcgcccagattttctagaacaaggagttgagacttgtgtttggcgcccgcaagcactgtgcatggtaggccgaggaggatgtgtagtgcctattacttatgaatttccaaacaatctggtccggttcttcgttgtttaagttcacattccgaaccgcttcccactagcggactaactggtcaacaaggttgattgtgaaatatgagtctgcatcgagggtcaggtcatgcacccaggtgtcgtcttcttttacttggcgtagggactttcctttgttcttggagatcgcatagacaagaggcatgaggacttttggtttgcacccatcaatccatgcagaacgcttgatgttatggtacgtcttttaagtgtgtcaaagggagcagcttttcgtgtgtgtgtacgtaggggtaaaaacggtcgaaatcggtagcatctcttcaggaacaacggtcgatcagccggtaattgatcatatttatcatttaaactactcagtgtcgatattaatacgatgcagaaagatattagaaaaaacaaaattttaaaatagcaataaacggtatggtcgaaaatggtaccctttatacaaaaacggcgtttggaatttccgtaaccattttcacccctatatgcatgtatgatgcgcacacgaactcaaactaggatcgaaataaaacatactacttcgtccgtcctaaaatataaggaattttaggtggctatgaaacatcctatcacaataaatctggaaggcttatgtctaaattcattgtaataggatgcgtcaccttcatcgaaaatttcttatattttgaaatggaggtattaatagttaggtgggtctcaacaggcctatctagaacaattccctatgtagtgagccaaggaggtaggatagttccctccgtaatggatcgaggatgtccgtctccttaacccacttcaaaacgaacatattgtggttttgtataatttgggccgaggaaaacccgaaaacatctccctcggtcccaccccaacaaaccaccggtttccttctggagaaatcccggaagaaagcacaggaacacgggaggatgtgcgtgcacccacaccacgttctcgtccaggtgctgagcggcttgacgaacctgaccttccgcgcccgaatcagctgctgacgtatcgcctccgccattaccacctcacactctctctccccatgaattcgctcgctttccctcgcggccgatgctccccgtcaccactgacgcgcccctccacctcccgtagttcttccgtcccatcgtcgcgcacaataaagattcgcccgagctcgcgaagcgtcgcccggtgcaacctccgcgacgccaagaatctctccccgtcccgcaccgtcgccatggctgccgcggccgccgcaccggcaaggtgagcacgcgtgccggctgcggcgaggctgaggagaagaataaaccgcttgttgcggttcttgattaaaatctgaatttctttgcttctcttactcatgtgcagctctgagaaggaagtgctccccccttccctgacctcctcatcggagccccctcccctcttcgatggaaccaccaggtagggtttatgcagacaaaaaaaaaagtttaaaaaagaaaaaaaacgaaaggaattgcagttatctgaacttttctggtttctgcaatctgcatagattaggggtaatttgatttgtttgccttgcgcaggttgtacgttgcgtaccactgcccttacgcgcagcgcgcgtggattgccaggaactacaaggtattacatgctgttctttgatttgcggactcggttcgtagttttgggagattggatcacataccctccatttagatcgggaattgaagacttctctagttttgtggtggtgtttctccgataaaattggatcttttttgtttgtcttttcgtttccagggtttgcaggataagatcaagattgtcgcgattgatcttgcagacaggcctgcttggtacaaggagaaggtttacccagagaacaaggtatagagtatccctggtgttgagttgtgatccaaatttatttgcacttaataaaagcgagcttcagccgacggatcgtcatctttttagggttccaccatatatatacctcttgtaagccgccgtgcggcgatgtaatctcaccccagatataatgaagatattttgctggctagcgcccgtggttttttctgtccggttttggaagggttttccacgttaaatctcgtgtcttatatgattgatctattattatttatcgtttgttcgcctatcgtttcctaacaccttgttactgtcaagtctcaactctgctccaataaaaaagaaaaatcctttacagcttaatttgctataggtgtgcacttacttttttttgccgggtctgtgtatgcacttttactttttgataggtaccttcacttgagcacaacaatcaggtgaaaggagaaagcttggatttggtcaagtacattgacaccaatttcgaagggccagcattactccctgatgtaagacgatatgttcaactttcactggtgtaatgcttgcaaaaagagaagtaatttataatgtgttagcctttgaatgtgtaatttgacaggattctgagaagcagcagttcgctgaggagcttcttgcgtacactgatgcgttcaacaaagcatcgtactcatccatagtcgccaagggagatgtgtgcgatgaggctggtgagagcactcgtgtactactacttgattactcatttgaacgattttttatgcataaattctgcagtttgtatccacgtgctaatctgctaatataatactcttcgtcagttgctgctcttgacaaaatagaagctgctctgtcaaagttcaacgatggcccattcttccttggccagttcagcttggtacgccactatagtctgggaatgtttttccctggattatcatttaaaattatttttgaaagctttttgtttttgctgaaaaaaatgtgcttgatactccttatttctttccaggtggacattgcgtatgttccatttattgaaaggtttcagatattcttttctggtataaagaactacgatatcaccaagggccgacccaaccttcagaaattcatcgaggtaattcagaatgatggtacatgagaatgtgagattgcgccatatgttagttggttgggattatgtttaccctatttttattgacgttgtttcgaatactagttcctgtggccaaagatcacatggtgtagttcaaatcaatgttcttgttagaaaaaacttcgctgaggagaaactaactcaaattgatatgttacaggaagtgaacaagattcatgcctatacagaaaccaaacaggacccacagtttttgcttgaacacacaaagaagcgtcttggggtaagatatatttacaattgttcttatgatctccttccgccgacccggcaaaattgttcttatgatccatttcatctgccgacatactacatttatacattttttgcacattttaacttccagattgcctgaagatgtgaccaaggatgaacccacaacaacctgcgatggagacagggagctggtgcagtatatagtagataaagactagtgtgcttcattttagcatatggtttatcttgaataagataatgcatgtcatgcagaccatgcttatggaacaaactattatgtatttttggtttggctgtgtacagctgttaatgtgaatttcccgtcatataattaattacaagcttcgcggggcgttgtctaataaatcaatgcttcttgtatcattattactagttgtcaggatgattttcatagtgaagtacttctgcaaatatgctaagcagaagtcaaccggacgttctaatgatgggtgaggaaacttggtgataagcacgtatcataaattcacaatcctccagaatggatcgttgagaaacgtctcctgcgagaaagcgcagtgaactgcgtatgaaaaagagtaaaacagagttcgttttttgtttctccgaagccccgaatggattgaatcgttactgcttttgccaacgaaatgaaggccgatcctgaagccctctccctctgtccttttccactttgctaatcttcctcgtagaagcatgattatgcagattattgcattggcgtaagtgtgaggacatgccatggttgatcagttacagttagtggttcaaccatggcctattggttcagagctgcaggtgttactaacttaccagtattaggcgattcaaaagcattcaagtagtataaaaccggcggagtaatttatttgtgttcagtttacagcggcaactgcaaatattactcatgctcttgttagtactaccttgtaatcctttgcttaatactccactactacatgaatacctttgtatacatgttaagatcactgagttggctgagcacgagtagtcaaccaaactcgagaaatgaacacaaatgccagtgtccatttcatgtggccttgaaaaactaatcactcttttgacagtcatcaccatacaagaagtctacgatgtactccctccatcccataatatagcaacctagtttcagacgagacacttcataatacaacgaatccggacatgtttactattcagattccttgtaccatgaagtgtcccatctgattctaaattattatattatgggacggagggagtagcaaaaattggttagatgtctataccacgcatgatgattttagttgccttgtattctcttaaaatacttgtatctccctgctctctcttttttggcacctctctgtgacaccctttaaatgctgaaactttgtatgttgaaactttgtatctctcttcttctataaacgaaatggcagagctcctgcccgttcctaaaaaaaattgaccgctctggcacatcctgtgtattcttctccagctcgtgaagaaccgtgtgcaagatgccgactaatcaccgctttgtaacgtgacacgttccaggagcgacatggcaccagccatcaccactcgctcctcttttgcttcggccgtcaccgctgacgcctcaagttttcttctcgttttacctttcaacgcccgtcttactcctgtactctcgtttaccagagcacggtgtgacagatgcagcggtttcacctacaaaaagtgctcatttttgcaagttgtgtacggcaatcgcaatggcaatggcagcagcagtagcagcaagtaggtgcgatgcagtttctactctctttttttttcaaagaaaagtttcttaggacaagttttataaaagaggtggatgttgcatctaatgttgaccacatcatcagctaataaatgtagaggtaacatgtacaatatatcacatatatactaattctaatacactagccccaatgtttgtttgcccaatctactcttcacctctctccttttgtcttgaattttgtgtagtggttgcctcttgcatgagaggtggctgctttatctctctcatctcttctctcctccacctcactattttagcttatgtggcatctaggagattatgcttggatgccatagtacttgccctaaggcagcgttcgagagggtgagagagtgagtttgtttgtttcgttttccgcacgcacgtttcccaaactactaaacggtgcgttttttgcaaaaaatttctatagggttgctttaaaaaaatcatattaatccatttttgaaatttaaaatagttaatactcaattaatcatgagctaatagctcacctcgttttgcgtatcttcccaatctcctcaatccccttcttctcaaacacacccttactctattgcaacgaataatacgtactatatctgaatcacataattgcacggtatgatttatcgtctctgttggatttaggcttgcaatggaagttctcccgcctactatgccatctgcttctaagcagccacctctctacgatggcgaaaccaggttgatcaatcattactgtttatctgaaattaccttctccctttcaaatctttcagaaaatatgctatctgtaacgtccacaatcaccttgatctgcatttgtcaaatcatctcgaccttgctaatgtataaaaagttgcaatggcagattgtacatgtcaacatttgcccatatgcgcaacgggcatggatcgcaaggaactacaaggtactacaaaaccaagctggtcttctgaacaagcttgattcacttgtcttctttagcaaattgtacgtcggtggttttgaattttgattgttttgggcatcagggtttgcaggagaagatcaaattagtccccatggacacgaatgataggccagcatggtacaaggaggtgtaccccaagaatacggtgtggctagtcttaaatattatatgaaaatgtagataatacttgttttcttaatgcttgatacttgtcatgacagctgccatccctggagcacaacaacaaaatcattggagagagtttggatttgatcaagtacatagacatcaactttgcaggccccagattgactcctgatgtaagcctatcaaactgcttaactccaaatctgtaataacaagccctgacaggattgatacctctactggtgacattaggattctgaaaagcaaaggcttgcagaagaactcctggcttattcagatatcttcaatcaggctgtgcgttccgctctgatctccaaggatgctatgacagcagaagctggcaagaactgaaaacactaaccataattcacttgtaattttgacatttttttctctttcaaatatgagactgacttacgaagcatccctgatcatcagctgctgccctagacaacatagaattctccctatcaaaatttgatgatggcccattcttccttggccaatttagtctggtaatttgcataaatgatttgaaaacctcacccactggttattgctggttaaacatggtattgatgtttttctttatcttttggacaggttgacattgcgtatgcaccttttattgatggatttcagacactgtttgctggcataaagaactatgatattactgaaggaagggctaacatacagattttcattaaggtaacagacagcaagagaacaaaaaagaagaccaaagatagagcatatgaatgatgattttgatgatttacttgtgacacggaaaataatgcttaacaggaattgaacaagatcgatgcgtatatgcacaccaagcaggatcctagcgaagtgattgctctcacaaagaagaagctcggggtaaggacgtaaggttgaccagcaaccaagaaatgcttattacaatatctgcaaattactcaaacttgacgttattttccctgcagatatgacgatattcacatcgatcaactggtgaaggatgcacgcataggataggaccaacctgctatgagcacaataaaatgtcactacgtagtgcagttagcaaggacgtgtaggactatctcgtcaggcagatgtgcacatttgtgatttaagacaaaatggcattttgatcaggggcggattcaccgttggggcttgagcctcagctccatctcggcagaaccccctgccctgcatgcagagcagcagccgcatggcttcgggagagaagcagcgtattgcataagtgcagatcaaccaggtcgcaaggaaggagcaaacgaagacaacatttcgcgatccatgggtgattaagtggactaattggctgctggaccttccttattaagctactgtattagtttttgctttcttttctgcctacttcaatggatggaacgatcaggggattagtgaagtgagtggtttttactcacaaagtaatccaacaattatcaacaattgtgttattgaatttgtggttgtgcctttgtcgtattgtctttcataatgggaaagcgttttcattcctcgaggggatatcccatcattttatgcatgtcatctaaataatcatcaaaaaattgaaaaaaatgattaatatgaaatatatcactccacaaacatgcaagttaaatttcaacttctacaagttgcgaaaaaaatatataattgtgaatatacgataactattttcaatttaatttgttatttttgttgtaacttgtagaagttatatatttacggagtaatatatctcatatcaatccatgttgtcatttttttcaaattaattagaactatttagatgacatgcaagcttccatcatacttcctaaaactcattagaaaggagcaccccctatatttttgttctagattcgccactgattttgatggtgtaatgatgtataagttcataacaaacaattccatcatatcgctcaaccatataggactactccatcagtcctaaaatatactacctccgtcccataataagttaatctagtatgagatatgatatatcctagtatatgaatgttcatattcatactactaaaatatgtcatatgttgtactagattaacttattctgggatgaagggagtagatatttctagcgttcaaattttgtcccaaaatatagctacttagagcaccaagagatgtttatagtgaattagtgataaaatgtctaaaatacccctatgttcacaaccccaacctcccaccaaccaggataattaacgaaggtaacccagtcttccttaatctctataagaagtagctatattttggacggagagagtacttctatattgcatcatactatggattaaagtgcctgataaatatcagctaacacttaatggaactaaaaggagactatttgtggttaatggaaaattttacaacatatttcatcccagcaacaagccaggcgtttcaggcaggcattttgaatgcatgatatgcgccaccataagcatcccaacaatggaaaagaaatgtgcaattttgaacatttattacggataattccttctgatgtttctgttgtaaactgggggcaacagcaacttccagtttacacatgaaattagagaaatgaagtagcacaactaaaagcacaaacaaaataacataaaagcgactgacagtagagtgcaaacgtacaaagtcaaactttctaccacatttgcagataggagttcagatccaaaggctgagagggttcattttggagctgattgccataagcacgataaaaatggacgggctattgaagaacacgcatgctcacagggttgttcaggcagaaaccccggttcttagtaatgaaagcattggcggcatcagtccttgagcggaatttaaccagcaccactctgataggatctgggacaccaggtctgtgcagtagacatgggtggaatcaaacaaggatgaatggaacaaatttaaatgctacttcctccgtttcatattataatactttctaacattgcccacattcatatagatgttaatgaatttatgaatgtggacaatgctaaaaagtcttataatatgaaacggagggagtagcaaacaaggatgtctgtccaaatgcttacctgagaaagctttcaaatggcggaggttcaacattggtgccacacaggaatcgttctatgtcctctggtacagcatttcgagggactccttgcaatagtatctgcatgggcgcagacacagattacaattatttccagataaattattatatccataattgcatatgaattgtaactataagataatgaatagctggtaaatggggggaaataagataaagatatgtcctcccgatttttgacacccactcaatagtattccctcagtccctctatccaaaagtgttaggcatatactccctccgttttttaatagatgatgccgttgactttttctcacatgtttgaccattcgccttattcaaaaattttatgcaaatgtataagatataaatcacacttaaaatactatgagtaataaaacaactcataacaaaataaattataattacgtaaattttttgaataagacgaatggtcaaacatgtgagaaaaagtcaacggcgtcatctattaaaaaacggagatagtatcagtttttgctttattcaaaagagatggtcatatttgtagtcgccttgtgctaaattaattgttgataagaacccaagcagccatcttaaatacttattggttgcatgcatgcatatagttccatggttttgttatatgaggggaaaagggggggggagttaattcctcctttgtcttggtgacaaaagaaatactcctatgtcttacattttttgatggagggagtagttaggaagaacagagataaaactacacttgcttgccaaaacacaatatattcaagttttactggcctgcccagaggacaaggcaaaacaacaacttacagcttttccatcataagactgcttcagatcaaactcctcacgactgatctgtaacatcatagtataaaaatatattggtgttttgccataagcccataaccaaatgatagaagtgacaaaaacaagcttagcctaaccatctcaagcctgtactgacgaccttctcgtgtttgcctgactgctgtgttaaataatggcactgaagaaaacctcaacaacctgatcaagtgaaaaaaagtttcaggtcaatagtcacatcgcaagtgggcagaagaaaatcacttactcatatgttcaacggtaaatctatgctcttgtcactgtaacaatcacagtgcagttaatgagagtgcattccatacatttatttttcaacagcattaagggaaagatttttatgggaagagatcagctattcatttttaaaaagcctgcctagcaaaatggagaatatgaactaatgacgaaaaagtcaagaagtaactatatttcctgcgtatcaagcacccaagaaaaagtgaaatgtgttggcagcctgatacatagtgtactggccaacaaaacatgagcattcactttagactttagtactttatgaatagacaatgacaaagggtaatctggactgaagcttaccaaatacaaataaggcctcaagaaagacttcaaaagtagggatgggcacgggttactctgtgcctctgtgggtacccgttgacccactctaattcaacaaatcaactaaaatgcactttttattgttttgtgtatttagttcatttggttgaaataaaagtggctgttggttacccacgttgtgcactgcacctatgtttatcattatcgaaaaaaatatgttgacacttcaattacaatcctaatttctaacaggctaaaaacatagctgctctagttgattggaacctcctagcatcacagaatataataggaatattatgatattactcagcaatataaactgcttatgcatattcagtccaaaatcaagtgaaaaaggtacataaataaatggatatatgtagtatttgacacaaaacaaggaaagatgggaaataggaaaggaaccgtacgcgcccactggataatatcccctgttataatcaatcttcacatcgtccagtgacagttcagatttatcaaggtggtggataatatcagttttgagcatgctcttagggagacggctgcctccaggaataacactgtagaaccttccatatgccacacctgtttccacagaacattatttctgatatatacgatgtgatactgtaaagccaaatgtaaaaaatgaagtttccagagttacaagacaatgtaagttgcggttatatgcacttgttaatataatgggaaaaaaaaccgtattgcaatatgatagtgcaaaagtacaacttttagaagctgtggttcgcatttccaaacgtttgacactcgtcatgtgagatattcgcaccaatatggaataaaaagaatgtaatttctcattagtgcaacatcagagtgaggtattttactgtatctaatccatcaatctacattcctgaccccaaatcctaagcggctaaagacattataaacatttaaacctcaaacccctaattacagatcaccacagggaaaaaaaaagcaatcggctccgcaaggatgggagacctaccttcgtcagaaggcttgaagaaaggctcgtcctgcgacccctgggcggcggcgcccgccgcgggggtttctccggacgcctcggtggagaagaggcgaggcgcgaacggagcaagcacggacgagcgcgaggaggacgaggggatcccagatgcggcggtggccctccggagcgcggctgccgcgagcctcgtcatgcctaccggctactgctcgtcggcttcggcggcggcggcggcggaggaggagaggaacgacggagcttggagcctttgggggacacacgaccgacggagcaacacgacgcgaatggacccctgatgggcttctgatcggtggctggcagcgaactagcaaattataaatgggcctaaatgggctaggcccattatgtacatgggccttcttgggctgtctagagttattgggctatactatccttgagacacggcccatcagcccatgtagtagtatttgcgtttaatcgatataagaaatacgttttcgtagaagagaacacgggaaatattaggttacgcctttcgcacgtggctctggtttgtcaagcatcgggttcgcgcaagaaggaaccagtcctttctctttctctctctccatcgggtggacgacgagacgacgacggcggcgaaggaggaggaggaggaggagaagagcgaggaaacccgtctgcgcggccacgcgacgctagggggccgagagcctgcagcggtcgccgcggctggagcatgaggtggccgcggcccatctcgcctggccgccggctcctcccggtcgtcgtgctgttcgtcgccctctgctcgatccctggtgagatctgagctctcgcctcacctaaggcgggtctgtttaccatttttttatgttgctaatttgatcgcgcggacaacttgaccgtattaatcgcatgtgttttttctattgcttcgatgggaagtgctagcaatttttttaagtttgtgtaattgcaatggatttgtagatggccagaaaattggctgcaaggtaaggtattggatgtgattggcctctcaagttcaatcggcgttgccggaagggaaagtagaaatgatgatttatggagccctgtgtgcaaagcaattgaatttaatcagattggtcatagcaccgcattgattttaatagcaaataggatcagcaatttgaatagcatataaggtatgtttggaaaggaaaacttagccagagtagtacacattcctgattaaatatttccaaaaaaaaaggagatatggacaagagggaaggtctttagttatatgcctgtgatgcagacatctctctcctggtccgagttgaatcaagcaatgccgaactctggacagtctgttttatggcgtatttattggttcagctgaaggaattttttttctcagacttcataaggtagtttaagtgttgggatgttctttgacaaataatagcggaggacagattgtctttcctactcttgttcctgccatattgtcctaataaaggatgggcaaattttggatccctcacctaatattattacacggaaaatgatttgtgtactaatttctagggtcacgtgagaggaacccgattcccgatttgaggagtagggcataacactataaattgatttctgcatatataatatgctgcatttcacaagttatattcaaacagacttgctgtgatgagtccaggggactcaaccagcgatgctaggtaaatgtttagttaaaatgtaacgatatggcctatttctctagaacctagataatgatcggtactgtgtttatcctgctttgttgttttcttaaaataaggctggctactgcctatgttccaaaacagaaccgtgctctccctctgtaaaacattgtctggtttggttattagagcaatagattgaatgctccgcacctcaagtcattgatgattttatcaattccagttagtaaattatatattgcatgcccatgttttatgtcattgacggatagcctcaaagaaagaaaagccaaccgatacttctcctttgttaaaatagatcccagtgtgacacgagtttgaaatacgttattctttttgtggggttggggactatatggaaggtaaactggtaaagtgcccatttcaaagccgtaaaggcttaataatccttaatgtctcttatctctgacgagatggagatgggtaaaactgaaagtcatggatatttatagtagtatcatttttaactgctattttttgcgttgtcttttctgatacttggagagggtagctgaactccatagatgccttctattacactcactagctctttgttcatcactgatgatgcttaattttgtagggattttttctcagaggctcgtcacacttgacagcattgatatatttactactcatgagtggttcccgagtaagccaactgtgtatttcctttgcaatggtgaggacaaggtgtatttgcctgacgtgaaggatgcaaacaatatatacacctttaagggcgaagaatcatggcaggttagtcaaccaaaagggctgcttcctctcatgtctcatgcgcatcacaactatacttttctgttttcatttcttagtttccttttggcagcccttaacagaacttccagaaaagaaatgcaagaggtgtggtttgtacgaagaggatacatttaaacatgatttgtatgatgaatgggagctgtgttctagtgatttcaaaaaaggaaaatacacccatttcaaggagggccagttcaatgctactttcctatgcccaaattgcactgcctctgcgggtacggctcatatccaatgcctatgttttagtttgctaagatatttttcattcataaactcattgagctggctagatccacagttgcttttctgtcatatgcccttttgattttaatttcctctatagaattgattaatcataaaatactagtaatgatcttggtggtttgagttcatcataaacattgcttaagatacctttttccctaccaggtgattctgcaaaccatgattctagctcagaagtggaaactaaaaagtcatccgttactgtaatcataatagtcagtgttctttcttctgtccttgttatcattgcattatttgggggctacaagtactggctgaagaagaagagggagcgggatcagttacgattcctcaaactcttcgaagagggagacgacattgaagacgaactgggccttggcaatgaactctgaacagcacatatagttaggttcctgaagctctgtggagagggaggtgacactgaagatgagctgcccctggcaaggaactctttccaaaacatcacgtacagtctgacctgggaccttttcagatggattctccatgtcatgtataaatggacagctttagcttagaaatttttgttatgtagtgatacaccatagtttctgaatgaatgattgacaaaaaaatgttcttcaattcatagaagttttccccagatacaatgtgcatcatttggaaaccttctactggtctacatcaaatttcactagagttaacttcggtttagctacaaatatcactgcacatggaagaggcgcattgcatattctagtcttcgtcatatgcttctctctcccccttgtcagacagatttccaagcttgtccaagtagccaccgttgacaagctgaccaaagacattcttcagcactgccggttccaatgccgggtcaaaaatctcaaaccccgggatgccgtcagcggcatgtcgcttgaccatgagcgcgaacctgacggccgcgccatcttgcctgatgtgtgggatggtgtgctcgtcgagatcatcgtactcctccggctggtagagccggtggcagcggccgggccccgagaatccggcgatcgccgcccgcgcggccgccgcctcctttgagatcctcaccggcggctgttccgacaccaggccggtgtcgacgacgtacgtgatcccgtggaccagcacggccgtctcggccacgtcggtggccagcacgactctcctccggccgtcgggcaccggcgagtttatcagcatgatgtcgatgagctccgccgggaggttgtcgtggacgtagcgaacggccagccctggcactggcaggccgagcagcctcgcgtggacgccgatgatgtcggcgttctccggcaggaacgcaagcacgtcgccgggcggctgcgacgcgtggatggccgccacctcgtcggccaccgcggccgccatgtcgagcacgggccctcgcgagtaccgcacctcgacctggtgcgccgcgcgcgggatcgagacgaccggcgcgccgccgaagaaggcggagagcatgccgtcggccggcccgccggcggtgcagaccaccaccttgcatcggccgcccatcgtcgtccccgtcgccagcgcggccttgaccatcccgaggaggacgtcggtgccgagcgtgcggtcgtgcgcctcgtcgatgacgacggcgccgtacccggcgaggaccggcgccggggagctgaacctgtcgaggagctgccgggttgtcgtgaactcgatgtccgaatcccactcctcgccgaccttcgccatggccacgaacgcggccaggtggcggggctgcgcgcagagcaccgggccgtatccgctctcggcgaggcaccgggggagcaccgacgacttgccggagccaggcgcggcggagacgacgacgacacggtggtcttcgaggtactcaaggatcgccggcatctggtggtagattgccggaggccacgactcagcctcgtgctcttggttagagccggccatgactgaaaaaattgcgggaagcgacgagacgtggaaggaaaccgtgacgcgcgcacaggaaccgttgaaaacgcgagtcaatttattgaaaatcacactagattgtaccagtcagagttataaataagattatactgttaagacttggcggggtccattataatatcaaagtcttatacggaatcaatactcatatacgaaagttatttgcgataagaaaataaaaacagattcctactcgaacactacaaatattactcgaatcatacctctctagttatatttgaacaaggagacatctgacgatataaatagaagactcctcaagaggagtggggaatgatacacgaagacatgcctagatggaatgatagatctagacaagccagtacagatcaagacaaaaccaataacacattgacataagcctagacaaataccatatgaagccacaaagaccgataaaagggatttagcgcgacctccaatcttgctgagttcctgttcgagaaagccgatataaattatccatcaaccacctgatcgagcttccgctattagattgacggagactagatcaactcatactcaatattgtactcgtaagatattgatatataaaggcaacactggcttcggtcaaaaggaatagtgttattacatgtcagtaaggggcctcaaacctatataaaagtacatgtgtcctatatattttcacgtgtatactctgatattaacgatctccgtactttacaaatagtgtagacggctacacagcccatcaatagtaacacacctcattttactcaagcttcgcctaaaaaattcaaagccgatgttattatagccattgagctgacattcttttcaaaacactccaccataccaccgaggtagtatatacaggagtagtttgtaggaatacatgtgagcaattccactgttaacataaaaacctaattacttactaatttattttccacatagtggtataatttcttttaaaaattacaggtggaataagcggatagatgaaaagtctccgcttgcccaccccgtatacctaggctatgtttagtttacgtcaaaattagaagtttggttgaaattgaaacgatgtgatgaaaaagttaaaagtttatgtgtgtaggaaaattttgatgtgatgaaaaagaaaaaatatttcggaactaaacacggagctaatatcttgtgcttggctgctactcctgccttgcccgttgctagttgctgcaagctaactatagtaactactgctgctgctgctcgctactcctgcatgtggctagctgctgcgtgctatctactgttgctgctgctcgaatgggccaaggcccaaggccggcggctctgttgctgcatgcgttagctagctgcgctgactgcttctgccttttttttttttttgccttttgctcttcttctcttcctattttcttttctttactacatattaatcttgcgatagatttatagctttggatgtttctaaatttttaatcaactagaaaaaatgcccgtgcgttgcagcgggtgaagactattttaattttattattgttatatggtttaattaagatgaaaatcactttgagaattcgcttggatatatgttcttctagaaaatcataagccacaattaggagtccgatcatcacaagttagaatgcgagttttttaaaaatatttttttctacgactccttctgtattttcaaaagagaacgaacttagaacttgactcaaatacagatctacatttccaaaagcaaacgaacttaaaaaccgactcatatatggatgacttaccaaagtaccggcaaaaaaacaacttcaattttttataatagtagagatataatatatatatataataggtaaagaaatacaaatattacatattcaactggtgaatctgtcaacgggtgatacccgtagaccggatatagaggatatcggggtatgttggtacaagggtctacgtaatacgacatccagcaaacaaaagacgaagattatactagttcaggccccttgataagtaatagccctaatccagttgatgtgggatatatgacggaaaacacaggttacaaagggaacgatggaactcgatggatccggcgagatcgtagtcgagttggttcgactagatccccggcgatttggctcctgcaggctccgacttcgtaggctgtgggggttgtgttggctctgagattcgatcccttaggtcctccccggggggtcccttttatatcgcaggtcaagcggttttcaagtaaaactcggagacatcagaccctacacgatacattgacgacccagtcttgtccgagtaggactcttttcgtccgtaaactccgtaaaggatttccttagtgtatgtagagagtatccgtatgcgcgtgggtatgccataccgatatgtgacgtatatcgaaaggtaaagggtatacctaacccgtaaccccgaatacaaatattacatattcaactggtgaatcaacgaaagaaaaacaatgaatacagttaaaagtggcttagtgaaaagatgcacaacacaaacgtacatgaaaaacgcatgagttgataaaattatcaaattcatcataaatcatgtataatatcttatcccatttatttataccaacataaagatgagaattcaacagaaaaaataataattaactatttagctgggcaggagcagaaccagccaagacaggaaggagcccaagaggcctacggcgatggacagatggctcagctggtaaaaaaaaatcaggactcaagagcgcttactgccttcctcggtcagatgcaacagcgcctgtacatctccgtctccgagcgacgtgcgggcgtgcggcaactatgccgatgcgacgacggataaaaaatcagacaacgtacgaaaatttgaggcaaaaacatcttaaacttttataatagtggagatgtatatggcccatttaaatgaaaataaaaaaaataagcatataaaaatctcaaatatagagaaaaaaactattctaaaatctaattttgatgcactataactgtgtgtaagtagtgtaagggacgcatgcatcattggaatttaagaccaaacattgaattactcgactcgatgatcttacgagttagtacatctttcgactcgaattatacttacaacacctgcgaccgagaaaactggtgtttcccgcgaccaatgcaagtttcttgcatataagagatcaatgaaaatctacaactttcaagttcttccttgaacataaatacagacacgaacatgtacagagacacggtgttgttcatctatcggcgtacttagatcctgaagaagaactgataaccctccgcgtcctccgtgtagctcgagatcctaattaccacggcagccaacctttcagccgatcttcgccgccgtctttcgccggccggccgtctccgatgacgccgactgacctcggcttcttgctcggcattctcgccccaatgtccatgcacggacacgcgagctgcggatccttcttgctccccgggccaacgatctccatgcacggacaggtcctcacgacggcgccgacctcgagagagctggcgtcgccggagcactgcttgcgcggcggcgcggggtggaacaacgtcccgcacgcgaaggtgtcgagcaggacgagcacccgcacgccgccgtgggcgacgcgggggtcggcgcacgcggcggacacgtacgcgcatatctgcttgctcgccacggccacggcgcggcggtcgaacgggtgcccgacgagcgggaggacgcgctcggcgaggacacgctccacgctctccgggctccgtagcccgcgcgacggctgcctccggacggcgatgtcctcggccaccttccggacgatcacggcgccgccggcgcccttcgtggggttcgggccgacggggaagtgcctcctgacgacgaccctcacgtcggccatcagcgccggcggcggccctgcggcgccggatgagccgcgtcggccggcaccgggcgccgtgtaggcggcggcgaggtgcagctggctgccgacgcggattgccgggacgacgggaagacggaggccgtccatggatgcgacaatgcgaatgcgcgcgcgcgctctggtttgctgaatcgctcgaacggtggcactggacgagatcacgagaacacgcgaagaccgaagaggtggggagaggagagcgtaatggtgcgaccctatatctatatgacgtgttctgttcttcctctccattacggagtcggagatgtaatccgaagcgaactatgaatcggcgtatgcttccgaattccgatttccagttcctacctcggtttgataattgggccgagttgggaaacctgaccctaaccgtaatgggcctctgagttgggcttttttgggccaatagaccctaatcgcatgcgttcggcccacttagaaatggatcgctaccattgctcctggcctcctgccaagagactcttacacatgagtacatgaccgtggtctgtctgaaacataaggattagtatttcagattaaaagaacttgtttagtgtccttcagatcatacaaagaagagcacctggtggctggtgctccatgctccaatatttctgtacatgtactttactggagtgtcaagcgtactgtagtacagtgtgaatcaaagagattgcgagaagattgaaccaaaagtataactgagaggttgtttgcttgctagccacactttgctaccgggtaagacttaggatatcaatgtgtcactaatctcagtagttaataaataaaatcccaacggaagacgtaaaacaatgttcagctattcatgcacgacagacttgttcacatattcagatttcacacccttctgaatgattaatgagtgggtgaaactgtcaaagatttcacgagtaaaaggcaacggttgatggtgatagttgcatcacctttaggatatgtatttctacatgtaaatgcgtactgggcaaccaaatcacatctacacgaagacttctgaagaaaatatctgcaagaagatttgcttccctatgtccctttcaagttaagaagtcgcagcaatatgtttcagatttgttgccgcagtccgcagatcgtgctgctttgacatgtctctagtgagagaattgtaatcgtgaatactagcaatcagctatatcttgctcgtcaaatgacggaaaaaaaatgtaaccagtgcgagagattgttgtgaactgcaaaatgttcagatctgcttggaagaccggacttcgctttattctctgcaaaaacaattcgatctccagacaatctagaaaattgtgggggctatcccaaaagtattatattagctggcagcagcggttgcacatgctcggtgtgattatattcagatgcgcctaccgaaaagcctgcaccaagaactcaagaatcaagagcatatgttttaataatgcaaactgtaagcctccttttgaaacaaagaaaatgtataggattaaatcatttttttcttctatttgatcatttgaatcatatgattggagctttctaattaaatcctatagaattcgaaaggattgactcaaatttttttagataatggaaatggacatctccggcttctgtcataagacacacaaccataagtttaatagtaataaaaaggtaaggtaaaagtaaatcaaaatgagaaataagatgatgggacaaatccccaacttccctttattattgactagtgttaaaccacataaaattttttttagctagcaattctaatggaactacgccacccatagtgaaataagagacccttggctaccgattccaagagtatagcaccattgcacatagtatcttgctcctcctgtggtagcatcgtagaccaaaagtggagcaagtaagaagacataaagataacctgcatagggttagataattgtttaccattaaaactttatcattacgacaacgccaaattgaccagtatataacactagctccaattagaatcatcttcttaatggacctagatactcctctaagccaattaccgaaaatgtttttggcgttacagggtggggggatattaaaagcaaaaaacacacatctccaaacaaactgagcgacatgacacttaaagaaaggaggttggattgtctcttgtgcatagcaaaaagaacaatgtttgtctccccccccaaatttcttttaaccaggttatctttcgttagaatttctttcttgtgaagaaaccacataaagaccttgatctttaatggaattttcaagtcccatagaattctctttttatctgaatattacagttcatgatcgcaacatacatagatttaacggaaaattgaccattcttatggagcgactatacacagagcagtccttttcatttgacagagttatattaactagcctgaggatcaaatcgttctactcgattagcttttggccaacaatagctctcctaaaagagatatttagcgccgttgtggtcatgacctctgccacagtagactgtttctttcgagccacattatataatgtagggtattgatctttgaaagcacgcgatcccaaccacgtgtcttcctaaaatcttatgtttgttccattgccatatttagtgcataaagattttgtagaaaaattagtaagagttctaatctcttgttaaatttcctttgggtggatctttctaatttgatttttatgtcttttctatgatctattcaaatgatcatcaatgtgtttttcatatattttacatcggattcctgtgaaaatcctatattgttttctattgcaacgctttctcacttctatgattcaaaagagccataaatttcgcctcattttattttttgtttatgttcggacagtacaatagccacaagttgagagagcacattacaaagcaaactgtaaatttcgccgcaaattatttgttcatgttcagacagtacagtagccacgagttgagagctcttattgcaagttgcttaggccgtgtttagtttcctcctattctcaacttttcatcacatcaaaaacttttctacacacataaactttcaactattttttcaaactctcaactttcttcaaactttcagcttttttcaggacaacacacccttacaccggattctaattctcgatccaccatctatcaaagaacaaaaaaggcaatagaggacggcagcagggtttcccttaccgccggtaaccgtgcggttaccgcggttatcgggcttaccgccggggtacggtaatataaataccacggtaaccttcttaaattcaaataaatttaaaaaataatttaaatttttgataaattttacacgattttgtatggttttttacggttaccgtggttaccgcgcggtaaccgtgcttaccgtcgggacacggtaaccccgacctcggcggtttgggaaaccctggacggcagcgagttgctcgcctggtagcgacgacaagaagatcctgctaaaaccacatttgaaattgccgcatcgctcccagttgctgcatgatctttgcttcactgatccttacgtgagcaattaaacagcatttgggctcactaccgcaataattcagatttttttagcgagaaaggtctttgctttttttaatttcattatataataatagtcctagacatatagtaattctacatgtggcgatcttatcgtttgagaggttgtcaatggtcatgatttgcttctatgacaagcatgccacttagcttagacttagagaactcacttcgtgcaagcaaaggttacgtggataatatacctggtgacttccatgtgttcgcacgacgatagggctctgacttcttatggaagatgaacatgataaacgtagatgccttttcatatagtacgacctacctgaagacatgagatgagatttattagacgttttgctggtcaacacacaacacgtcgatgactcgtgcgacgcaaatgcaaatccagatgagttagtggaccctcacacttatacataggagtaggtgtcatctgagtcaatatactagcaagagtgagtttgaaagagatgttgggattgagcttttttttagcacatataaaacgagataagtcattactatatgattaattaaatattagctattgcaatttgacttctatgtaaaaattttttttcaaaaacatatacattagtttgcaaagcgatgaaatagtttacccaacttctctttagaactcagcctaaataaatctaacccctaaatatgctaaatgtgccagccctagtccaaaatttaatgagacctaccataagaatgttgacatgacatcttcaccaatcctacaaacccttaaaaagttaaaagtttgaagaaagttggaagtttagaaaaaaagttagaagtttatgtgtgtagaaaagtttttgatgtgatatgatgtgatggaaagttgggaatatgggggaaactaaatacggcctaacaagtatggcacacacacgctttatttttaccttttttcttctttttattctgtctttcattctccttttctatttctttgcttctatgttcttcctcaagcgagccttccttgagctcaagttgttgccattgagctcatggtgggctggtgggcatagtcgtgcactcacactaagcaactatcgttaagctttccatggctgctgtaacatcccggcccagggcttaataggattaatataagacttgtgcacacgagtgaggacaaagtgtgcagaaaagacttgtgttggtctgtgagggcagtctatgacctatgaaagctgccagatgtaagcggaccacttcttttctggaagccgatgtccaaagaactttagggttaagcgtgcttggcctggagcaatttgggatgggtgaccgaccggaaaattcttcccaggtgcacacgagtgaggacaaagtgtgcatgaaagctgccagatgtaagcgggcccagcttgggagaggcgggacgttacagctgcgatgcttaagcgtccctatcggccgccaccatcgagctcgtcctacccttggtcaccaccactcctctaccatcactgagctcctatgcatccacggccaaaacaaaaaccctatccttacgtatctcctctttcaccaaccgaaacccaccctagcctccattgcttcagtcaccgccattaaacaatattagatcgaaatcctaattcttcgccagcacaaaatgactaaattcattagtgttgcttctcatgttccaaaattaaacatgtatacgagttcattgtacccggtaatcatttcgcctctcctatccttgggtgatcactagcatagttcaccatcacgacaagcaaccataatgctcaagtgtggagattgggggcgaggcgaactcgacagtgatggttggggacaagagctcgagcatcctgatcatgggatgctcaacgggggtcatggcaagctagacagcggaaagctcaaactcaagaagaagagagaaaaaaagagaaaggaaaaggaaaaagaaaagaaaaatcttttataggtggcccacttatcctttgacgtagaattggtgaaggtgccatatcagcatcaatgcgacatgtcatatcggattttggtctaatattaatacatttagtaagttaggcgggattaaatgtgtgccttttaagtttatggacctaaataatggctacttacaaaaccatggcttgcaggtgtatgttactcaaaaatttatttcaagcggttatcagttataactggttaactggaataagcttggtgtgcaagactacatgaattcaatatcggtgacatcaagaccttatattgacattataattgaaattaagatactgtgaaatttagacagcgacatcgtaaagcgatggttcgatttctggacagatacgtggaaaatttataggttaaaaactggggaactaatggtgtgccgctagccttgcctaccatttagcagtagtacatagcttcagaccctgtttagatgggaataaaacatttaagtccctatcacatcggatgtttggacactaattataaatattaagactattaataaaacctatcaataatcttggactaattcacgagacgaatatattgagcctaattaattcatgattagcctatgtgatgttatagtaaacattctctaattatggattaattaggcttaaaagatttgtctcatgaattagtttttatttatataattagttttgtaagtagtctatatttaatactctaaattagtgctaaatatagggactaaagttttcagggatgctgtttgcccgtgatgtggtacagttaagcatcaattggtactactactactcgcatcaattggacttgtattctcgcatcaacaaacttccaccgagttgtgtcggagatgccgcccagagatgattcggtggagcaccgaagtggtggacactcttgtccaatcccgtcgtcgccgttatctgctcatttgtttactccttccagggcgtcgttatcgtaggctgccaaagtgctgacgtgccaaagcgcctcttttttcaacgcgatcgtctacggcgtggctacaatgtactcccttttagagagcgacacggtctctaaaacacaaatttgactttttatttctataaaaatatttatttaaaagtgatatatgtatattttgatgaaaatatttttcaagtcaaatctatcatataatttttatatttttaaactcaacaacttaagagttattcatgatttatattcccaaagtttgacttaaatattgtcctaaacgatttcttttataagtacggagggagtatggagtgcttcctctattgttcctaaatactccgtctccgtgtaaatatttttaatttaggttgtgtttagttcatatcaaaattggaaatttagttgaaattgaaacgatgtgatgtaaaagttagaagtttacgtgtgtacgaaagttttgatgtgatagaaaagttggaagtttgaataaaaagtttggaactaaacaatgccttatttagcaaagattacaaataaggaaacagattccatccaaatcatctcattggtcaaatgttagattcttttatattcccctcttaaatacaccctttccgtctaaaaataacacgttttagttatatgtttttgcacacaccttcaaacacaatatttaattggttgaaaatgcttgtattttttcttcttgagcattttcttgaaactgagagtagagtacagttttgctctgcgggcccgtttagcataacttcaactgttaggtggtgtttggatcacatgaactaattttagcccctgtcacattggatgttgggacactaattagaagtattaaacatagattaatgataaaacttactacctccgtaccaaaatatagttatttctagcacagtagcttatcttaaaatgaagttatttttccacctaccaccttctctcaaccaatcacaaccattctccttcacctagtacttcctcttttcaaccaatcacacacttcctctaatcattcgcacctactttcttaatacccatgccgacctaaaaatactaacattttgggacggagggagtattctataaccctggactaattcgcgagacaaatctattgtgcctaattaatccatgattagactatgtgatgctacagcaaacatatactaattatggattaaaaaaatgtctcacgaattagctctcatctatgtaattagttttataattagtctatgtttaataatccaaattagcatcaaacatccaatgtgacagggactaaagtttcgtccctagatccttggactaaattagttgtacctcttctgaagttggagtacaacagaactatttcagctctatccaaaaaaggtgaagcggactaaagtgttatcacaaaatgaataaggtgaaactgggtttagataactttacaatttcacttcagacctaactttaaagttaaatttagaagttgaataccttaaaaaaaagaccgtgtatttcaggccgagtttagatccaaagtttttcttcaaactttcaacttttttcatcacatcaaaactttcctatacacataaactttcaacttttccatcgcatcgttccaatttcaaccaaactttcaattttggcgtgaactaaaaacaccctcagcacggttggtcgcagagtttaaacagctgcgaggaggtgcaaagaatccaggtgcactgcagcgagtgccatcaaagcgagaggggtccggtgtcccgcctccccatgctagatcgacaggtcacaggtcaaggcctaaatttccggagggatcccacgcagccactcccctcccccctcccgttcccgtcggcgccatatccgcccatacgttcaccgcagaatcatccatccaccaccacacctt

SEQ ID NO: 20732 - DNA, 10236 bp, Oryza sativa
agggcaagcaagggatctcgcagtgtagacgagcctggtgggagggaggagggagagggagagtgacagttgagacttgagagagagagagaagagaggcagattgggagcagttggcgcgtcgccgtcgcgcgccaccatccccaccctgcgccgcgtgctgcagcgctcgcctttattacgcccccgccccgcagagctcgcctgggcgagcgagcaggcaagcggcgctcttcgtctgcgcacactggggcggcgagcggagctgatctctcggctttaggttttgttcaggtacacgggaaatatctcatcctttttgtttcgtcgccgccgccgcaagtggcgtcggctctgtttgtgaccgggggggaaggggctgattagatttgtcccggggtttcgctggatcgatcattgttttgagattttttttttgcttttttttgggggattttggctgctggttttgatcctttctattggtgcgtgatgcgggatgagtgttgttgcggttattcttcaacggattggtgaattcgtagtggtatatttggatgcttccctttcacgcaagcgcgtttgtggggcaagcctttttttttttgcttcagcacggcgacggctagctttgagccttgagtagttttgctattatgccaccgccgccacgcttttgctgataattggtagcgctagccgccaggtgaatcgcggctgattgatttcatgctttgttcctctgattacgatcttgctctgttgcatgctgtcttgattaaaccgaattctagtgtaaaaaggaatcacttttgcttggaagattaatctactagagttagtgtttgagtttatctcctactctggttgtgccattgtcattaacaattgatagatttgtctgttgctttgctttgattcctctagaacactttaaaatactttatttaaagtgttcctttattgatactgtattgaatcatataattcagtagtatagtagattattctctttggtctgcaaagagacaacgcattatgctagtatttaggtattcccgtgttatgatctgtcgtaccatcagctcatttattgccggttggtacgcatcacttgagcgttttcgtctgttcttgttattcttggtttcttccgggtactgaccgcggtttgtaccagaggacaccgaatattggctggtggtccacgccaaggcaaagatgtcggtagccaagaaggaagaggtacatgaagtttcctccttggaggtccattctagtgggctggatgtctctttctgcatttgtataaaaattctggatgttgtatgagcaggtttgcagtcatcggctcgggccgcgattggatgagccggcggtcggcgtgcccattaagaaaaggccagttttgttgtctgatagattgcttccgtctggaatgccgccctcgatgagaccatcgtctccggcaacggggatggccgtttcagttgcagaggcaggatgcagcaaggacactttcttgaacagatctgtatcagaagaaacaagtgcaatcacaaaaggtaatgggatgtttaatccccaggatcaaaggcatgccaagaggtcattcattcaatctttgaccgagaaaaaagggctgtcacttgatggatcaagtggaatcccttctcgcatagagagtggtacaggtaatgttgctcccgttgatgatactcagagtcagaagtttttgagtttgggtttgcgttcagcatctcgtctgaatggtaagatcaattctagttccaatgtcaaggaagagaaagttgatcagggtctttctagctttccatcagcagattttcagaaggatgctggagcaacaaatgaacccaaatcatcttctgacagtagctttgggcgactaccgaatttggatcttaatgtgccattggaccctcatgatcttgctgaaagtttgcctatagtgcaagattccagtaatatactctaccatgaaactgttcagcttcagaaagcacatgttcccccagtgcccccagtttctacagtgagcaatggactgcatcgaaacattgccagtactttgaacctttccaatgcatatggactttctaataagcgtggggcagctgatgttaccttagacttgcaacttaaaccaccagctagacctgagctaggcataaactggaaaggacttgctcctgttccaggactaagtctctctctgtctagtaagcatgttgaagagtctgagaacaatgctggattaaatctctctctatttggtaagcacattaatgagtctgagaacaatgctcctaatgttgcagttagatctgaacctactgtaagtgccaaaagatcaccagggaagttggtataccaaggacagataaatcaccagttgaggaggttgtcaaattggtgcccttgaatgaaaaccctcataaaactatatcatcaagtgtggctagaatttagagcatggcatctggttgtttggtgaagaaagagcctgaagaacagtctcaacgacatgttcagaatgatgtagaaaaagaacaaccattagaatcacaaagtgttggactagctaacaatcgcgctgaaattgaaaagcctaacggtgcccaccaagttcctggaaaagctgcccttgatttgaattctggaatctttccaaatgtagcaactgctaacgttccactatcaactgaaagattgcgtgatgccatccgcactgaggccatgcatgctgaccatgaagttaagaaatctatcaagtgtgaggaaacaactgctgcaatcccaagtcctgcaactgcatcagtaagtagtcgctgctcaccactgatggccacaaagcaattgcctttgggagaccgtgatgctagccgcgctggattacgtgtatcagccagccagccctcattgcctactgaacctgcatgctgtaatcctgatgaggctaatgttgattgcaaaccaacaatgagtcatgtgaattctcgcaatgctgttgaagtttgtggttcattgcaaagttcctcgaatcctatacctgaaccatcgatttccaattctcggaatcgttttgggtttgatggtatgtcacaagggagtgctgaaatggactgttcagaagatgatgacaatattgtatcacatctatctactaccaataaacctcatggagggacactagggaacaatcaaacctctgacagtatgggttcgggtagaaatctacagaaggaacatgacagtaatacacatcagaattgctcatttgtgacaaataagatcgacatgcaaggtattagtgatgacaagcgtattaatgttaaagatggtgttttccctcattcatgtcagaacagtcatcaaagtggcaatgttgtcaatgaagagtccaaaaataaacaactattgggatcagataagaatactccaatgaataacaacgacagtaccatacgtgttaagaccatcacaggctcaagtacagcagatacccgaaggttatcatctttggaaacatccacttcccctaaaattgaatccattatggaaccttataaggaatcaggcagctgccttgagaagagtacaactcctaaaataaagtcaaaagggtgtcaatctccacttggtaagcaagctgctaattgtagcgaggaccatgcggaaaatgctgctgtgaagattgagcattagacagtaagtgaagaggttgccaaagtcttagaattgcacccaagggattctgtcctaggtgaagattctcatcctgatggcgcttcaagcagtcaactgcacgatgagtgtggaatggtaaagtcggcatctgagaggtcagaatgtgataaatccaaacctgactcttgtaggacaacttctgtacagaatgaaagagatggtcaggttgacgacccacattggagagggatggggcatccttatgtcaatgtcaataggtatgattcttgttgttttgtttcttttgtgggatgctgcagtaagcgggactgggtttcctcatccatatggtaactatctgttaggtattgtatttggctggagttacaaagtctttgttttcttctcctctttgtgcttattttacaggaatgaaacatgggagaggcttatgcagtctaagagagagaagaacaaaggagagtaccatggtggcaggcatgcgcctgatacattcaatcaacgaaggccagattaccgttatggtggacgtggtgttggatcccgtggtaatccaaggaacttccggggtccaagaatgaatgaatctgaactttactttgacgatgaacctatggcccgcagaaggcgcccctttgaagattacctagggcacatgcagcgaattccacataggcgacaccgctcctcgccaatgaacaatcagttgcagggcggtttgatgagagatatggacattgatggtttctctggaagagatgttccagaccctaggctgctggcacatgagcatatggaagatctatctgatgacatgatggaggagaggttttatgtaccacattcccgtcggcatcatatacaaggtgaccatgcattcattcacagaaacaagagccattcacctgggtagagaaggggtgcacctatgcatttacatagaggatggtctcctgaaacaatgggcagatcaccaccattaatcagaactgacagaccatacttacctcatcgacaccacacccgccgccatggttcgccctttgaccgaattgagcatgatgacagaggtatgcaaagaaacatgagaaggtgtggcatgcatcatggaggtgtagaaggagactccttcgagccacatctacatcctgctcaattagccgaactacatgcaaaagctgaacttaccgagagaaggaagtttggcgagaggagaggccatcatctccgaccctttgaaggcagccccgatgacgacgaggtcatactttcctacggcgcggatggtgacatggacttcgccgaaggtggcagcggtggtctgccgccaggagagctcgacggccgcttcaggaggcacatggggagggatgaggaagaagaagaccacatgtgtcatggacctcatgggtggcgcgatggcagctctaatggcagcagggcaaagaggaggaggtactgacctagtcgcacaactgtgacagctgcgagcctatctaaactaatgcatagtggcgttttttggttggctggttcatgcatcaccgactcaccgattctcttaaccaaaccttgctataggtttgcaagcatgtctccttcaatatttatggcttgtttctttcattctttcctcatggaagtacgctaccctgcagcttaacacccacaaggctgtctgaagtactactatatttacactatatatctcaataaggtgatattagcatgtggacatggtcacatggaggtgaaactgacatttcaggacaaatcaaagtaaacgtggacttgtctttgcccctctagcttgccttttttgcttggtaaatcaaattaatttgaggaaggagaagaatatccgggtcacaaagctgctttgcatgccattggctggtagggtccttttgtattgaagtgagctgtctcctcaaagtttgctttgatctgatctagaatgaagatgggatagtggggttatacggagtactcttacctagtagctttggtgttttggctatatgctttcttggactagatatttgtttctttatcggacaggcatggccaaggggcaatttaatttgcgccttgtaataaattattgcttggcatcttttcgtagtgtgtggacaaaggtacgcaagttgtgaagttttgacaaggacgacatggcccgggatgtgtcacatgagcaatacctgccataccttggtcgtaggagctaataggaagcagccttgaagcatagcgcctccggttggtgaagtcaagtcgtcgggtcaagtgttaagaaatttaagcacgacgcttttcattggctagtctgagtcggcgctgcctgatgtgccttcttgccgccttcttcgtgctggtccaatgagatgcaaaaatcagcaaatgtaaacagtttccgccctgtacggatagcggtatatcgcccactggtataggtaatagatgggggcaaagaagttgtgcgagctccagcacgaggaatcaatcgtggttggtacgaggaaacgaggcaggtaatggcataattgggcctcgatctcatcctgatgctaactccacgcgaattcacatcttggcatctcagaatttgagaattaggttcctcaattatgtataaaggaaggcagttcttatcacaaacaagggcgtaatatgaagagtacagaaaggatttctctttttcacacatggttaaccaaatttcggtggagtatttcacagcgcggtttgtcgataccgtaccgtaactcgaggaaaaagaaaccaccctaccaaaagccaaaataccacgaagtgaagtgcccattcattcaccagtctgtcgtcggcattacgggactggcgctgatctgctccttattatacttacgaacacgacggacgacgctggtccggcagcagaagcatacaattgttgcgctgaagatttcccttccagaaccaaatgtgggcaagcagcctgcagcatacgcagcaacatgaggcacaatcatgatactattgaaaatttccaaactcaatgaattagggcgaggaaataaaaattagtccacgtctaacggcacgtctcaatgtgctctggctggcaggcgacgtacttgtgcggagggaggactgaggaaagggattgattctgtaatccgttggtaagtcttgccgaaattttgtcttcctcaactacagccagagtttgtttcggaaatgctctttgccgctcgcccgatgcgggggagccggatcaggcgctccccccgcgccccctcccccacgtgtctacttgggcccacccacttctgctccccttttttctacaaaagatgtttcacctagtgtatttacaatgtttcactatttatagatctaatgttgcagtgaattaaaattctcttttgcaaaaaaaaacccacatattttggaaactctatattaagggaatttggtttattttttgttccacctaaaatgtttcacctagtgtactcacaatttttcactatgtatagatctaatgttacacttaacgaaacatttcattgcaacaaaaagcccacatattttggaaaccccctattaagggaatttggtttattttttgttccactgaaaaatgttttacctagtgtactcacaatgtttcactatgtatagatctaatgttgcagtgaactgaaacattttttcgctatttgctgaaatattgtttttatacaaggtgaaacaacacccgatttaaacaagtgaaacatttttgatctacttagtgaaacaattctgatatatctggtgaaacatcgtgcaacatttaaaaataattcaataataagctaaaaaaaatttcgtcggaatatatccatgtgtggtcttgttttgaagatttaattgcaacgaatttaatggtgcaatcggatcatgatttggataagtaatttaagagataaattagtttaaagtaattttgcacgtaaattggacgctaacgtcagcgcccgattttacccctcccgatcgggcgcccaaccgggagtcatccccgtttgatttgggtcccttacccacaaatcctttctttctatgtagttggaacccccttagtgcaattactactataaagcagccaccaggttaagccacgtcatcacaattatctcagctattagatataatctagatgctaaacgattatcgaaccagcccccttctctctgaatcctacaaattcttagtggatccaatccccttcacagctagcctgccgcatctacttctcccattacgataagcaattgtgcagcagaaactgcctccaataattatagcagcgagaccaaacgtcatggttaatcagatttattctcttccaaagcatctttaaaatcctcctgcagccacacataccagcgctctcttttgcagaccaaccggcccccatatttgatcatcagatattgcatggtgagtgatatatttgctatcatttttttcttattacatctccatattaatttacaagtattatctttttttcccaagggcaatagctttttctatcaactaggtgataagtgaataagtgataacatatttgatttgatgatttgatcggttcatttgactctgacttttgattcgatgctgatcttgaaagtaattttgtacaacctccagattatattgccttccgttgttctatcaaccgcaggatagctttttgatgatttgatcagtttaagtcctttctttatttcactctgatttaaatattaatggttcttgggcaggtatagaaatacgatatgggcatatgggtgtgctccaagaaggatgagtcaatgatgaatgtgctaattcaaggacaaatttgtagcagattatagaacatcgaaggatgcttatatacaatgattggaatgatatgttgtcaatggtctacagttttctttccggaaaatctatgcacgccatcaattagctatactgcttagttgttcgtctgttttgcatgtgaaattttcatagtttcaaattggaattcataagtatcctagcagttgcttatatttgtagtgctgtgtatttattcgtaaactacaattgttatcatctttttcagacttttcccttgcacattgtaggcattgttgctaagagctgactgttaaataagaacagttccttccctttttttttcttaaccagtcaatgaatcgaaagtttacggtatgtcctatgattgatacgatgggtgattctacctatacaacaagaatagccatatttcttggatttatattctatctggacaattgtatctccactatataggcattgccctgaaacaattagtcatcaccaatttgaattaatgctattatgtacacacccatgattcatgaacaaaaccaaaagttgtctggttttattgacttttatctcaatctttcacccattcttcagttgtatttttcatttctcgcggcaacacgtggggtatcatctagttagatatatgatccttgactattaaaactagtctattttcctataaaaattggtctattttgcattccagagtggtttggataacaattttatcgtacgtgatgtgatctttattcaacatgacgcctacgtggtgcttatgtggtattgcacttaagaaaaagtaaagtaaaaataattataggtgtcgaatgtcagtaaccctttgtctgctctttgtatagtttatatcctaggacctatttagggagctttagattttaataagtagctagtggcactccgctgatggattttggttttggcttctagtttttttttattctaaaactataataactttttagaatctacgtgaaagactcgactgtttggaattgtttttgattatgagagaacctgcagtctgcagttgtcagaaggacaccaaacattgtcagaaggacaccaaacaagtcccttgaattttctctcctcctgtgtccacggaatcattttttccaggcaactaccacgacagttgatggaggagacgatggcatggtggaggacccaagcaaagcaggaagcccggtgcccattgcggcggtgcgcagtggagccatagattcaagacggttggtggcggcggcggcgaagatggctcctcgacgacagtcacttccacgctcattggttcttcgcaaagtaatgacactcgactacttgatgacgatgaggcagagctccttgccaccagccttactctcctaccctctccaccctccgcgccaccaaccttcctaccatcgacggaaacgagcggactccagcacaatgcgaggcagtgcctggcgatgatggtgatgaagaagaagatgcgtgaggggaggaacttgcgacgaccacagcgaaggcctgagtcctagtggcggcctggcgggacccatcctagggaagaggaggaagggttgcttcccgccattccccctagccatggcatcacgg

SEQ ID NO: 20733 - DNA, 12731 bp, Oryza sativa
ctatgtgagctgctcatgtctccaaaaggattaactccatcagtactcagggcaaatctaatgttccgtgtgtctttagcaaactctctgtactgagcatcaaagtttatccactgacgagcatctgccgggtgtcgaatcatcccatccttcttgtgcccttcttcatgccagcgcattagttccgcatctcgcggattttagtatatccgtttaatgcggtctttgacaggaaggtaccacatcacaagctgcgggatttttctctgtcatccctcagttgtgtcagacggttctaggccagtattgctattcgatttgtatcgtgtcgcgaccgagaaaatttgcattttcccgaacgctagtgtattaatccccgtcccaggaaaagccggggtacaccacacaaacatgatacaaaaggcacatctttattatatcgataatatttacattattacaaagacactttaggcttgacaaacaagaataaacagcagcggactagcgggcctatggctccatcttcacaggcgctcaactggggtataagccaggactccacctaagacttcttctccaaagcttctcttactgaaggggggggggaaagattgagcaagaatgagtacaaccacagtactcagcaagtcccaccgggagatgcatgattaatgcgagggagtacaaggggtaataatataggggttaagttttgcagtaaacatcatttaaaagtcacttagttgcccaaagctattttgtaaacacgatcctagagctatacaatattattaatccaggccgtggaccctcacgaacctgccttaacccaaggcctacgatgattcagaccgaactggcaacccgaccctgggtcctagctcgttccaagccaacccaggccaaccattccacattttagttgttaagcaagttttaagaattaaaacactaacttgggtacattgctaggcttgcccataaccgagggcacggctattcgaatagatttactctgatcagaggtgtacatctttacccacaagacacatcttcctcacgtgtaaccacgtgccacataccaccacggcatacggacgaaagacgtgacatagttaccaacccatcctagccataaacaagagtaccgacccagccccgccttcggccggaacctccgggacaggtaggcaggattgagcccctagcagcaggacaccagccctatgccatgacatctcgactaccgggccgcagctcgtgtagccttcatttgtcctagagatgtccatcgacccccgacttcgtccatctctatccgtgtacctttgtttataaccagactgagccacaaactaagccttacccactagacatgtggaagtacggtagtgctttgcaacagaggcccgagcttaatccttatattagccggggtgctacttcccacaactggcatgcacccaaaccccaccgaaaaacaggttttaggggttttgaaagaggaagagaggtgtatgtccaattccaacataatccaaccatcccatagtgtccaagtgatatgagaattcccaaagtctaaagttataaaaccacctattgttgcctaattaatcagcgaagcatctacctaaattcatactagtggaaccataaatagagtacccactagttggggttttgtttatcctagggtgaacaaggtaataataacaatagcaataataataaggtcataacaaaggtaaataggcatggctaaataaaacattgataacgcaggaatttaaataaagcgataatgcattaatttaaatcaaaataattttataaactgagattcaatatgctcaaggatgatgtgacttgccttgcttagagataacggccttctgaacctttggcgatgaccgcgaaccacgcttcgagaacctccggaacgatagaagctacgcgaagcacacaagcaaagctacaagcctataaagaagcaataacaatacataaaaagaaagcacagggttctttaggttataacaaacattaggagacttgaacgggtcgattcggagctcgtatgaccaagacatgatcatccgaagtttaatgctgttatatggagatttgcggattattgtaattaggttttacaactataaaacatgtgtaagcgctagcctggaaaagaaaggaaggctgcgccattgacatgcggaccccacatgtcaacctaaaggaccgcggtagaccgagtacacagagacggtccacgggtcgacggaagcggaccccgtgtgtcaaccgaggcgagaggccgacaaacggacttgactagacaccacgcgagctgcacacgtgaaaccacgcggctaccgagcggacacactaacacggtcaccacacgcacacacgaacgactaccaacaccggtacacgggtaccagggtcgataaccgcacaacgggcacggggcgacacaaaaagagcgaggatggggcagcgaaggagagatccttaccaccacgcgacgaggcgagggaacgacaacgacgaacgggcgcggtggagagggacgggaacgacggagacaaacggcgaggggacgacttcggcggcgatccttggacgaaggcgagacgcggccggcacaaggcttgacgacgcaaagccgaggacgaagacgatgacggggctgcggcacttgacggagcgaggacgacgaacgagaacggcttgacggagggacgaacgccacgacgaccgggaacgacgggaggacgacgacaacgacgaccagggccggcgaggaggcgacgtgggcagccggcagcggctgcacagagacgaggatggcagggaacacgccgctgcgaatccgacgacggaggcggcgcaacgagacaacgagccggcgaggaggaacgatgacgacgacgacgaacaccggcggggttcggtcgaaggggaggcgaggccgagggcgaccttgccgctgcgatgccggaggtggtggtggtgcggccgacggcgcacgggtggaggaagggccgaccgggggaattccggcgaggcagatggagaggccggcgcggcacggcggtgttccggctaaattagggcgacgccgtggcctagccggtgaagaggacggcgttccggtgccgggagaggtggtggcgacgtcggccggcgcacaggagacgcggcagaggcggccggaggcggaacagtggtgacaacaccactgttgccggcgggggcgcacttccgggggtctccacgcgaaacggagggcaggccgggggagaggaggctactgcgacgccggggaaggcgacggcacggccggccggcgcacgggcgggacagcagaggccgctggaggtggccggcgctcggagagagagggaggaggcggggaggggtggtgaggccacgggagagcgcgggagggggctaaaacgatagaacggagcgaggggattccgttttatagcggagggaagcgagtcgagcacgggaggagcggggaacggcggcggaaaaggcgcccggcggccatggaaggcggccatgaatggcgcagccgttccggtcaaaatagtgcacgattaaaggggagattagggggaaaagggagaagaaggaaaggggattaattccccccaattaattttggaatccaacgcttaaatcgcgcttattcgagggaggaacgaactagggttttcacgggagggagagaggagctgtgcgggaggaggacgacgattgggcgggtgggacccaccggtcaggcgcgtggtcagcgcgcgtgcggcgcgcgcgtgacaggcgcatgcggcgcggcctggggaggctcggctgggcccggaggtggcccaggtgggagggggcagggcggcctgggccgggcaggggaaggggaggcccaagagaaggagggaaagaaggagagggagagaaagagagggaggaagggaggactttggccgtgggccgagagagatagagggaggctttgggccagacttggcccaaagggaggagggggattatttttagtttttctttttagtaaactttgttaattgtttttgttgcttaataattatttccggtgctctgaaaattcaagtaaaatttgagggctcgttttagactaaggagaatttaataaaaattctctggaccacattcgaatttttcttgtacgtattttagtgtttgccaatttcttttcgaattttaattaattctattattccttttagaaaataatttttatttcgggatgaatttatcaggacgtgacataccggctagcaccgcatgttggacatttatctaaagaagcgtactctttcctgtacagtatgcagtgatttacgcacgcatgaatcttttccacaccaagtgaaagggggtatatgagtttctttgcttgatatgtgctgtatggtagtgagttaggcctcgggagcattttctgcagaagttctaacaaactgtcgaaactggtatcagaccatccatgtctcgcctttaacctcataagttcaagaactgaccggagtgttgtgaactcactgtcacagcccttcgactcatcgtacaaaacttcctttgctgcaaagttatttaaccctctagccgaccccatcagcacctcaggttctacatgatgtaacatttcctctaggtcgattttgttctcaacagaaccatcgtcatgcaccatgtcttcaacttgtgtcggaactacattttcaggcccgtccacttgttcttcgccatgacgtgtccatatttcgtacttgtccataaatccacgagttactaagtgctccttcactttaaaagcatcgtcgaagtcccaggctatttcattcttgcagtcagcacatggacaaactatcttcctcatattgttcttctcagcgtgtgccttggcaataccaataaatttagacacttcgtttctatatggagacaaaaacctcggccaatgatacatccattcccgactttccatatctctaaaaaaatacacataaaatatttgcacaattaataccaaatttgtagggtttattgaaaaaacttatcgctattcaaaactaattaactaaaggttaagtgcaaattaataaaaaaatcaaagtttatttcaatttttttacacagacatgccaaattagtacattaggaaaatctaacaaaatcatatcatcggcatattacaaaatactataactattttttgattgcaccgaataaatagacattaaaaattttattctctctctatatatgacaagatctagatctagatctagaactaggaagtggatgtgatagcaaaaataaaaatctaacatcaacatatcaaaagaaataaaattaaaaaacatggagctcttccttcacaattttgcatgcataaatccatcacaaattaaggtctaaaagcttaaaaaattgcatacctagtgtggaaatgagtagatctaagtaccgtagaaaaatctcccgaagatttgaagttcaaaacctcccccctatatttaagtcactttaggagagagaaacttcggggagaatgaacagggctcggggaggaagaagactatataggggcatcttttcaggcgggccatataagcggcgcctgcgaagattgatcttcgcaggcggaccgccccctccaccctgggtacttttttttgccggcggggttttggctccgaattacatgcccgcctgcgaaaatcgatcccctacgacgccgaaaatgagttttctagtagtgtgactagtctggccctcttgtgttgcattaaaatcaaattgccacggtcttcaaaaaacaagtgacaaacatttattggcaccacatcacagtctactttatgaacatattgctcccgatagaaaatgcatctctccgctcgattcacccattaattgaatataacacggcataggaagccttctcatagacaaagataaatatgcaccaaatctaaacggatagcattagtgaaagtgccaccacaattattaatttgcataccttcccctgaattttgcactctaattaaaaaatattacagcactgccccttttcatcaatattagagctatcttgctgtactacgcatggaagcatagataaaccattattctgtttagcaccatcatccattgataaaacatcaaaatctcaatagcatgcagctagagtatgatcaagatgtacaccttctgaatttttctgatgaactctcagaaatatagccctctctagttatcaatacatttttctgattagggcaatctctcatgtaatgtcctcttctccctacaagtataacactgtacacttcatgattttgaaccagatgcaacggtagattcaactttagatgtggatttattcaccgaactagtagcaagtttagatccatctctagaaggagtagtcgacttgaaagagactgacttactagcagcacatacattactgtctcgctgaaaagaacatgaacggctagtgtgacgactctttggttgttgctccaccctctgagatatgttcaccatactttatatatatctcctattataaaaaattaaagatgtttctgctggaattttggtacgtcgtccgtgtttgagttggttatatatcgtccaaatccaattcaacgtgtgtctagaataactattatacacccctatcctagcccaacccctctccctcccagcccaacccaaccggcccacaccattccgcttccccatcttgcacgctcctcctatcgacgtctttttttcctctcctttttttgttttgtttttctcccaataatcctgatcgtctcctccttccaatcccatctcttttcttttctttttccttatttttttctcttccaaatttctctcctcaaatattttccttttgaatttatcattgtttaaggtgcatacacaagtttgttactttgcaaatgctttccatctacagaaaaaaaatatttactaattgaatgatcaaaatttcaatatttggtctacgaggtataacaaaatgcacatgtgtcaacttatgaaatagtcacccaatcgatttttgaggctatgaaaaagtgtacataagagattcttcgtgtggtatacaaaagattcatatcttggaaataagctttgaaaaggtttatttttaaaattaaaaattttaaaagttcaaaaagtaaaaaaaaaaaaaacttgtgatcggctctccccgtccactctgcatgcacgattggtgattgggagtggctgcccgctcccaacttgtgaagagcagaagtaaacaaatatgttttttttttgaaagaagggaaaaagctttacctcttatacattgatagagcaggagaaaaccgaaaaagttatatacaaagcccaaggaactcaagcccaaaggaaaaggtagagatctacactcccgctggaattgatctcggttagcttagccgctcccactgcgatccaagctcgctcctcctctttaatcttggcaatgatgatggcaggcatggatgccacttgtctgaaaattctggcgttgcactcgcaccagagttcccacgccatcaggataatcatcgatttaagggccttcgtaggatagtttgttgtgcacaaaatttttcacaaccagtcttccactgttgcgcattccccccattcttgtaggcggaggtctataccagtccacctttgtgcttcagcccaaattcttttggagagcctgcagcctgcgagtaggtgaagtgctgactccggcacagtatggcagagtgggcaaacacgctaattagccgaacttcttttctgcactctatcaaccgtccaaaccctattctgaatgattagccacgagtagaatttgcatttaggtggggcccaacatttccatatggtctggttgtagattgtagtagccacgccaagaaattgcatcccgtatgccgaactagtagaatagatgacatttgttgtcagcttctggacgatggagtcccgctggtcggatagcgggccaacctgttggatcaagttccaaagacagacatattggctcaggtggtctgcttctgtagtgtgcattagatctatgtccctaatccaattgttgtgggcaagggcgtcgtgtaccgttcttgatttgcgctttcaggccgtgaagatggctggtgcgatctcttttggcgctttgttgtccagcgagtgcggtcccaaaaactagccatcttcccatcccctaggatgattgttgtcgccgctaggggtgggcattcggttacttcggtcttatcggttcggtttattcggtgttttaaaagttcggtttcctaaaactacaagccaaaattctttttttcaaaacaaaaaccaagctacaaaaactgatgtaacttggtgcggttttttcggtctacggtttataccgatattgagcgcggcgctttgctcatgggggtggcggtgtcttgcggctagggttagcatcaatagaaaggccgatgcggtgtgtttggatgggagtaaatattgggtaagatgagatgaagctgggttccatgttgttgttgggtcatgggttgaggtgaggaagtggaggctctagttcggtgttttcagtacatgcggttttctttctaaatgaaccgatttagacaccgaacaccgaactgcgctaaaatgaagaccgatgagaaaaccaaacaccgtaaaaaccgggatgcgactacaccgagaccggtatcgcgatagggctatcacgcgacgtgcgcaactggcgattccgcgccgcgcgcgccccatgccaaaaatggaaaccactttttcctgggcccccgcgtgcgccatcgctaaaaatggaagggaaagcgcgcgcttgcgcgcgcaagcgccgtgcgacgcacacgtcgctagctggcgtgggccccacctaagacagcacgatgcgcctctctcccccactccaacccatcaaatcgggacatccggcgacatcaatccccacacagtcgccacggcggtaaaaatcagaaaaaaatcgctatcttggaagtggggacggaggagaagcaaatccaagaaaatatccaggtaaagtacacatgaagtttaaattatgtcttctttgagatccatccacaaaaaaaaggaactaacctagaaacttttagatcttttctgtattcttcgagaaatgaattgatatgaatctgtgctgtaattttgtaagtaatatcctttttgatttctatcttcctttataccctaaattcactttctagtgctgctgagaaaataagttgtagaaaaggcatgagtactggtgtttcaaaaatctcaaagcaatttctaggaacatgctacttacttccagataaacttgaattcacaatccctagtttaaacaacatgaaaacatctcatctagttgtctctcagtgcaatttgaacagaaaagttaatttacttcccaaaataaacttgaatttgcattccctagttacataggcatgagcgctggtgttggaaatctcatagcaattttacagaagtctcagtgcatttttaatagaaagttacttctaacacttcaatgagttacttcctagaaacattaagttacttctcactgtgcattaagttacttctcactatgtattaggttacttctcatagcaattctaaccgtctcagtgcatttttaacggaaagttacttgtaacaattcaatgagttaccacctagaaacttgcaagttacttccctataaacttgaatttacatttcctagttacacattttgtaccttgtttctatatacagcataatgcatcacctagttgcgtctcaatttcattttgtactgcatcaaaacaaattgtgaaaaaaaaatcattagtatagccactggtcttaatttgagaaaattgcttcctagaaagcatctaaaaaaacagaaacatttgtatcggttatttaattacatcgagtccagttataaagagttactatcctgttgcatgtaacttacttccaaactgtactggcttacttcaaaacatataaatgttactccctctaaaacatgcaagtaattttctataccacagatgaaattgtctgacaaagttactctgaaaacataaaagctttactttcatgtgatgtgtaagttacttctccccccccaattactaaattacctcaatgaatgctctgtataaactttgttactaatagcctgaaacacatgcagcaaaaatggattttgacctcaacagtatcccagaattagtttctggtgaaaatgaacctccagtacaccatttactagttgatgatgaagacagaagtaaaacatagttccctataaatccacctgacactagcatggatgattcctgctataaatttggactacacttttgactttgaaactatgtatacttctggtgatgttggaagtttacaagcacacaatgtagccaatgatgagatgcaagtatttgaagccaatgatgagatgcaagtatttgcaaccaatgatgagatgcaagtatttgaagccaatgatgagatgcaagtatttgaagaaatgtcagatcatgcagacacaatgcatactagtgttgcaactggcgcaacaactgctactgccaacacaatttcaagtcaagactctggaacagatgattcagaagtgccgtacctcatcttgactttcaactcagaggaggaagcaagggctcactacaacaggtacgcaaagcgcgttggattttcaatcaaaatcaacactgcaaggaagtcagccaaagatggagaacgtgacaaagtaatgtttgtttgcaacaaatgtggtccagaagaaaaaacgggtgaagcattccccacaaagaaaaggaaaataagtagaacaagacaggctgcctgcaaagcaaggatgacagtgaagaggaaaggagctaggtgggaagtaattcagtttgttgaagaacacacacatcctctggttagaaagttttcactcaagaagttcctaaggtcacatagagcaataccgaaagaggaaaaagatttcatcacaatgctgcacggaatgaatctctcagctggtagaattatgaaattgatgtcggaattgtatggaggggctaggaatgtaccctacactagaaaagacataagcaatttcaagtcaaagttggggagtgagtataggtgtagagatattcctgaaccaattgctcacttcgaggaaataaaaaaggatgacccaaatttcttctacaagattcaacttgataaggaagacagggtgcagaacatattttgggttgatggagcagcaagaaatgcctacaaagacttcaaagattgcgtctcgtttgactgcacatacatgacgaacatgtataacatgccttgtgcaccattcattgggataaacagacatgggcaatcattacaggtactcctttttttttgcaaaaaaattaattctaaaatatctgtaataactttgtacattatagtacaccataagttacttgttgcattcattgagttacatcaagtcctgataaaagttgcttccagtagaatatgaagttacattttttttaaaaaaaaaagtaaaaaagtaactaagtttacaagctacatcttttagtgtctgttctatagttcaaaattgtactgatttacttccagcaaacacaaactgtacaaactacgcaaaattgtagtaacttacttgcttcaaaactgtactgacttccttatgtgtattttttttgatattcagctgggttgtggatttctaaggaatgaaaagacagaaacctttgtatggttgtttcaagcatttctagagactatagaaggtgtaaagcccacaaacataataactgatcaagacttagctatgaaggcagctatagcgctagttttcccacatgctaagcatcgcaactgccgctggcatataatgcagaatgcttagaagaagattggccatatattagatcatgacaaagcattgtgtgatgcattcaatgactgccatgacaacagctggacagagtaagagtttgatgctaaacgggttgcaatgttgacaacatatcatttagaagataatgagcacttccgacacctttgggagatgagatagtgttgcgtcccagcatactttatgcactgtttcttccctttcctccagactacagcatagagtgagggatttaatgcagtgctgaagcgctatgtaaatccccaaaacagcatatacaacttctttttgtagtacaagaagattcaagaaaaatcactgttgcaacagatcagaatgagtttgaagcagaagaaacaatcccttctatgtgggcttactatccgatgaaaacaaaagcattggaggtctacacaaggcctatattcaacagatttcaaaaagagctgattgcttcaacatcatataaattgacccgaacttctgaaaacatgtatctagtagaaccgaatggaggtcctgttaggaattatggatcaaaggcattcattgtatctgcaaatgtgttggacaggatatacaactgtgaatgctgtaagtttgaaagggatggcattctttgctgtcatgttct

SEQ ID NO: 20734 - DNA, 12174 bp, Oryza sativa
cctatgctcatcgtcatcttcttctccttcatcatcgtcatcttcttctccttcatcctcatcatcatcagaatctccatcttcatcaatatattcatcttcctcagtgtcttccacttcttcttcatcagcaacaaaatcttcatcatcacttgaagttacatgtaccaaaagaacaaaagtaacttagtgttctgtaggaagttgtttggacaaatgtaaaaaactaaaaattcagttcaaatcatcgtaaaaaaacagtgtggtggaacaatgatactaatgagattcaaattgtgcagagtggtagaacatggctatattaattattctgtacaataattaatagaaacatagtgaaaaaaccaaacctagatcttcatcttgctgaactttttttggcctttatgcaagtttcttccggttctttcgcatttgccttggttggctacccctaggatccacaaaatcaaggccggaaatctgcctcacaaatttcgtgaccaaacctgaaaaaccttcacacaaattttgcacagaggtcacaattctgtcattttcctgtataaaaagaaaaaacagagaagttacatatgcagatttcacaaagttacttttgcagttcgttgatgttacatctaccaagtgtacaaaaagtaaaacagagaagtggggaaaaaatataaacctgctcctgcatagtattgggcacatttgaatttatgaaggttgaaaaatctacattgctcccaaacaaattggtcccttcatgctgaaagctgctcttaagctatattttcaattataaaatccgtaagttacgaacaaacaaaaaactaaaaatgatgcaagtatgtcaactataaaaaaactcactaataaagctccaaaggagccatctgctgatgtgtctgctagatttatcaattcattcgtccaaacagtagctcgataaccctccactggaacattgagatttttaaacgaaagtgagtccaaataaagaatctacaaaagaaattagagcatttagattaagtaaaaaaagtacataacttgtttgatttaaaacctacaaaatatgttaactttcagatgtaatttaaatttgaaaacaaattggaaaaaaagatgtggcagggcatatatgaagaagtaacttaatgtacagtgaagtgacttaatgcacaataagaagtaatttaatgcacagtgagaagtaatttaatgcacagagagaatttacttgacagaaagttatttataacaatttaacataaagaagttacttcctaggaacatgtaagttacttcctggacagcttaacttactttaaaaaacataaaagttacattgggacagtgatcgaataaaaaaaaggtgagcattgttaccatcatgtacaggagacatgctgagttggtattcttcccagctttagtagctttttgcaaagtagatatgacaaacttgcacgaattaagattcttgatatttccagcatcaacaacagaaggatagcatcttgggctgactgttgttgctgtcgttggtgctaaaacagaagaaatggcgtagatgatccacatgcgcaggtacttgtcatctgctaacttcaactcctccaattgaatcccaagagaagtcagtgatggtgatcgttgattccaagcaaattcagcacaaattctgtagcttcagactccatctcatatgagacatctttgtcgcccatagggataccaagcacagacttcactgactccttgttcacatctatggctccacgtccaggaaatacaagctgattggttgctggatcgaaatgctccatcaaccagctgcacaaatcaggtctgagcttcgagcacttgagatctacgaggccatggaagccagcccccctctgttagtcgcttttgttcgccactcatatggggatacaactttataagtttcatagatgaagccctgctactctcttgctgcaaatgtataaacaacaaaaagaaaaataaaaaaacatcagcatttgtttattttttcaaaaacatatataaaacagttgaaaaaagggtaactgaaccaagaagtaatttgccattaagttagttctagaaaataacttgccctcaagcagcaacatcaaaatattttaggcacggcgagaagtaactttatgcacatagagaagtaacttaatgcacatcgagaagtaacttcttacttgttaacagaaaatctcaaagcaattttaacaggaagttacttctaacaaatcagtaagttacttcctatgaacatgcaacttacttccagataaacttgaattcacattccctagttacacagcatgatacattccatctagttgcctctcatagcaatttgaacagaaagttacttgttataaaactcaaaaagttacttcctagaaacatgcaagttacttccaaaaataaacttgaatttgcattccctagttacatagccatgagtactggtgttggaaatctcatagtaattttaacagaacttaatgcacagtgagaagtaacttaatccataatgagaagtaacttaatgcatcataagaaaatgtagtgcattggaaaaggcaaaacactgcttgagggcaaaaaatgcataaaaaaaggtggatgcttaatacctttgctctgctcctttttggaggaggttgctctatgtcatctgcatgatcatctccaatatttcttttcttagcatgttgcgacacccctcttgttttttttacttgactctggtttgcctaacatgccttctttataatggtttttctttttcccattcctggaaatatattttggatgttagtaatcaacttgcaattaaccatcgatcaactaataatcaacttgcaactaataatgttagtaatcactttggaaattcattttggatgttagtaatcaacttgcaactaaccatcgatcaactaataatcaacttgcaactaataatgttagtaataattttggaaatttattttggatgttagtaatcactaataatcaacttgcaaccggaaaaatcaacataagccagagagagaaatttaaataccttcaaatggaacccgagatccacaagccgacgcttgagggggcgaattccactgcaaccttgcgctcgccgagaggatgaactagcacctgatgaatgagggagagagaggggacatgagggaataggggagaacaaactgggaggtttgaggagcaatttgcgcagtgaaaaattgcccaatctccacctccctggcacaaaaaacgcatggaaaaacagccccatcactccacctgttcggctcaaaaaaaccgcaacgaaacagccgcatcacgccgcaacttaccgaaaaaaatggccgccggatttggtggagagaaaaccacctccgccgcagcctacgcttcccaccgcaactgccggcgcgatgagaggaaaccgtcggctccacgcctccaccgtcggctacgccgacgccagcgcgacaggaggaaacagcagcaactccccaccccaccccccattcgccacggatttcgccggagattcacgccgcctccacctctctctcactctccgcctctctctctctctctcgtcgagcgccacccaaaacatttgaacagtaaaccctcgcgtgagctcgctcggtcggccggtcgggacgcgcggcgtgcgccgaatggacgccacgttgccaatcgcggatcgacggctgccacgcgcgtcgcgcgatagcactatacgaaaaaaccgaagattcggtgcggttcggctcggttctgtgcggcctacagttttcggtgattttctgcccagcctcgctgccgcaaagagacttttgtccagttggttgcaagggagtgcaatgtgtttgatggtattttgttatatgcaaggaaaatttacagtggccatagcaaggaaacaatgtgatatactatgtgaggttagctagcttgtcattttgtgcgtgcatgggccatgcaaatatatgaatgtatatgccgtatatatacacaagctagagaatcaaaggctagcatttgctaattggccagtggggcaattatgtacgtacatgcatgctccatatgcatgcttatcgtattaagcgtgattaacggtgaagtaattatcgtattttacgcgtcgccggctggataaactgatcaaggcccatcaaaaaccaacagagaagccacccaaatatttgttcatgcacggaggagataaaatccaacgaaccaagagataatgagcataacaaaccagatgacggcggcggcgcacattgtcgaaacatgatttcggcaataataaaaggggtagcacacgagacctaaaagtggatggatgcagagacaaaggatttagacaggttcaggccctctcaatgagaggtaataccctactcctgtttggggatttgaatccgccgggtgtagtatagatctgacgatcaggttgtgtctcatgccccctagagggcctcctgcccaccttatataggatggggggcaggattacaagatagaaaccttaaccaacacggtatcggtttcctaaatctactttacaatcttatcaagccaggactttaggccgttccataatatacagggaaacgtaatacccaagtcatgatctgttacatatttcatagatataagttatcccatataactagtcggataaccatgccgtgtgggtatggggtacccataatctccacagtagcccctgagaccttcacagtcgaaaagataatattctctcgaactagattactccaaagccgagtgcttcaatcatctttgccatgacttcccgagtacttttaccaaatctaaagactgtggagggctgaaaaataaagtcaggtgcatcgactagatgcacctaataggtgtagcccccgactatgtggttaattgaacaaaccaaacacatagtcaaggaataaataatctaaccaaccgagtggtttcgataatagcatatgatgtgtgaatccctgaataatatgatccaagtgatataccgactgctttgtaaaatatgatgcgtgcaacttaaagtcgactacattattgaaaattcacatagcaaaacagctataaagaagcttgtatgttgtgaataaagaaatttccaaagtattgggcatacgccatgcgcacactgctttaacagatgtgcttaagtccctaaaagacacatggtttcaccacacctgaaaatatatggcatatgtggtgtaaaatccgagtaaataaactcataaaggatttaccaaccgcctagaaaatgaccaaaatatataatcagcccaagccataatattggtcaataaaagtgcacacttacgtggcaaaaaacaatgatattgtatccaatcaattgctttatgaacccaaacaacaccttgacttatataaaaaagtcagcgggcagctatataaagcattactgtttggcaccttttaaaatgcattgtaccaactcctaaaaagttgagtaactgcggtataaaaggattttaaggtattgggcatataatcacgcgcacttttgcctaagcaaaaagatgcctaagtccctaaaagaacgtgacaggccacacctgaaaatatgggctgcagacatattaggcctaggccaaaacatatgccctcgacaccctttaaaggatgacgcatgtaacatgctcccgagtaataaatcttccgggtaatatagaccaagcgtagctcatatgaatagcttctgatctgagtgattatcccttatgggatactccaaaatagatataaaaattgaatcccgactggcgcaagtattcggttgataacccttacggagaaaaataaatagtccagtctttgagcatagaaaatagacccatgatcatgaattcatgttgcatgtaaccggaacaagtccaaattgaaggtatgatacttgtgtttgaactagtaagcctctgagcatatagcttgtccttctttgtagtcacaattgtccatcgatggtagctgacgcagttggcatagagacaagacgaccaatatagagataatattgcccaccagaggtggcaaaaatattagtggtagtgaagatagtgataccaatcaaaagtactgaagtcgcatagccatggaggcgaagaaaccagtcggcggcaaacagatcaactaacaatgaagatgaaggcgcccagcgataaagttgtgtagccatggcagcgaaataatcagtcggtgatagacgaggcagatcaaatgcgatgacgaaatccaccaatcatgaagatgaagaaaatagttgacgatgacaaacgcaaccgacatgatgaagatgacgatgtcgatgatccagtcaatagcagtgtagcaaccaatgataatgacaaagacgctcatcagcatttgcatagtaggtcaaccgtgaaggtgaaataataagtcggcgaaaacataatcatccattagcaacagcggagatgtcagggtcgatgaagcagaggtgctggtgatgatgtcagtgacaataatctatcaaattaatgttatagctgttgtagatgctttacttggaggagagttgatgttgttgcccaactcgtctaaaccgaaatatttgaagttgttgaagtagaatgtctgctccgaagcaaagatgaagataatgactcctggagttgactcgttggctgattaattgatttcttcagcttgacataaaatttgtcaaattttgagccttgtatttgtatagcccccgactctttgattagttgggaaacaactgaacatagagtcgagaactgtagcttcttgtcgtcgaatagttattgcttgattgaagatatgtgttgaagatgtccaagtagaaatcctgaatattggagagccacttgttgtagtaaaataatacggcatcgcatgccgagatgtcgagattcacaaagacgttgtggttggtgaagtagcgaaacttgcgaagtagcagcaatagagtttgccggtgccgaagataataaagatgaagtcgctctaccatgatgacaaagttgcattgccgtgatgaagtgaacacgagtcggcgtcaacagaagcaaactggtagtgaagacgcgcagttgtgaagataaaagcactagttggcgacagcataaccagtcggcgacggaagacgatgatgttcatcagtagtgatagctgtataaaccagatgtagaggcgagggcactagtcagcagcagacgagacgaccggcgatgaagatggtaaggccaatcaacactggcagaatcatgcagctatggaagtgaagaaaccagtcggcagccatggcaaacgtaggcagcttgtattgaagatactgatgcctattagtagtgacagcgatgtagccagccgggaagaagatagcatcagttggtgttataacaggctagccgtgcaggcggaaacaccagtcggcggcggccaaggcagccggtcggtgaagacgtagacacccaacaacggcggcataataagtcagccgtgcaggcggaaacaccagtcggcggcggcgaaggcaagccggtcggtaaagacgtagacgcccaacaacggcggcataataggccagccgtgcaggcggaaacaccagtcggcggcggtcgaggcggccggtcggtgaagacgtagacgcccaacaacggcggcataaaggccagccgtgcaggcggaaacaccagccggcggcggcgaaggcaagccggtcggtgaagaggtagacgcccaacaacggcggcataataggccagccgtgcaggcggaaacaccagtcggcggcggtcgaggcggccggtcggtgaagacgtagacgcccaacaacggcggcataaaggccagccgtgcaggcggaaacaccagtcggcggcggcgaaggcaagccggtcggtgaagacgtagacgcccaacaacggcggcataataggccagccgtgcaggcggaaacaccagtcggcggcggtcgaggcgagccggtggtgatgttctgactgatccattcctggagcgtaagagataagcttaaagccatgaatcccttttatgcatatctggatctggatcctgcagaacaaacatataggatgagtagtatctgatataaatataatactcgagaaaaaatcaagtattttaaaatatttataaatatgtatttctcctcttgtcaattttgatttccccgagcagatgactctgtatgtttaaacactctgtccgactagtcatagcccccaagcatcgggagtcggcctaggcatttcccaaacatgcatatgagtgacatgagttcgtcattaatggaacaaagtttcacggatcagaatttactactcaggtacttttgcaattattaagagcagaaaataaattatattatctctatgcttttgatttcttccgagtaatacttagcaccttgcgttactcggtccatccaacgagcccccgggtgctaggaatcggcccaaaggcaactatccattggcaaaccaaacggaaagcataggaagatagaactccataactcgataggtacttttgtactcagattatgtcgcaagcaatcaagataaatattataaaaaatatgatataacatctgtagcccccgactcactactcaatggaagaccaattggtgtagtgaggcagaggaaaaggaaaaatatcatataaagaataaaataaatgatgacttagctttgtaatattccccttggtgatggcagaagtggccaatgtgggaacaaagtcgtccatcaataacaatgaagacaccagtcggcggcgacggaggcaggccggcggtgaagtcgtagacgcccaacagcggcggcataataggccagccgtgtaggcggaggcaccactcggcggcgacggaggcaggccggcggtgaagtcgtagacgcccaacagcggcggcataataggccagccgtgtaggcggaggcaccactcggcggcgacggaggcaggccggcggtgaagtcgtagacgcccaacagcggcggcataataggccagccgtgtaggcggaggcaccactcggcggcgacggaggcaggccggcggtgaagtcgtagacgcccaacagcggcggcataataggccagccgtgtaggcggaggcaccactcggcggcgacggaggcaggccggcggtgaagtcgtagacgcccaacagcggcggcataataggccagccgtgtaggcggggacaccactcggcggcgacggaggcagaccggcggtgaagtcgtagacgcccaatagcggcggcttaataggccagccatgcagacggaaacaccagtcggcaagagtagtgccgcggcgttacatgcaaacagcaaaaaataccaagagagattaattctgagacggagcggagtaggcggaggtcgcagtcgcgggcggcgttggtgtccatcagcacgacgcaggacggcaggaaggcatcggcgtggctgcagccgtctcctatgcatccgattagatcggttttggcatgcttcgtgtttgtagatccatcttgcaacaccatggcatcctcgttgggtagattggaccagtaggcttggtggtggacgaggacgaccatcaaatccgtcgaactgtcgttgccccgtcgttgccgtcgtgctgatgcgaacaagatcaggcagagaatagcagcgacgattcattttgttgaagtcgtcggcggcgaggaatcaaggagctcccaaagcgaaggcgaagccggcgactcataaagttgattccatcgcactcgtcgtcaggaaactcggcgtttacccctacctggcgcgccaactgtcgaaacatgatttcggcaataataaaaggggtagcacacgagacctaaaagtggatggatgggagacaaaggatttagacaggttcaggccctctcaatgagaggtaataccctactcctgtttggggatttgaatccgccgggtgtagtatagatctgacgatcaggttgtgtctcatgccccctagagggcctcctgcccaccttatataggatggggggcaggattacaagatagaaaccttaaccaacacggtatcggtttcctaaatctactttacaatcttatcaagccaggactttaggccgttccataatatacagggaaacgtaatacccaagtcatgatctgttacatatttcatagatataagttatcccatataactagtcggataaccatgccgtgtgggtatggggtacccataatctccacacacatgctgaggaggaacgaaggagatggcgccagatgacggcggcggccggcgacttcggctgcggcacctcggcatccgacgagaggacgcgtgtgcggagaaggaggcgctgccgaggaggagataaggctccagtccattgttatgggcactgccctcgtcggagtcaccgtgccaatcgactcatggacttccgtggagagcaccgaaggccatcgtatcggcgtcgccgcgcacacactccggtggctggcaacttgcaccagcagcagctacaccgccaaacgtcgagccgcatattgacggagctaggcgaccggtggtgtcgaaactagatttcggcaataataaaagggggtggctatcaagctggaaaagtgtatgggtttggagacaaaggatttatacaggttcaggccttcttataaaagaagtaataccctactcctgtccggggatgaatccgccgagtgtattattgattgtatgatttggagaaaatcaacatccgccgctagaggcacccggaccccccttatatatgggaaggagtccgtgttacaaaagataatctatatccctaacggaatatgcagatacagataaaatacagtcgtaaccgactaagtctcaaggtgtttccttgatatacaagttaagaaacaaacccgagatacaaataagatattctatgtatatttggtatcctatattcagcccaaatatcatcgccgtgtagatatgggatatccatgatctccacagtagcccccgagacctttgcagtcaaccatcatagccttctcaaagataataatccgagtgcttcaaaacttatcatgccaaggcctgccgagtagcgaagacgaagactgtaaagggcgaaaagataaagaacgtggtgcatcgaatagatgcacctaattaggtgtagcccccaactatgtgattagttaacaaactaaacatatagttgagaacaaaataatagcacaatcatgcatcagatggcaaaagcatacgcggcgcctaaagaggcattctagccgactgctttttagccataataaaaagaatccgagtggtttacactctaaaaggttcacgaatgaacacactggacaggcatccgaatataaaactctaaagattacccaccaagtattataaaaattatggtaatgaataaatctaatagcctaggctatgactatttaccataatgaaaataggtatataacataccaaggaagtgactatgataaaaacaagtcattccaaattaacccagacagcttttgtagcctaataaagctaacaaaaagcagtataacacctttctgtcgggcaccttttaatttgcattgcaataatttcaaagaattatatgaccgcataaaaaggattttatcagcattgggcaacactattgtgcgcataatattgccaaagcaaaatatgcctaagtccctaaggaacacaacgggccacgctgttaaaagtattgggctgaagtactgttcaggcctaggcccatttgcacctccgatacccttaacaagaaatcccgagatccaagcgacgcttcgtcttccccgccggaactctcgccattttccccactccttgctacagtgcagaactgcgccggcgaactagggttcaccactccactcaaatccaccttcgaaaagtgcatcaaaatccttcccgtgatccaccgcctcaatccctcatttctccctagccatccctcgaatcaaatcagcgcattcgggtaaaatcgatggcg

SEQ ID NO: 20735 - DNA, 5534 bp, Oryza sativa
aataaattcccaaagcgtaccatgcccaagaaaaaactggctggccgtcaaatgccaaagattagaacatcttccaggtataaacctctcagtaccatctccctttgacatgtttctctcatagagattacgccgaatatcgaaagaacactttgcaggaaaccatctgacatagatccaactggaaaagatcctaatccggctgtgacggaaccaaatttatccaaagacgctgagccgactgccgaaaatcagccgactgccgaaagccagccgaccggcgcccatgctttgggtgataaggccgatccgagtgaccggccaccaactggagaccagtcggcaacagctgaaactgcaacaacacaagagcccccgactggaaaccagtcggatgtaggtcccgatgaagaaatccctgaagttgaagcgcagacgacaacttcccaaggaccagaggctggtaaagactcaatgattgggtctctaaataaagaacaaggatcacctcatgtccagccaggaacatcctcaggtaacacatcctctcaagtgatgccgatttaaataacttcagcttactcgtctaatgtcttggaaatacatcaggaacactaggcgatgacgaagaagcaattcctcgcataaaggcggctgatgactcccgtcctcctatcttgctcaaatggtgggacgagaactcgcaagttgccggcatcgttataaatcgtcaaaaagaagatgaggaagtgtgccagctgaagaaagcacttggagaagccactcgcattgtgaatgtaaatcttccgggtgactgcctttaataactttgttcttctctttagcagaactgaaccatgatccatcatgcagagaatccatcttcgcaatgaggccaagactacaactttggaaaagctggttcctcacttgggaactcttgaagcagttagggaccagctgcatgaggccaaggagtatgccaaaaagacagagaaggagttaagggaccgaattgcccagctccaggattcgaacttcgagctaagtggttcatcaaaaggtaatcttctagatctgtcccattaatttatgctgtcatagctgtatcctcaaacatttggatttcaaacagcgcaagctaccaggatggctcaaatggagaaacagattgaagccttgaaaagagacaaagtagaactagctgcgcaaagggactcggccttgaaagaggttgaaggtactgccagctgacaatttgaactgtcctctctttaatgcagcagattcttattataaaatgtgttttgtagaccgtaaaatcaaatctcaagctcagtttgatgtcctggttggtaagatcaagaagcttgaaggagcaagagacgaagtcgccaatgtcgctgcaccactcgtccaagctatgttccttaataacagtggtccgagtgcacttgacgcaaccgaaatctttgacaagctgagagttgcaccggatgtatatttcaagaatatcaagaaagctggaagtatgggagctagtatggcattggcgatgaccaaatccttgtacccgaggattgaaattgataccattgatggctttgcagacgggacaagtgaagaagctgctcttgatcttatcagtaatgctcaaagtgcagctgacaagattgcaagcgatgttgtagagcaattccgcaacaacgaccttcagccgagcgataataactctgatggtgaaaggactgattctgactgagtgtaaatgtaacaaatggaggctcaatttgtacaatactggtgtatttatgctgtgcttgatagttctagccaaatctttgatttcttaaaagcttttatcaagctttgttgagcctaaaacccaaagaagctattaaaaactttcagtcctcgcagactaagtagaaaaatcgaacaaggcaatgataaaccaagtaagcaaattgaattgataaaagatcacactccattattatgataatagcccccgactgacgacttcaagaagaaaacttgatgttgacagtcaagatagggaggtacaatgataaacttaagcgtagaaacgacgaagatgttcaatgttccaagagttgtcgacgagagtaccgtcttcgcgcttgagtcgataggaacctggccgggtgacttcagagatgataaatggcccttcccatagaggagataacttgtgccgatctcgtgtagtttgaattttccgcaaaaccaggtcgccgactaaaaaggcacgagatcgaacattgcgattatgataacgccgcaacccttgtaaatatcgagccgaccgaatcaaagctgcttcgcggacttcttccaatcggtgcaagtcatccactcggtcctcttcgtagcgttcttcacggaaatttcgaaagcgcaaagattcaaattcaacttcactcggcaacattgcttctgccccatagacaaggaaaaaaggtgactggcctgtggcccgactgggtgtagttcgcaaagaccaaagtaccgatggcagctgttgcacccatttgccggcatagggttttagccggtcaaagacacgcgctttaatcccttgcagtatcatgccattggctcgctccacctgtccattgctcatggggtgtgccactgaggcgtagcaaatcttaattccaaaatcctcacaaaagtctttaaaaactccgccagtgaattgtgtgccattatcagtgatgatccgattgggtactccaaatctatgcacaatgttgatgaagaagtctcgagcgttatctgctgtgattgtgacaaccggtttagcttcaatccacttggaaaatttatcaatggccacaaagagatgcgtgtaaccgccgactgcctttttaaacgggccaaccatgtcgagcccccaaaccgcaaacggccaagacagcgggattgtttgcaactcttgagctggtagatgaatttgtctggcgaaaaattggcaaccttcgcacgtgcgcacaattttgtcggcgtcggacactgcagtaggccaaaagaaaccctgccggtaagctttgccgacaatggtgcgtgcagcagcatggtttccgcatatcccagaatgtatgtctttcagcaattgtctcccttcctctaaagatacgcagcgttgcagaattcctgaagggcttttcttgtataactcagcttcatgcataacataaagtttgctccgccttgaaatccgctcggcttcatctttgtcttgagggagttcttgagaagtcaaaaatcgtatgaggggctctcgccagtcggcttcaaccatagctacatcatgggtgcgcgcaacttgagtagcatctttgtgaggtactgtcggcgagtagaggtgttcgacgaaaacatcagagggcgccacctcgcgcttggatccaaaattggcaagtctgtcggcggcttcattattgtgtcgaagaacgtgactgagctcgagtccatcgaacttatcttccaatttgcgtacctcttgtcgatatgccatcatgttgtcgtcaaggcaggaccactctttcatgacttggttgacgaccagctgtgaatcgcctcgaactattagacgctttatccctagggaaattgcaatccgcagcccatgaaggagggcctcatactcggcgacgttgtgggacgccgaaaagtgtatccaaagcacatagcttaatctttctccagttggggaaatcaaaaccactcctgctccagtgcccgaaagtcgttttgatccgtcaaaatgcatggtccagtgctccatcttctccgcaggggtatcctcctggcactcggtccactcggcgacaaaatcagctaacgcttgggacttgattgaaattcggggcttgaatgatatgtccaaagacatcaactccaaagcccacttagcaatccgtccgtttgcttcgcggttgtgcaatatatcaccgagcggaaatgatgtgaccaccgttaccgagtgaccttgaaagtagtgagatagcttcctggcagtaattagaataccatataacagcttctgaacctgagggtacctcgttttggagtcggctaggacctcgctgacaaaataaatcggtcgctggactttttggacatggccttcttcctcgcgctcaacgaccaagactgtgctcacaacctgggaggtggctgatacatacagcaacaacggctcctgcgggcgtggtgaggctaagactggtggctcggtgaggagtttcttgaaatcttcgaaggccttctgtgcttcgggtccccactggaagttatctgttttcttcagcagcttaaagaagggcatcccccgctcgccaagtcgtgaaacaaatcggctgagcgccgccatgcatccagtcagcttctgaacatctttctgggtacttggcggtttcatgttgaggatagcagtaactttctccgggttggcttggatgcccctatgagacaccataaagccaagcagcttccctgacggtactccgaaggtgcacttttcagggttcaatttcatcctgaaagcacggatgctcgcaaaggtttcttctagatccgagatcaaatcatccttttgcttggtcttgacgactacatcatccacataggcttcaacgttgcggccgatctgcgttgagaagcatctctggattatacgttgataggttgctcctgcgttttttagtccgaacggcatggtgacgtagcagtatgccccaaagggcgtgatgaatgaagtcttcaagcagtcggattccttcagtcggatctgatgataccccgagtagcaatccaaaaaactgagaagctcacagccggcggtcgagtcgactacctggtcaatgcgaggcaacccaaaaggatctttagggcaggtgtcgcgaccgggaaaattgccttttcccgaacgctagtgtattaatccccgtcccaggaaaagccggggtacaccatacaaacatgatataaaagacacatctttattatatcggtaatatttacattattacaaaggcacttaaggcctgacaaacaaaaataaacagcagcggactagcggcctacggctccatcttcacaggcgctcaactggggtataagccaggactccaccaaagacatcttctccaaagcttctcttactgaagaggggaaggattgagcaagaatgagtacaaccacagtactcagcaagccacaccggagatgcataattaatgcaagggaggtacaagggaataataatatagggattaagttttgcagtaaacagcatttaaaagtcacttagttgcccaaagccattttgtaaagacgatcctagagctacacagtattattaaacaaggccgtgaaccctcacgaacctgccttaacccaaggcctacgatgattcggaccgaactggcaacccgacctgggttccagctcgtcccaagccaacccaggccaaccattccacattttacttgttgagcaaattt

SEQ ID NO: 20736 - DNA, 11751 bp, Oryza sativa
gagagagagagggagagggaagtgggccgagccggcccaagaagggaggaggagggggaaaagacttcttttaggattttctttttataaaccttttcaactttgtttatttcttttcaattattatttgtgctctgaaaattccactaaaatttgagggctccttttagaccaaggagaatttaacaaaaattctccgggccatatttgaatttttcttgtacgtattttagtgtttgccaatttcttttcgaattttaattaattctattattccttttagaagatgatttttattttgggatgaatttatcaggacgtgacaaatccaccccccttacaagaatctcgtccccgagattcgaggaggctagcaagaagataggttgggcggtcttctcttcttgtttgacttcttccgttgcgtcttgacgaacttccagcaaaactttaccactcggaactgcttggcttgacctcctgttgcggatggaatcttctcttcacctgacttggaccagggtgcaccttttggctgactcagactaggttgcggtagttcagtgatgcttccgttccagaacttctcatgattcatatcttcggagtcaacctcggacaagttatcaacttcatgtcatgcgtcgagatcagctcgtcattactaagataccatgcttgtcatttgcttctaactcgccaccaactgcctcatattagctttcctggtctccgggtgatagctacttctgctatttgatgcaagggtcgataactttgcctttgaattatgcttcccaggggagccaacttatcctacttgatatactttgacgtcttcccaaatggctttactgctggatttgttattgtctaattattatcctgccaaatctgaagcttcgttgttagaggtgatcttaatctgacctctgtagactatcttcgaacatatcacttggttcataactgggaatagctcccacgaacaagcaactcggattcactttctttacattcagtttacttcccattattatcttcaggttgtcctcacttagcattcaacgtattcctttacacctttaatcttgatgtgttctttcccattggatcatctcccaagacatggcattacctggtaactggtgcttgcacttttcactccgtgtagcatctgataccgagttgaagatttcactccttgccttcatagaaacatttttacctaggtcctcttgcttacttaatgacaaggtggctgttgtggggcaattacaattaggggtcttccttgagcgatgcagagcatgtttctgtttatcaatcacctttcggcctacttcttttatgctagagaacatctttgccaatctcttttatcaatcatctttcggcttatctctaacaggtggtattctttaatgtggattgcggacgcttctggggatgatgaggtcctttggcttgctgcctttcagtggaaccttgatgtggttcgtcaaaagctgcactgactaccttcagggaaatacattgcctgctatctgtatctataccactagggtttaattgccgatggtcatctttagtgcttcctcgagatggggagcatccaaattgttcttctgccacatcacctttgacctttttctgataccagataaactaattaccaaccctcgactattatgttctcaaatattgatgtctcctggatctccttatctgttggcaggtatatccgatcttatcaacgtagaggtatggcaggtacccttatgggtttcatccaacaatccttatcttgatctgtaaaaggcgtatcccaactcctatcctcaactactgtctcgttggctttttaacccaacacagtttaattggttttcttttccatcaacaggttggttattaactcgaggttggaacatagttcctctgaaatgagaccctaggtctcctatgtcagtaaacaattatacacatgatcacatatccgcatcttccaaaagaatcctcttaggacttgtttttattacaaatttctcccatattacatgaatacaaggcactgccttaaacaaaaagggacggtgcttaacatcggtacattgtatcctcaacatgaatcatccataagcatagcaagctcactgtttatagacatgaatatatttctgtattacatgattgctgcaaactttcgattacaccatgataagtagcggactgaaaaccacaaacatggctgctcattttgattctggagagatatagctggcattgttccagtgactgcatcctcgattggttctgtgatgatgtgataggactgcataatgctatcattcacaggagaagcttccttctgattgctggttgaagcggatgacggtcttctgcttggtatcgccctccggaggttgattgcccttggctcggcctgaagtaggtcggggagagacacaacttcttccatctacgacaattctttgctgaggctgtcgatgcagagaatggttgctaagatttattgccaagtcaggtgcagcaggaggagcattggtgcattgtttctgctatgggttctgattaacacgaggccttacgggtacggcgtttgctccagtgaccacaatacgattggaatgtctgcttcgtgtaaattggcggtaatgtggaggtcgattttgccttggttggggacagtttttggagtaatgcccttcttcactgcagttgtaacaaacaataactttcttacactcgggttcttcatcttgtacttgatttctcagctgctgtattggaacttccaaaggtacaacgcagatactggcctctgtcttgtcagctggtggctggggctgaaattgagcattgacaccttgtggtagtgcactcattggaattggagttgttgcaacgcgggctataggactgcttcgggatgcatggatgacaattcgttgaggagcaagcttctgattgcagggagttgcgtggactgacgtgccggcagctatgtttctcggttttgggcacttgtcggcgaaatgacccattccttgacaattgaagcaacagatgtcttcccggactcggcattttcttttctcatttcgattcctctgtcctggcactggagttaggctgaaatggtgatcttggcggggatgtgtgttgccttgatgcttctctccgttggaactggcgggttggttggccatcttcttcgtcagcagaaaactgaattgacaatcttttggtacatgatcagttccttcacagaagaaacaagtgatcctgctcgttggacacctgtcgggcggatggtcttcctcacaatgaacgcatgtagaggcacacgagctggcaacatgaccgatttctccacaacgagagcatgccttaagttctattttatcttcatcatctgaggagacttgatctgaatcttcactatcagacactctacctccactagctaaaagatgctctgtcaactgttgtgcacctcggaaggaatctcttctctgatgttttgtcattcctggtggaggccattctgtgctggtaatgatcatcttacggacttcatcttcggttcgcattggtgcttttcttttctgctgaggacagttccttgcatagtgcccttgctcatcacacataaaacagatgatacttgcttcttttgggtcaacatgtggcatggcatgaggggccttctgggatgttggcggtgcgctgacttgtggtgtgagtgcttggactgcctccaactgcacttgaggttgcatctgactcgggttcaaaattggcatccgatgctgctgtagtatctctataagcaattggttctggttaatcaggtgttggaccactgccacacaactggtgtctggtgcttcattcactcgggagcttgaggtaccaatgtcctgacttctgaccttattgcctttctcattgtcagccatctgttgcaaaggtttggagaggaagagagggaaaacgaaggggagagacagattagaaactaaggataggaccttaacagatctaagtcttttgctgttatgatgtatgttaggcttattctgcaagttgattaagcaaacaacctagcatggttacatcacaacccaccgatgcaaaccacgcgctacacacacaagcaagaaacacacgactaacgacactaccctagagggtggcttaggttctgcgacgggttctccaagatcttcactcctgcttcttctcagctggcttcactgcttcctccacttcgctagcggatcctgcagccttctggagcttcggcagacaattgacgacatcttcttctttgcaaaactaaccatctagtactagttgaaatttgaagaaggaagaaaagggtaaaccttttgcaaatagcattaggggaagaagaaaagaggaactttcgcaaatagttttatttataaaatatgtccttaggttttatccacttggcttatcctacagtcgagacggctctgataccagcttgtcgcgaccgggaaaattgccttttcccgaacgctagtgtattaatccccgtcccaggaaaagccggggtacaccatacaaacatgatataaaagacacatctttattatatcggtaatatttacattattacaaaggcacttaaggcctgacaaacaaaaataaacagcagcggactagcggcctacggctccatcttcacaggcgctcaactggggtataagccaggactccaccaaagacatcttctccaaagcttctcttactgaagaggggaaggattgagcaagaatgagtacaaccacagtactcagcaagccacaccggagatgcataattaatgcaagggaggtacaagggaataataatatagggattaagttttgcagtaaacagcatttaaaagtcacttagttgcccaaagccattttgtaaagacgatcctagagctacacagtattattaaacaaggccgtgaaccctcacgaacctgccttaacccaaggcctacgatgattcggaccgaactggcaacccgacctgggttccagctcgtcccaagccaacccaggccaaccattccacattttagttgttgagcaaattttaagaattagaacactgacttgggtacattgctcggcttgcccatatccgagggctcggctattcgaatagatttactctgatcagaggtgtacatctttacccacaagacacatctccctcacgtgcaaacacgtgccacataccaccacggtatacggacggaagacgtgacatagttcccaacccatcctagccataaacaagagtaccgacccaatcccacctgcggccgggatacccgggacaggcaggcagaactgagcccctagcagcagggcaccaaccctctgccgtatgacatctcgactaccgggccgcagcccgtgtagccttcatttgccctggagaatgtccatcgacgcccgacttcatccatctccaatccgtgtacttttgtttatgactagactgagccacaaactaagccttacccattagacatgtggaagtacggtagtgctttgcaacagaggcccgagcttaatccttatagtggccggggtgctacttcccgcaactggcatgcacccaaaccccaccgaaaacaggttttaggggttttgaaagaggaagagaggtgtgtgtccaattccacattaaaccaaccattccatagtgtccaaatgatatgagaattcccaaagtctaaagttataaaaaccacctaatgttgtcctatttaatcagcgaagcatctacctaaattcaaactagtggaaccaggaatagagtgtccactagttggggttttgtttactctagggtgaacaaggaaataataacaataacaataataataaggtcataacaaaggtaaataggtatggctagataaaacagtgataacgcgggaatttaaataaagcgataatgcaataatttaaatcaacataattttacaaactgggattcgatatgttcaaggatgatgcgacttgccttgctcgctttcccaaacgacggcttcgacttccacgaagagcggatcttccgaagctgcagcgtctacacgaccaacggaaaagaaaaggcttttactctaataaactccaaacaacaagcaggaacaaagcacaaaaatgggttctttacatcttaaggaaaaattagagacttgaacggtccaattccgagttcaaatggccaagatatggccatttgaagtttatatgctctttaaatggatatttacgaatttcttcatttaaattttcaattaaaaaaacccatttattgcgtcagccaagggaggggacgcgcggaccgggtccacgggggtgggggcccacgcgtcagccgctcggtccacggtggaccgggcgcacgcggctggcggcggtcggcgccgtgggtcccacgcgtcagccgcacccgcgggcgcgggcggctgacggccgggcccacttggcagccgcgagggcgcgcccgagggcggcctcgccggcacggccgacgggagcggcgcgcccgcgccccgatggtcaccgccggcgaccatcggcgcggcggagcggcgcccgagagagaggagggaagggggaaggcgaacggcggtcctcggctcaccccgggacaacgacgacgacgagaacggcggccggagcggaggaaagcggcggcgcggctcgggatgacgatgacggcggcgctccgacggtcggcgggcgaagcggaggcgcggacggagtcggcaaccactcggcgaagccgaaggaggggtcgccgagtcggaaggaggaccggagcgacggcggcggcggaacggagctcggcggcgacggcggagagagaggagcacggcgcgagcacgattccgacggcgagagcgagcggtgaacggcggaaacggaagagcgaagcacggggatcgaatatatagcaacgggagggggagagcgcggccggggagagaggaaaccgcgcgcggagatctcgggcgccattgaagacgccggcgaacttcgcgggatgaatccggacgaatccgagggagagagagagggaaaagagggggaatcgggagagggaaacgcggggagtaattcccctctctttaatgcgcgcggggacggcgggatgcggcgcaatccgcggcggcggcggcgctagggcacgggcgcggcggcgggcgcggcgggaggaaggcgatgacaggtgggccccacccgtcagcgagagtggcgggcgggcccgcctgtcagcggcgcgcgcgcgcggggagccgatgggccgcgggagaggagagagagagggagagggaagtgggccgagccggcccaagaagggaggaggagggggaaaagacttcttttaggattttctttttataaaccttttcaactttgtttatttcttttcaattattatttgtgctctgaaaattccactaaaatttgagggctccttttagaccaaggagaatttaacaaaaattctccgggccatatttgaatttttcttgtacgtattttagtgtttgccaatttcttttcgaattttaattaattctattattccttttagaagatgatttttattttgggatgaatttatcaggacgtgacagcaggacttgttgaggtcagtgtaatcaacacacatgcgccattgccttgttttcttccggactagaactgggtttgccagccagtcgggatgaaggacttctttgatgaagcctgctgctaacagcttggttaattcctccttgatcgcgtctttcctgtcttgtgcaaatcggcggagtcgttgtttgataggcttggcgtcttctttgacatgtaaggagtgctcaatcacctctctaggaataccgggcatatcagatggtttccacgcaaagatatctttattgttctgaagaaaggtgatgagcgcgctttcctatttacaatctaactcggcgcctattacagcagttttagtaggatcagagggatctaggggaatcttcttagtcttggcttcgctttctccactctttgaaatcttggtagcgggcacttctccttcgctcgccgtggctgcagccagtcggatatcctctcgggcggacgccatctcgcgagtttgggccatgtcgcaactctccttgtcgcatgtgacggcttgcttgatgtcgctccgtagggataggactcctcgtggaccaggcatcttcatcatcatgtaagtgtagtgcgggacggccatgaacttggctaacgccgggcgtctgagtatggcatggtatgctgtctcgaaatcggcgacttcaaagctgatgttctctgtgcggaagttttcccgagtgccaaaggtgaccgggagggtgatctggccgagtggagttgcggataatcctggaattactccgtggaaaggcgcattgcttggttttagctcggaccgagggatctgcatgtcatccaaggtcttggcgaagaggatattgagtgcactgccaccgtcgatgagggttctgcgaagcttgacattacggaccactgggtctagtaccagggggtaccgccccgggtggaccactcggtcaggatgatccgagcggtcaaacttgattgcaatctctgaccatcgaagatactggggcgtgtcgggctgaacagcattgatctcccgttcagtcaacttctgcttccgtttagactcataagccagggggctgccgaagatatggttgagctccttgcggtgatcttgaaaacctgccggggtgtcgccgtcgtccttcttcctcgacgtgctttgttcttcgtcagagttcttccgtgcagtcttggtgtattgatccgcgaattgcttgtagacgaaacaatctttggccacgtggttggagttaggatggtgcgggcattgggagttcatgatcttgtcgaacgtgttgacgcgcgaacgctgtcgagaagagtgactggcggttgcaacaagttccgcaggcttacgcttgcggtccttatgattgttacttccacctcctcccgtagccggcgtatccttttttggcttccaactgggacccgactgctttgatgcggtgacggcgtcttcagctttggcgtactcgttggctttttcaaacataagcttgactgtcctgggaggcttacgcccaaacttgccgactagttcttcgtggcgaatccctttggtgaacgcggcgatgatgacgtcgtcggtgatgtcggagatcttgttacgttgttcagaaaatcgccagatgtaatctcgaagggattctccggacttctgaatgacgttgtagagatcatattgtgtgccgggacgctcgaaggtgccttggaagttggcgatgaagtggtcgcgtagttcggcccaagatccaattgtaccacggggcaatccatggagccaagatcgggcggaatccgctaaagccactggtaaatagttcgccatggccttgctgtctcctcctgctgcgcggattgcgagaccgtagacggtaagccacgattcggggttagtggtgccgtcgtacttctctattccagtcggcttaaagccggctggccaatccactcgacgcaggtcgtcggtgaaggctgctactccgtcaaggtcgtcgtcgtggcggtccggcgagtgatggtagcctcgagctgctcggcgctgtatgattgtgtcgcgaagatcgatggggcggcgacgaggtggtgagcgaggtcgttccactcggcgctccctatggtgatcgggaggtgagtgaacggaccgctcgtcgtgacccctgctcctgcgattggatcctgcgccggtaatgctgaggcttggatgacggtagtcatgagatcggaagtgggggactcggctgccagtcggcgtgtggacgctttcggagttaactgggaccgaagccgcaatcatggtcttcgtctggttcaagatgttgacgacgtggtcggattgattgagctcgttttggttgaggagggtgtcgagaagggtgatcgcggcaaccgcattctgttgaggggtgcggaaaaccggtgtcccttcgacatcttgttggccgatgagatcacgcgctcggcgccctgcttccaaagctcgctgacgtcggtcctcagcctccttcgcggtccgctcacggtcctgctgctcacgccgtagccgttcttgttcttgtgcttgatgctcctcctccagtcggcgacgttcttcggtctcccgggcttggcgttgctcctccgtctcattattggccatgaaaacgccaaagtagagaggggtgtagttgtcatctaggcttccgtcgaagtcgtcgaagtcgtcgaagtcgttgtagcgagaactaaattcgtcgtactccacgatgtcagtaggacgtgagtcgacggtgggagagctgttgtagtcatccagctgatccgtcgaaaccgtgctgagtggttggaggatgacgccgacttccctgaagctaggcaaaatcggtgttgaagccgacttccgcctaggcctacgggatgaagacgctgtcgtggtggagacggccgctaaatcgtcggggagcttcatcaggactggtgggtaagccccatcatcttgatctggtgtcgttgaagaaaatgcgatctcggccgagtggtttgaagccgactcgattgagatggtcttgaagtaactttcagccgtgtttgggagtccaaacggaactgaaagccggttctctcccgactggtctgattccgagtcgaggagggagatcttgccgaagttgttggtgacgaagtcgaggctgccgaaccgaaacgcctgcccgggtgggaagacgaggtcgtcgatgccggagatgggacccattgcactgatcggcgaaaagcttgacgcttcccctacctggcgcgccaactgtcgaaactagatttcggcaataataaaagggggtggctatcaagctggaaaagtgtatgggtttggagacaaaggatttatacaggttcaggccttcttataaaagaagtaataccctactcctgtccggggatgaatccgccgagtgtattattgattgtatgatttggagaaaatcaacatccgccgctagaggcacccggaccccccttatatatgggaaggagtccgtgttacaaaagataatctatatccctaacggaatatgcagatacagataaaatacagtcgtaaccgactaagtctcaaggtgtttccttgatatacaagttaagaaacaaacccgagatacaaataagatattctatgtatatttggtatcctatattcagcccaaatatcatcgccgtgtagatatgggatatccatgatctccacaggtggtgtcgcgcacacacctcagcagcaagcaaacaaggaggaacaagctgatggcatctatcgtggatgcctctccaagctcatcttcgtccatgtctcgccaacctgaggagtaaccactgaccaaaacggtgttctacgctgcgcacgccgtcaacatacgggatcatgcgccgtcaagatgaagagagcactggccgggagatcatcggagtagtcgcggacgccgtcgagccacccgtgtccacagctaggctgctgcctcgccgaagatgctatttcgggcac

SEQ ID NO: 20737 - DNA, 6074 bp, Oryza sativa
  unsure (1)..(6074): unsure at all n locations
cgttcgtgctgaatctactctaacaaatgctcttgccattccgccgacgaggcatttacttcttgcaaggtcgtcgttgttatcggcaccctcatagagccccttttacgggctcgtcatcatattaaccggatcaatagtagatccattgtccgaaggaggtgccaaagccacgttcgtccggctgctgtctgcactgacttcttcatcaacatcttcattacaagtccctgttgtataaggggcatgacgggtcatgaggtgcccagccatgtttaatccggcagccgtctacaccaactgtcttcgtcaactcttcgttactttgatctcacctagccaggaggtgcccagccaagtatattcggctgtcgtgtacaccaactgacttcaccaactcctcttccctttaacaccattccgacgctgctgctgtgatgtctctaccgtccaagctacacgagttccatgcatgtcgaagatcaacctatcaacaccagcacgtcgcttaagactgatgaggcggaacgacgagggcgggcggagtctatatgaaggctacgccactaacaccagcgcacggaccgacgaggctgtggatgcattgccggcgcccacatatatatccaccatcttcaccaacattcatcatgcatggagaacgggaagcgaagacgacgagacgaccacaagtagcttaatcggaggtgctctgtaggcttagacatgtggagctaattaaccaggagcttctcaaggccctaggaatcagaaggccacatcgttaatgtcaagatctgtccaacgacaggcaatggcgcgcgtattttatattatacatggaaactgtatcttgttaattcaattaataaagattgcgtgtttctgtgtcccttttgtgtttgttttacattgtgtattttgatacactggcacgcccgtacttattttctttttaaacatagagggatacattcgtatttttctatcctaaacacagtgccgctccaaggtttgtccggctccatctattcgtaccacagccaccttagcctgagtgctcgagcgaaccggtccaagtcgagcacaccgaggccacccagatgtttcggcctgcaaattctgtcccaattcactttgcattcacccccctccccctacccgagatgtcctctcctcttgcccagaggaatttccgtctcatcttgtcaattgaatggagcatgctgtccggaactttaatggctattaggtgataaatggtttgtgccgtgaggacggatttggtcagtgattttctaccggtggtcgtcatcatcttgccttgcctgggcgccagcctggtcttatatttatccagcagcggctgaatgtggacctttttttttttttagcttggagaccgttagatggaggccgacatactttatccgaaagccggttacgttagcggggaagacttatagtatctcttggaggtctatgccagtgcaatgaaaggacgcaatttgacttttcgatatgtttatccgaaatctggttacttctccgaaggaatgaagaatttgggtaagatgtcgcatatcattgactgttggtcggacgaacatggcaacatcattcgcataaagggatgtacgaaggtgtgctgttctcccattgagttgtgcgagcatgccgaagtcggttgccttcagtagcactgcctttaaggggtcgatggctaggatgaagaggagaggggagagcgggtcccctgcccgcatccaaattttgaacccttgattaggatgatcattttggagcacgattttagattaagatctaattgctgatggtgctttaagtccgagggatctgcaccaccaatagttaaccatatgtgcccctgaagacacggaaccaaccagcaaagtctcgatagctgctcgcagcatcaatctggaggaatagatcatgaccaattcctgacagcctgtttccaaaatcagtcagttgacctctcgaccattagaaattaaaatacaacttaagaattgatggtgtaaggaatatgcattatttaccatggactcacgacaatttgagctacggctgatcagctgcgggggaaaaaaacaaagcaaccttttatttatctgtgctgttagcagtttagaagccaatcagaaaaaggactacaatttaaaaatttccaaaactaactctaaaattaaatatgaaaattcaaatctggaatgtggctcataaggtagcagaaggtcagtggcaaaagtttcaaatttttttactaaagtcaccgtcctgcagcacatcatgacatcccacctcaaaatttttacaccctatcacatcggacgtttgaacacctgtataaaaaatattaaataaaggctaaaaaaataactaattgcacagattgcgactaatttgcgagacgaatcttttaagcctaattgctccatgatttgacaaaatggtgctacatcattcaatgattgcagtttactggcggattctgtaattagtttttttattagtacccaaacacctcatacgacaccctatataatatcggatgtgatacgcgaaaactttacaccccttgatctaagcaccccttaatacatggtatttggtaagtattcccaccaactaagcacggctgatcctctttaaaaaaaagaaaagaaaagaagagcacgctgatcctacaagagtggaaataaatgggacgaggtgaagaattgcatagtttcaaaaatatctgtaaagttgtttcgatattaaaagagtagttgcagcaaatcctttctttctatatagtcacccaaagcttaactatggttaagccacgtcaccacttaatcctcagccgttcgatctaatatgaatggttgcacacgcgtgaagcccagcccacgtctctttccggagtttgttggtttctccagttgtcgtaggctctccggacctctcattatatttgaaagatgaagtgaataattcaagtcatcaaacaaaaataatgaaatatccgacgcctagagagaaaaatattggagacattgttaggcctttagcttctcagtcaacttcagcctgagatgtgcccgtcaaaccactcaaaggcagcgaccagatgtgctacacattcaggagacttgacagaatggctaaagatctacaacatctcaaatattcttaactcatactcatgtgaatctagttcccaggatgtgcgaactagattcatactttcatcttaaacatggaattacatagcaaaatacatttaagacgaaagtgatctaagatttacaactatttatagttataaggtccgaccggccaaatatagatatatcagagaacagcggaagcttgactacccaaatacaagcacaccgactaggggtttacccaagtaagttcaagtcctagaagaagcagtcgaaacccgcatcactcctgcacaaatggatatttcaacatatcaagcatcagtacattaatcaaattaatgtattgccaagcacaagataatcctacatactacatgtaaggcatatattcaaagaaaggcaatatgtagttcaatttcaacataaagcaagttttgtttcacaattcttctgtaaagggagttggtgattcagttaacaaatcatttttgcatgtccatcataaatatcattatatcatcataagcatactcttgttgtcttccttggcaacaagtcatataatcatcatcacactcacacaactcaacataattaacccatttcaatctcaagttaaacacacacatttaaaaacataagtctatactcatgacacttcactatgccgctcatgaccgtgagcacgactaatcgattagttttagactctgtagagtttgtacagctttatccacatgatatgaattcctctagtttatccggtacccgtcagtaccaccacactctacatgttaaatgcggtctagaggtcataacgaggccgtattgcctaccgtctaaccttgcttgagcacgatgcgtgttattccacactaagcctagaagcttagtgtcgtcaggacggctggcctaccgaccctgatgccgtggcatagcattccctacccacgaggcactacactgttgtattggacacgcgcagacgcccatgccacaaagcgaacatcagttcctttgctagaaggtggaggaaggaagaaaaaggaggaaggagaagggcttcccctcgaccacccangggtcggcgcccacgtccacccaccgcccatcgaccagggcaacaacggcagcaaccatacctcgcttccccttgaccacgccggggtagacgtccacatgccggtactcgcccaactcaccaccaccgggtttcacccccgcatctcgtccacgcatgggtcgtcatccaccaaggcgaaggtgacgccggccgacattgatgtcgacgacgacgacaaggccgacattgcagatacggcccgcatcaacaaggttagtcatatcaagctctcatcgccctagataatgttcattcatgtatttatttttatggtttggagtatgtcaacaagtaattcttgtttcaatgggtgatgttgctcatcaatctacacaagtacatccaatttcatggatgagtgaatagccatgatcagtgtcgaaaagattatattcatggatgattgatgatcaatgcatacaagttaattgtcatgaatttaatgtgctatggaatgcatttatatcttttttattgtgaccctgctttgctgttaaatgaaggataatgaatacctttatgagttcatctatccacatatgaaaatatgtttaaaagactttgatgacgacgacaagggtctcgaaggggaggttccatcttacaaggaggtgatgatccttctcttaggtattatatatatatatgtatatatatatatatatatatgtatatgtatatatgtatatgtatatatatatatatatatataggtttacaaacgttacaaacttggtaacaccttacaataaaatcttacaacattaccataataaaataaatattacacatacttattgacaaacatattaaaaacttattgaaatataacgtcatgcagcaaacatatcatgaccgaacataaataaccggacagtgtaggttataactactgcaggtttccttcctccctatcgtgagcaccctaagagccccttctattcctcctcgcacgttgtttcctaggttccatgcttgaagatgtaccctccttgttattcttgcaatctctagtgcggtgcccgtactgaagacagtcctcacatcgcctcacaggccctcccgttttgaatgcatccatatcacttcttaagcgtcgtgtttgtcttctacccttaccagccttcaacaaatccaagtctagcacatagatccttttatcacccccagtttcgactaggtgttggagggacctccacccgaggatctcagcactccatgcattcagaactctatcctttagggagaacgtctacacgtatgatgttgaatcaagcttaattttagcacacgcggccaggacatggctacatggcttatgaagaagcttcggcttattgcaagagcacgaacatgtgttatcagattcgtgccctagagtaacttcatgagtgatgaccccagtagaagatccaaaaccccccttagtgcgacatgtgacttcccaccttagtctggcgttcccagtggtaatgaccgtgtgaaatcttgccttgttagccttctcttggaggtactctgccatcctatgggttgttgttggtctgctcatcgaactttgtagactgatttgccttgcacaaccgcttgaatatgttcatcagccgccgactgttgaattgtttgaaaaaattggctcccatgtgctgcatgcaccaacggctatgcatgtaggccagtagtatgcgacatcaccatcctcctggagttctttgattgctttcaacagaccggcattccggtcatggatgatgcatatcgatgtg

SEQ ID NO: 20738 - DNA, 2881 bp, Oryza sativa
cgaacttatttgtgcataaaatcctcgtccaggaatcagccgaggtacacaaattgacaatttaatatacagattcatcaaattaactaaaacgataaatcttacttaagaggcactcagtcctcaccaagaagaaaattacagcggaaaataaaatctagcgaagctccggctccactcccacaggcagctcaactggggtataagccaaacgtcttctccttctggatcctttttcttcaactgaggttgattgattattgcaaggtgagcatatgacatactcagcaagccacacagcaaatatgcaagtgcacaaggataccaaaggatggcataatataggctcatttgcgaaagcagcatttagcaaagagttaagagtagtaaaacagtagagtaattaatcagaaattttaatcaacactgaacagcacacccatgctgtacaggcccaaccatcctgaacaaccatacccggctgtacagatctaactccaaaccaggagctaagcaaattgttaccagttataacatccataattattgtgagaggtgtgggactaatcacgaaaaacattgctcaactcgcccataaccgcgggcacggctattcgaatagttttactctggccagaggtgtaccactgtacccacaagacacagcctcaacatcatgtctaccatgcgtcgcgatactggaaagtacccgaatagaggctgtgacaataccctctgcataacacaactcaccacagtgcaccattcctggatcataatcacccccttataaaacaaggcatggactccccagcgacccccgtgggcttatctccgccacttctcagtctggtgctccgtaatgaatcatgttatacaaaaggtaaagccgttgcccacgctggcttgtggttggcacggttaatgtttcacaatagtagcttgcgaaccggtccttaattgtcatgagcacgactctcaaaaccatgtgctcacaacccaccattatcaagttttagttggcaagtaattaattaaccaatcacgattaaccatcgtgaactatcattaaaccatcattaaataacagtgaataataagttatcccaatagtgtgctaatgtttctaagcatggctaagcaatcatatctaatatctagctgaaccaatatatatagctcaactagtcaagttataataacccaaggtatcaaggaataaagtaatcaatgcaaacaggccataacaaaggaatagattcacaccacccagtgacattcgaaaataaatgcacagttgaaataaatagagaatttaaatataggatcaacatgctcaaaggattgtgtttaggatctgtgtgacttgccttgcaataatcggtcttcaattaatcttcttgaacactttcgacgcactcacgaaccttcgcaacgacggaaacgacaagctaacacgcaaaacgaggaaaaagactaataaaaaccaaataaacaatacaaatatgtagatcataattttagatgaattatgagacttgaacggcctcattctgacttcatatgaattaattatgaattttacaagattaaattccaattaaacctattaaagaaaagactattccaaattaattaaacaatttacaaatgatttataactgagagaaaagattaaagcaacctccggaaaagattagattatattggtagatgacatatgataaaaagaaaaaggactaatatgccattgaaaagatagaacgaatttatattgattttggacggctgagattaatcttgaccgagagttgaccaagatcggatggcttagattgatctggcaagcgggcctcacgagataccgactcaacgagtcaattctacgtgacacgggatcacccaaatgatcaaccgaaaccggcgaacggaaccggcggctctgaactaaaggacgactcaacacggacgaacgaacgaagcacggggaacacctcattcgaacgaacgagcgaacgactcaacaacggctgcggctaaaccggtggactagaaacgattcacggtaaagccccggtacgacaaacgatagaccggtaggaatttagggatgcacctacggctagacaacttgactaccgagcaacggctaaagcgacggctaggttaaagcggcacacagctgcgacacggcggcactagggcgacttggcttggctaggcggcagctcagcggaaacacaaagctagggttagggtgacggcacagccgatagcgatgcacgacagcggcgcggcgactgcagaacgtgcactagggcaacggctacgcggcggctagcagcggacaacagcgggtacggtgcacggcaatgaccggctcgacgctaggaccaaacaagattagattgaattaagaccctagggataaagtacaccggtgaacgacaaaggagcggcggttgccgacgaaataatgcaatcggagggcaccgggagaaagaggaggcaacggcgattcttaccaacacttacgcgacgacggacagcgacggaagatggccggcgacgcgcttcaaagggcggcgaggtactgtccacggcggcgacgactttccggcgatgtgcggcgacaacagaggggtggccgggcttcacttcgcagctgcgaatccaatggagtcgatggcgacagagggcgatgacgggaggagcagcagggcttcgccgaagatcaaaacgcgacggcgaacttcgggttgacggcgacgatggagctccggtggattttggcttcggggagatggctgccgggcttctcctcactgctgcgatgccgacagtggatacggcgtggtccggcgaccacggagtcgacggc

SEQ ID NO: 20739 - DNA, 5907 bp, Oryza sativa
ctctccgcctctggaacaccgccgcctcgtgcaccacctctctcccccgccgccgccgtcttcagccggccgctgctgccgcgttagtcgtcgccgcacctcgtcgtttgcgtcgtcggcaacgctgtgccaagctctacctcggcctctgctctgtttccccatttcatcgccgcaaccacctttccgccgtcgacccgagctccgctaccgccgttgtcgtctcaaaccaccgctcctcaccgctccggtcgcctatttctctccctaaccgctccaatattttccctaggtcttgccggccctcggccgcggctccaccgtggtcgggcgtcgtcggaacgccgttcccgtcgcctcccgtgccggtcgccgccatcttttccgccgccggccacctccccgtggtcgtctcgccgtcgccgtcctcggtgagaatccccaccgccccctctcctttttccccatccgccgctccccatgcccgccaccgcgacgcgctgccgtcgccggtggtcgtctggccgcgtgcgcgtagccgccgtgccatggccggccgggtcggtctcggccgcgcccgtgccccagccgcgccgcctcgtggccgtccgatcggctttgggccgatccgggccgtcggttcccgtggaccgacggtggaccgcctcggtggtctcggtccacggtggaccggcgcccttgagccgctgccggtggggcccgcctgccagccgccccctctccctttcttagtgccgctgacgtgtggggcccgcgtgtcggcgccggccgcccctttgctgacgtcagcgaggtcctttttcctttgtaaaaataattaataattgcacaataaatcgagtttagttctagaaattcatttaaatggctcaaaacttctaaaattcatatctaattcattcgaactccgaattgagccattcaacttgcaaaattcatctaaaattgagctctacatgtttgtttactttttatgtactgtttcctgggtttttatgagagtttttcctcgttttgcgtgccagcgtgtagtttccgtcgtttcggaagttcgcggtcgcgaggaaaagagttcagaagatcaaagtgaagaagcaaggcaagtcacacattccccttgagcatgttgatcccaatttataaatgttttaccgtttacaaataaatatgcatgttttgctaattacacggggtcagggtttacctatctgctcgcttgtgccatgtttacttgatatctgtcctttgtcaaccttgggtgataaatcgactagcttgtgttacttatgtgacctagctagaactttatgcttagccatgcttaattaccactagctcagtcgatgggataattgcagtattagacattctagtatcttgttgagccgcgtgctcgagacatctggccatgtttcatggtcgtaattatccaactaaaatgcgactgaatggtgggcagtgggtgcatggttttgtgagtcgcacccatggcaattaaggaccggttcacgggaaaccctggaagacttacagcgcttgccacaagcgggaatgggtaactgcttgatctgaagtatagctcgaccctttcctaggcaccggtggcgagggtgggcgtgatggagttgggtcggccggggtgtccggttgtccagctgccggattcaccgcggcgcaagaggggaccgcccactgccttttgaggggtgggggtgaaaccttagcgtggtgtggatggttaggggagggttatgcgaagggtctcgtcacaatcactcgacatggtgacgtgtgcatcatgggcacatgatgacgcggtgacatgtcggtgggttgtgtcttgtgggtacagttgtgcacctctggccagagtaaaactattcgaatagccgtgcccgcggttatgggcgatcgaccagattcaccgtgattagtctcacacttaataaatcgacccaatgcactgtagtacaggtgggttggttgggcctgttcaacgtggtgtagcgttgatcagtggagatttaatattactttaattactcaacagttttactgttttgcccaataaaatgttttacaaccgcctttatgcaaatagccacagaccatccttgtatccccttgcacgtccgcatcgttggtgtggcttgctgagtacggtggttgtactcagccttgctattattcccccttttcagaagtgtagtgcttctgagctgaagatggagttagaggaccaaggctcagaccccagttgagttttgcctgtggagtggagctgaagccccgctaggatcgcctttttccgctgctgctgcttttgtttcggtgtgaggactaagtgcctcttctgtaagtattttacgctttatttacgtttggaactgtttattacttgtcgttttgtgtaccctggctggtcctggacagggatttaatacacaaaatagtctggaaatttgggctaaatttctgggcgtgacatgctagcctcacggtatgttgtgtttggcagatccgagttggatccaagaagccgataggttcttttgtcttcttagcatccatgtattgcatcctacagaagaagtttgttagtaacaatcacatggatttgtattgtacatatttttcatataattaattaaaactcatactcacatgcaccaaacaccgacgtagttgacgtccatcttatcccaacgatatatggcgtggagatatgagaaatctagccatacgtaaccttctttgccgaaacaatctgccggtgatcgagctgttatattgcccaagcctttcttgctggcctgcatgtagaaggtatgtaaccttttcatctcccatggtacttcgttcagtgcccattccggcaagagtgctttcccatgttcgtactcagccgggcaatcatcggttgtgaagtatgttggcccggctagttcagcggccttctgggggtcatcatctctaggcttgccacgttccttaccccctctgaagacggttaccatgaacttctccttgttctcatctttggacttggagtcgtggctcctaagcattctaggcacctcagaactggtagtggccttcttagggatagtggtctcttgcacctcggggtctttcgcaggagaagggtcatcaaatatttctggctttgtaccgtcccattccaatcctggtacttcttctatttcggatccgactgatgccacaaattgcacctctggttctgccactgtaatctccatgggcacttccggcactggaatctccatggctgcctccggcactgcaatctccggtggcacttccggcactggattatccttttgcatctcgggttcctccgccttatcagtcaccttcctcttaggaggtctcggaggttttcccaaccccggttttggcaccacaggtttttccgtggcgtcggtgcccaatccaaaggatatgtcattcttgtgccagagaattacaagatcgaccgcatccccaagtacggatacaccatctgcagtcgggaaatcaatgtcgtaggagtcaaacccttcatggaccacttgcggctacaccttggcatacgcatcgggtatgaactcttcgttgtatgttctcccagggatagcaatggctgtagcagcctcaagagttttcccggagcgtccaatgggaacatgcaatctgcagggcgtattctccttgaggtcatcgaaggggtaatctggctcaggttctttggtttcggggcgaggcaaaatcatgtgcttgacgcagaaatccatcatttgcctttcaaactccgcagccccttcgtctctaagtttatccttgtacgcttcacgcttcttgtgggggtcatgtttgaacccttccttccaactcatcttgctcgacacacctcgaacccttcccccatgctcaggagtacccagcgccgtacttagcacatctttctccctcttaggcttgaaaaatcctttcttctgtgaactggataaattctctattttatcagcaatgctctgcaactccggatcttcaaacgatacttttccttcatccgtgatcttaggagttctagctcttacccagttccttgatctttgtgtccattcctccattggtaccagttgccccttcttcctcatttcctcctcctcttttgtttactgctccacctttggtgcgtatcccgtggagcctaagcgatgaggaaatttgttctttttggccaaatctgcatacttttggctcctttgaatttcttccggggagttcttcaacgtcagaaagtcgtccaactgattcgaggttatgttggcatacgtcgaaaacggtgtgcgtcctgtcttgacaaatttcgtgttcaaggtggttttccaaccacgccaagacttggccattgtttgcagtgcacaattcctcactgctacctctgatccatccgtgaactggaagattttcttcaactctttccataggacttccttatccccattcgatacatgatcccagtccttcaccgtgatggggatcttttcccttactattatgccacactgtgaactgaatttcgcacgtgccgtcttaggggcgagcggctctccttttggcgaaacatgggtaacaacatggaaaccttcatcctttctattcacgcttctctcgcccttccttttcttcgccttagctgaccgttcgcttttctttgagccggttgtgttagctgttacctcgtcaatttgcgacggaacttttttcttcggctgccattttgatcgccgtggcgccgtttcctacgagaaggtatacatgacagtttcgaattagctcgggctaataattatcacggtgaatagtttacatattacgtttacttaccccttctttagggggaatgtagtctttgtcgccttcttcactgtcgccttttttccttctcttcgggcttgggcttggacaaggatcacttggcaacgagtactcatcgtcttcgtgagctatgtcgctgccggaactatcttctggtgggaccgttggttccgaagcaaccacaacagcaagggactgctcttgctcccctaaacccttctcttcagtccctttagtactatcggccatagtttcaaacctctaacataaaagaaaaagttatcctccacattttaaattactcaaattagtacaaacaactttaaattgcgaaattaattaccacttactattatgctagaatagatatgttattaattagtacttatgctattaattagtacttactattatgctaaattaattagtacaaacaaatttaaattgcgacatgtaattaattatacttactattatgctaaattaattagtacaaacaaatttaaattgcgaaatgctattaattagtacttactattatgctaaattaattagtacaaacaaatttaaattgcgaaatgttatatattagtacttactattatgctaaattaataatgctaaattactatcatccacaatttttttaaaaaaatgttaacataccctcctacatgttatttaaaaaatttgacaaattcacatatcatgcaaaattaaacataccctcccaatttcattcacatatcacccacattcccaaattcacattcaaaatcacatataacccctcattcacatatcacccacccctcatttccattcacacccacacgcacacacatatataccccctcacacccacatgcacacacatataaaaaggaacacccacatgcacacacgtccgtggacgacgaacgaccgacgacgagcttcggtcgtggacgacgaaggaagggccgacgacgaggttcggccgtggacgacgaaccggccgac

SEQ ID NO: 20740 - DNA, 2495 bp, Oryza sativa
gcctgcgaagatgtaaaccctactcggcataataatcttcgcaggcagaccggccgcctgcgaagatatttgcaggactgactctttctatttcagaattattttaaaatcatttttgtgatttgaaaatgtctacagtggttgtaataacaatggtaattgtacgtacaaatagataaaccttagtattactacttttcaaatttaaatattacttaaatgtttcaaacattaatattacttatatgtgcacttaccatttttttaagactttttaaaataagttttcaaacaatcgtaagtgaacataacaaaatgctactaaatttttaaacctcttttagaaaaaacttttaaaaaataaaaaactgtaaatgtcaccctacaagtggtaattgcacataaaattagtacaaactcatatgaaaaatgttgcgtgcaattgttcgtcaatttgtgatatgatcacacatcaccttacataccaccattacataactactaacttcttagatgcttacatgcactcaacaatcattaccctttaacattttttcccacaccgtccgtgcgcatgtaaggcttcacgatcttctgagtagatgtctcgacattcttaatcttctgtacaaactgattataaagtggcatactatcgtattgattgtaatcttcgacatcttcaaccccatccactcccaatatcttttgtttcccgggtagcactatatctttcttcaaatttgatgggtcttttacgtaaaacacttgtgccacgcgattggcgagtacccaagggtcatccttgtaacccacactcaccaggtcaaacgaaagtaagaccgaacttatcaacattgaccccgttcaggtattttacccactggcacttaaatatggggaattgcattgtgtgcccatagtcgatttcccatatttcttcaataaacccgaagtatgattgtttttccccggcttcataaattgcctccacacggacaccactgttttgcgtacaggtcttattatctcgggctcttgtactaaacaagtatccattaatgtcatatccctgccaagaatttactgtagttgatggaccacaagccaaccgcttcatagttatttcatcggtagtttgttcctcaggtaagtctaggtctcgcaaccaatctacgaagagacgcttgtgttctttcattatccactcggtggtgcgacccttattgttagctcgtattagttcgatatgttgatcgatgtacggctcaacgatagcaaactgatgaagcacgctgaagtgagcttcttggaatgatttgtgatcatgggtgacgaatctcttctttcctatcgttcccctgccactcaatctgccctcgtgtcagggcacaggtactccaattgcatatccatctttgaggtaatcgatacaacactcgacaatctcttcagtactataaccctcaaccatcgatccctctggatgtgcacgatttcggacataacccttcaaaactgccatgtaacgctcgtatgaccacatttgatggaggtacaatgggccaagcgcaaccatctacggcactatgtgaacaatgaggtgctccatcatatcaaaaaatgacggaggtaaacacatctcaagttggcactgtgtctcatgtgcgaatgtacggagatttcctaactcttcgagactaatgaccttctgtgacactgtgttgaaaaaatagcacaaccttgtgatagcaacctttaaatgctccggttttatggcccttattgcaattgcaagaaacactgtaagcaagacatgacagtcgtgtgaattataaccagataccgacaaatctttcattgaaactagtcgactgatgtttgatgagaaacctatgggcactctgacatcacggagtgagttgcaaaatgacttcttctcctcaagtgtcagtgtgaaataggctgatggaagatatactttgccatttttttctccttcttgagggtgtaactcttccctgattctcatctcgactaggtctatccttgattgcagaccatctttagtcttgttcggcatgtccaacaatgttccaactatgttgtcaaacacattcttctctagatgcatgacgtctatggcatgccgaacctccagatgtttccagtatgggaggtacttaaaaaatatggaatgcttcttgactgggggagggagtttatcatctggcttcgaactatcatcttccttcttactatccccttgtttcgtattcttctcgggtttcttgcgctttgtcccctttgatggtttcttagtcacttttccaaactcgcaaacaattttctctatcattgcacacaccttttctcccgaggttggtttgggtgcaggatctgtctcttcagtgccatcgaactccgccttcatcttgcggtacttgtgatttgtgcgtaggaaccgccggtgccgcatgtacacaagggtgcag

SEQ ID NO: 20741 - DNA, 12832 bp, Oryza sativa
aatttgacgttaagattttaaccctaggtgtaatacaattgaaagtatgtgtatgattttttctagatttttttgtgacattttttagttggtgtgcacgtgtgtgcacgtgagggcctgtgtgcataggatatgttgcctagttaaattgtatgcatctcacctatattgtctctcatttttcccttttataagacaacttcctgttttgatcgttcttattaatctgaacgaaaacagttcattacaaaaacgatgacaagcttttaaatatatgctacatacaaactcataatcacacctatccatttgtatgcatctcacatatattctctcctttttcccttttataagacaatgacaatattgttgttacatgttgatctagaaaactcaatctgttgtttattttacttcctgtcagattgtgttttcacgatcgatgaaattttcatggtttgattccctttatgatcatgcttacctatgtactactaatctcaaggtgagcacaaaaaacccgttttgttgtgtccaccatataccagtttgtatgcagattccagactttcagtctagaatttgtatatccttttgaacaggtaagcataatccatgatttgatgattatttcaaatttattactgattttttatttacctagctctagcttacgttttttttaatggtttacagctaacaatctaactgtctttgtaactctatatattgctgaacatttagtgtaacccagctttcccatatgcatcgatttggaaaaaaaaagttgctcacttaggatcttcaaaaatttatatgttacatattattttcaactaacaattatttgtagataaccttggcttattgattgcttttacaacattttacctcctgggaatgtaaaattagaaatggcatgcttctttgttaccttctcctatgatcatgttcagctgatttgctgccctcctcccttttccccttctactttgaatagctgaaactcaagctctcttcgactaacaatgaagacagataattgacctatgcttaagataatcatatactatcatcaccatgctgttgtatttggctaaaataccaggaacaagctccatagcttattgaattatattgtgataactacattagtctgtaagtcaagacataattccaagatatgatgcatctagccaaaaattatttgaatatagttgcagcctcttattcttatgcacgcgcgcagcgtagcgcgcgattattgctagttactctgaaacgcaaatgggaagtgaatgtgttggtgggggtcagcatgagaagataacactgtttaatttattgtatatttttgttgcttaattgaatgagtgcttggagcactcactaaaaccagcagcaacatgcatgctgatttggtagcaataattatgatagcggttttcaactgaattcctggattccagcagtttgtcatttgacagtgctagtaaaattttcagtggcatgtcgtatgttttccttcactccatttattccagggatctctatctggacatttgtacgtgcaaataaagaggcaaaacaggtctactgcaattgacgagcgtatgtgctgcatggaaatttagaaacaaatatgtgcagcaattgctttgataactacaatctgatcttggtcccgcagtttccacagaaaaaatgggataacttaaatccttatctgcttttatatggaagttgattccttctcttaattatttacctctcttattattgttatgaaaccggcggcacatgagaagatctaacccggttacccactaattagcccattgctaaatatggattctatctattgttatgcctaaaagtagaggggaggttgaattagtgaatgagaaagaagtgacaccctcatatcttgtatctctttttagatattatacaacccctctgaactacacgtgtacattggttgcataataattatctcaatgatatatatgtgcatcacgcgtgaatatgtcatatgctttgataaagtaagaaataatgctcctttcatccaaaagcatatttcttttgtcactaaaactacagaggaattaacaaatcgaccatgtaacaaaactaagaaatcatatttatacatgcaatcactgagtaataagatatctctctttgagttaaaaaaattaatttagcacggcttatactttttgaaaatcagaaaatgaaatatgtcttaggctgttggatggagggagtatatttataaagctgtagtaattaagaattttacaggaaatcaactgacatgaaaacaacgtacattaaaaaaaaggtgtcttgctcactcctcactctaggcatgttgttacttgtttctatgtgctttagttagttcatatcagttattagttctgaatgatatgctacttcaaaaagaagaacaattaacgacctccaaccatccatccatccatgcatcagtgcatgcatgttggtctttagtggtcaacaacaaccttctagcttgctgattttattatatgataaactgttgctctgggtgctgcatgcttaaccataacataaacaaattcagtgccactttgcacatactgccagacctttttttagaacaattaatgaaagaggttagtgcaagaaggaaagcaaggtagctagtagttaattccagttgaataaagaggtgtcatctattaattggttcatgcatgctgccgtgagaagggaggacaggaaattcggtttgtaaaagttagtctagcaagtagcaattgcccacaaatataagtacaataatatggcttccttcgtggcagtagctgtgagagtatatactgattggctcaacatgtgtaccatgctttaatttgctatagtcatatcccaccgagagtgtgtgcctcacgatcaaattgtgtacgtacgttgtatatataacttttcatatttatgtacatctggtttgggaatatgccagtcatgtgtaacagtttcttccatcggatctaatgacactttggagccagtcttcactcgtgcttattcatatatttatattttttttattcaactgaagtggccgtccacttggaacttgcacttagagcaagtttaataatatagccaactactagctagctccaaaaattaacacatcattcatttatagctaacttagtatatagcctactaatacaatagttaattatagatacatactacaccaataatgctttccccatatttctctctcacataggttatcagagtttgtgctatagttgattataaatctgtagcccacttttactctctccttcacacactactggagaactaatctttaattagctcggatgccaaaaacatatttgtcccggttcgaataggaaccgagactaaagattatatttagccacggttcgatagctgtcaggccatgtcagacccccaacaatcattagtcacggttggcaaggtgttaccaactgagactaaaaattgatctttagttccggttagagacaccaacccagattaaagataattttagtcctggttggtgttaccaacctggactaaagatgcctccacggttaaaaaagcatctctatccaagttagatgtgtgtagtagtgggggtggtaacgcgcgtgagggtgttcacggctattaaatgccaattctatgccgccaatacctgcataaaacatagttaattaaacatccaacataatgataggatttaattctaacatattcaacgaatgttggtgcatatttggatgcaggtactaaaccgtcaaagttgggaggaaatttagactaaagtgaagaagaacattagaaaatgggcccaattaccgagaaatggataaggcagagcgaggaggaggcccagaccaaatctaggagccatctggcccagcccaggttcggtcaaacccttggttcggccgaaccttggtgatcgccattggatccaggttttggtatggacgctccagatgctctcctgatggcggttgcgaggcaattcgaacaattcccatagttataaccgccattacctgcctataaatagagctcccattctcacttcactcacacactccaagcttgagctgaattataagagactctattgtactttattgtatactagaattagggagagagtagagtagaaaaagtcggaggaattccaaagttgtcagtaatcctctcttatttcgaaactcgagttaaattttaactcatggtgatgtggacgaatctcggacgtccatttctcgatccaactgtagtttccaagtttcgactacatatgtagtttgcactgtatattttccctaattactctgctttaatagaattatcattctgagaaattaagatttgctcggtgagaattaactcttggttagttcctaattagcatgcggtatcattgatcactatagttcaataaaatatagtggctgctttagtgtttagctagctctaaaatagttattaattgcgttgacgtggtgtccaggtaattaattgtcggtggttgtttcgtatcccacggtaggtttgaggtgggtgtagaggtagtgatagccctcaattacactgaagttctccctgtccgggtatgcagtagagcgatatttgagagcagcgggctggccaatacctgaagtatcgcgttaggattaaactgagttttacgtatatgttgtttttcgctaggaaatcctctctaccattttcctacatgtgcttctcccttggatgaacctaaagagtatctgaatacacacgttgcctgaggaaattgataccttggaatactcccgggtgaagtgctacatcggtatcttccgtgcgcttgcagattttatctgtgacattaagaaataccaacagagggctgaggtttgagatctcgagttcaaatcccacatcccagacattttttttgacttggtatgcatctttactcccggttatttcaaccgggactaaagatgggcatctttaatcctggattgtgtgtcccgtttgcacaaccaggagtaaaaacgattgcaaagcgggactgaagtccctttcttcagcagtgacatgagcaaaaatacgatgtgacaacatgtatagcccacttatatcatcctattatacgcgctcttaatttactagtaataaagaatcaatatgttgtatgcatctaacatttcgtttaatcccctttcatgccctagttccagatttgaggaatcaacactatgacaaaaacctccatttgtagaggcattttgtatattgcatctaaaatctggagttttaaagtgtggagacacattttataattatttaaaaatttacaagaaaacttttactctaaagacactcaacatttttagtatatttagttaaattttatcttgtagagatattattttggcacaataaaatatgtatggcatgtaaaggtattttcttaagccattttaatctacacttgttagaataacaatgtatgccaagagactagatataataaattaaacaagtcacaaacgtacaactaataatatgaggttgagttagtgcattgaagacgatacggtttgccaaaggatttctgagctcaaggattgttaatagcaagaaaattatttcattcttttttatacattggttagatattggtttcacagctaaaacgaattgtcatatatataagaaaacaaaatagaaattagagggcatgcatgtagggggatgataaaaaactactcaaggatatagtggggatcgagtgagaactgagaactcaagagtgtagatataattttttttgttactaatgtacttactctgtctcaaagtatatgcatttttagcatagtgtcaagttaaatatttttaactttgactattaatagaaaaaataaaaaaaagattaatcatgtaaaattaatattattatatttatcattaaaaaaactaacataatatgcaactctttttatttaaaatatcttacttttataaatattattgatcaaagtagcatctcgaagactatgtcgaagaaaaaaatgcttatattttaggacagagggagtaggttttattgatgggattgaagatataattaagcaagtgatcgaatatttggacgataaaaaattattccataaagaatttatggaagatatattgacgtgacggcaaagtgttgaagcagcatttgtgggagttgtctattttgccccatgcatatgctaatccaatccagtggctagctgttatagttgttgtgagccaggccagacatcaacttcaggtgttatggtcaaacatgcacgtctatctccatggagccaaaccttccaactgccattgatgttgaccatacatccaagagaagccatggactttgtactagtagtaatcaacaataatgttaattaggtcactatcaaaacctaactccggctgggccggcatgcgaacacgaggtcgatcacacggatgcctgcatcactaagattctcacaggaaattaaggccaagttaagcaaataaaagccgttattggccgcatgcatgcagatgtcaccgttgcctttgattgctcgtatctccttttgacgctgcaaccgacactgacagacacgtctcgtttttgtactctctcttcttcattagcgacatataactaacctttccccccgtaagtacaactccctccgtcccaaaataagtatagttttgcattatttatgttcaattttaaccgttcgtcttatttgaaatttttttatgattagtatttttattgttattagatgataaaacataaatagtactttatgtgtgactaattttttttaaattttttataaatttttcaaataagatgaacggtcaaacgtcggacacggttcctcacgactgcacttattttgggacggaggtagtataacactcagtttggatttataattattggtttaccataatctatctcgttactaattaatgtagtaccatacccttggtgttaccgcttttagacatttcagctagcttttggtaaactgcaaggtttatatatgacaaaataataatattattattatatattattttaaaaatattggacaattcaaagggatctttatagttgtacaccaatttcgatcacttaacttgatctgttaaaaatttatagggaatttaagctattcattttcatatcaatatcaaatagatagcgtgccataggttgtgttcagcacacagggttgggaacctttccttcccctgccacgtacaatggtattattgtgaataagcacatgattaattaagcattagctaaaaaatgaaaaatagattaatatgatttttcaaaaccgataactttcctatattttttttcttttgcaaaaaacaccctaagatcgaggacaatcagttggtcctaacaaaaacacataacaaactattgatttaccttattcaaagaaaatacattgggttttgtatgatctacatggtttactgtgaattatgactttactgggtatttgaattcggatggatagattccatttaaggaaacttgttgagcttagctagcctaagtttgtgtcaccttaccaaattttgccaaagaaaaaaataaagcacaccctagacatgccaactatgcaaaatttggtagctctgacaacactaacatttaggccgaggttagttccaaaatttttctccaaacttccaacttttctatcacatcgaaactttcatacacacataaacttccaacttttccgtcatatcgtttcaatttcaaccaaacattcaatttagcgtgaactaaacacacccttaacatgaggtgtgtacaccactctaaagtgaggcaagtcattaattagaccaaaatataccttggcatacctatccacttttccaaaatttagcaacttggtgtggtcgattttggcaccaaaccaacactactggagaagaggtctttggagggtcggccgatttccacaatagtcccggttccaaaacgaaccgggactaaagtggcttattagtcccggtttattactttaacgggacgaagggatctttagtcccggttcgcctcctgacagggcatgtcagacctctgtcagggggcttgggatctttagtcccggttcgtgttaccaaccgggactaaagatcatatctttagttccggttggtaatacaaaccggaactaaagtgatttgagatctttatgcccggttggtgttatcaaccgggactaaagttgcacagctttatataccccttcttcctcctccagcccgagccattgcttcaaaattaagctttgagggagggaggtgctgccaaaattttaagcaaatatttttggtggtaatatacaaatttgaggtcttcaaaaggttagcaacttcatcctactctttcttttgcttagcatctacatttggagctattttttttacatatttttccctctagaaaatgtgatggaagatgatgagagagaaagtgtgtgtagggaataaagaagattataaatacttgtttgactaattacatataattttgtatgaaattataaaactaagctaatttaatattaaaataagaaaaacatattaaatatttgtttataatgtaattaaaacatgaaaaatatgtacaatgaatttaataataatgattaattgtatgaataattatattcaattattgtattattatgtaattaccttttaaatcttggattttgtataattacgatttatatgtatttcatatagatggatcggcaacggatgtacgcggatcggcggtcgaaagtgtttgttgacggcgtgcattattttttgggtgtggccaatgataacaagcgtaacggttttataagctgtccatgtgacaagtgcaaaaaccagaaggagtattccaccacacgaactattcatgcctacctgtttcagtgggggttcatgcgtagctacaattgttgacctcgcacggagaggttggggttgcaatggaagaagatgaagtagaagatgagaacattccggactgggctcagtattgcggatttgaagaaaacacaatgggcgaggcggagctggatgttgaagggaatgacggtgctgatgaacttggtcaaatattgcgggacttacaggaggactgcgaaagtaaaaaggaggtgcagaaactggagcacatgttagcggaccacagaacagtgttgtacccaggttgcgataagggctacaaaaagttgagtaccatcctagaattcttgcaatggaaggctaaaaatggtgtgagtgacaaggcattcggcgagttattgaaactcgtaaagaacattcttccggaggggaacgaattgcccgaaagtacgtacgaagctaagaagacagtctgccctctaggtctggaagtacagaagattcacgcgtgtccgaactactgtatcctgtatcgcggtgagtacgaaaacctggaagcatgccctgtttgcaaagcactacgatacaagataagacgagataatctaggtgaagttgacggatagcctttgaagaagagaattcctgctaaggtgatatggtatttccctataatatcaaggctgaagcggtttttcaggaacaaatcacatgctagaatgatgcggtggcacgtagaagaacataaacaggatgggatgctgagacaccccgctgacgggtcgcagtggcgaaatatcgacagaacatttaaagacttcggcgaggatgcacgaaacgtgaggttcggtttaagcacggatggaatgaatccgtttggagagatgagcagtggccgtagcacctggccagtcaccatgtgcatctacaatcttcccccttggctatgcatgaatcagaagtacatcatgatgccgattattattcaaggcccgaagcaacctggtaacgacattgatgtgtacctaagaccattggttgaagatctgaaagtgctgtggaggaaagagagcgtccccgtgtgggatgaggacaagcaggagcaatttaacctacgagcgttgctattcgttacaattaacgattggcctgcacttagtaacctatctggacaatcaaacaaggggtacaatgcttgcactcactatttggatgaaactgaaagtacttatctgaagcattgcaggaaggttgtgtacatgggccatcgtcgattccttgctgcaaaccaccctgtacggaaaaaaggcaagcattcgaacagaaggcagaccatcgtactaagcctaaacatcgcaacgggaaagtagtatttggaaaggggcctggcagccaacctatagagagcgaagatggtcatgcggcgatgtggaagaaaaactctattttttgggagctaccctattgggaggtcttggacgttcgccatgcaatcgacgtgatgcacctcactaagaacctttgcgtaaacctgctgggcttcttaagtgtatatgggaagtccaaagatacactcgaagcacgcaatgatctcaagcatatggaacaacgcgagggccttcatccggaaccgaacgagaaaggaagccattacttaagtccggcgagctacaccctaagcaaggaagagaaggagagtatgtttcaatgcctaaagagcatcaaggtaccatccggatactcctcgaatgtaaagagaataataagcacgaaggataagaagttcacaaacctaaagtctcatgactgtcacgtgcttatgacatagctgcttcctgttataatttgtggtatccttcctgataatgtgcgggtaacaataacgaagctttgtgctttcatgaacgcaatttcacagaaagtcatcgatccagaaagtttagccgcccttcagcatgacgtggtgcaatgccttgtaagctttgagttgatctttccaccgtcattcttcaatataatgacgcatcttctgtgccaccttgtaaaagagatcggtattctcggtcctgtgtacctacacaacatgtttcctttcgagaggtacatgggcgttctaaagaagtacgttcgtaaccgttctcgtccggaagcaaacatcgcgaaggggtatggaacagaggaggtcattgagttctgcgtagattttattgaagacctcgagccaatcggagtacccgaatcattccatgaggggagactacggggaaagggcacacttgtaaggagagcaattatgactgtagacaacgatttattccgtaaaacacatttcacggttttgcaataatcttcgttggttgctccttacatcaatgagcaccttgcgattgttcgctcagaaaacagtggcaagtctgatgcctagattacacgccatcatattgatactttccccgcttggctgcgagaacacctcctgggtaacgagacgattgaccgacaactagccttcttggctaggggaccctccggctcggtaactacattccaaggttatgaaatcaatggatacactttttacacaagagcccaagagaaaaagagcacgaaccagaacagtggtgttcgtatcgatgccataggacacgatggtccaactagcacgtattacggtgtcatcgacaacatttgggaactagagtatggacccctgaaggtccctctgtttctgtgccaatgggttaggctgactggtggaggcgtaacgattgatgacagcgggatgataacggttgacctaaacaaggtaggatactcagatgaaccattcattctagccaatgatgtaacgcaagttttttacgtgaaggacatggatagcaaaccaaagaaggggaaagggcccgatgagccaagacgccatgttgttctcccaggcaagaggaaaatcgttggagtcgaggataagactgacaaaaattacgatctgtttgaggggcaacctccgtttgcagtgacggttgacccgagcatcatactatcaaaggaggacacgccgtactcacgcaacgatcatagcgaaggaacaatagtgaggagaaagtacgtgaggaagacagtgacctaggttgtttgatggaagatgtaaattatttgtattgtattgaaggtcgaacaatttggatcaatatattattctcaactgcttaatttgtaatgtattactatttttcaaccatatgatatttataaatggttacttccatttatttacactttgaatacaattaattaggcaatatgttatttataactgattattggtatttatttccactttgaaaacaattaagtaggccatatcttaattataaatgataatttctatttatttacactttgaatataattaaattggccttatgttaattataaatgattatttctatttatttataccttgagaccatttacttaggcatatcttgtttatttctatttattaaaattttgaaaacatttaattcggccatacgtaaattacgtacgattttggtatttatttggactttgaaaccatataaatcggccatgtgctaattatattggatttattggtatttatttcgacttgtaagacaatttaagaaggccataaatcggttttgtgtacacatctttagtcccagttattaacagtatccgggaccaatacaaattttggaatagcgggaaaacatcttttgtcccggtccgtggcttccaccgggactaaaga

SEQ ID NO: 20742 - DNA, 5193 bp, Oryza sativa
agattaccgggtataaatatccactgcatcggcttccccgcgccacacttagacttctccacgatcgatcttcttcctcccgcgccattaccgccccagacgtcaccgccgcctccgccgtcatcatcgtcatgctcgccgcgctcatccgcccttgcgaacgccaccggcagcgttgccttcctcaaggtgaggggcgcaaatcttacgcctccgatctcgcactctctctctctctcgatcgatcttgacacgcgccggccgaccgaacctcgccgccatcgtcgtcgccgactccaccgccggccgccgccgccgccgcgcgccaacaccactgccgccacgcgccgactccacctccaccgccgccgccgccgccgcgcgccgactccacttccaccgccgccgcgcgccacctccacctccaccgccaccgccgccgctgcgcgccgactccacctccgccgctgccgcgcgccgactccaccgccgccgccgccgcgcgccgactttacggtggaacgtttgaacgagaacgttttagcgaacgacgacttagcgacttagcgacttagcgagaacgacgtcttagcgacttagcgacttaacgactttcacgaacgacgacttagcgactaaacgactttcacgaacgacgacttagcgactttgacaggcaacgacttagcgacttagcgactttcacgaatgacgacttagtgactttcacgaacgacgacttagcgacttagcgactttcacgaacgacgacttagcgactttgacggacaacgacttagcgacttagcgagaacgacgacttagcgacttaacgacttaacgagaacaacgacttagcgaattatacatgtatacttgtagggtttagatgtatgagctatacatgttgatgtccatgacctcaccgtctttttttctttgcacgcacagatggcagaccgcgatgacgaacaaatcctgttagacacgatcgcagagggcagcagtcagtactgggtggatgatgaggggaacgaggatcccaaccaatacctgaacgaggagggcaacgatgagggtaaccaggaggctaaccaggaggggaccgaggaggggattgatagtcaaccgttggccggatagaagaggccacgcgggaaaagaggtcctgcgaagaagcttgagggaaggcacatcgttactgagattgccccagacagtgaaccagtagccccagcgggtataggacgaaagtttgtgaatcattgtggttgggtcgtgagagacaacgtccccatcagcatagtgtactggcgtcgaactaggtcacgcggggatgaagatagctttctccctgacacagagaaggacatgttgtggaccaccatgctggagacattcacgatccctgaggcagattgtcccagatgcaaagaatggaccctaaagaaaatggcagaactattccagagctacaaatcagatctgtacaagagatacatcctcaagggcttgacacctgatttcaacgtgcataacaagcttagggatcactaggatgcgtttgtggcatacaagactggagcgcaagtgcaagcacagatagaaaagaacaaagccaatgcagctaagaagaaataccatcaccggcttgggtcaggtggatatggaaaggcaatccccaagtgggacaagttggaagctgacttgatagcaaggggtatcgagccggccatggctaattggcctgagcgatcgaggaactggttctatgcacagggtggatcgctcaatccaggtgatggctccctcatattcagcgatgagattcgagatgtagcacgccgacttgcggatgcaattgaagcctctacgcaggggactttacggcccgacagagagaaggatgagctcaccctcgcactacagaatcttgagcatccaggacgaacgcgaggaaaaggcgtccttccttggaaatatggattcaaagaggacatccacacgtataggagtcggatgaggagcaagagggatacagaggctaagatcgtcgatcttgagtacagggtgtccacctacgaggcaaggatgcaagaggaggtgacaagacaggtggaccaatgcctggccgagtagcgcggaatggaaacacaagcgcccgtcatggtgagcccctcgggcaaccgcagcagctgcgcttcaatgggccaagttggatcagagggcattgaggcagtggcagctcacgaagcaacctacttcccggttgatgatatcacgcagcgaacaccctgcgatatgcatactcccttcaggaacttgtctatcaaggtatgcgaaatgcgaaatttgttacatatatatgttgattagtaattaatgaactatatttcttatgaaggttgcgtcgggcatggccatacccacggacccttcgagtacataccattgcaggcccattccacatggatatgcgaaggtcgagatagagctggtggaacgaacctacgaggatctcgagcttgacatcctcggaggagacggggagaagaaacttggagacacagcccacgccatcatactctggcataagaagtacatcgtgtttcccgggcaagaacggccgcccgctcctccttcccggccgcaagcatagtctcctccgccatcactgcctcgttagtctcctccggctccttcccctgcaccaccacctcctccgcgtgcaccagctgccaagtctacaccgtcgggcccgcgggcaactactcctccgcgtgcacctgctaccaagtctacaccgtcaaggtcccgcccatatgaacccgcaccttcaaggccgaagaagaaagccagatctgacgagccacggctccccgctctcaagaaaagggcgtacgacttgactccggaggagctcgatgaagccgttagagcagaagttatggagcagttgaagccacgtagtccggaaaagaagatccctatagccccggaggttgaggatcactttattatgatggccgaaccaggcaaaccggttgaagtttctgactatgatcgaacattgaggaaggctcttaaagccaagccttcagcagtgaagtgtggaaaggaagtccctcagctggggcaacagccacgacaagaggttgaaccgttaatcgtagaaccggcacaactagagatatgcaacttcttgaaagatacgggactgagtatggagcagttgctagaggacgcacctatcgaaacggctccggtcatgtacacgtttaaactcggtgaactgctagtcacgcctgataagatcagagagctacctacacagatgtaccggttccatcaatggtacatggacaaatcagggatgggtagagagatgttcggagctagggtgcgaaactcagattattaccaaggagaagatgttatttggatccgctacaaagaagtcttcgacttataccacctgaaggccctcgacgtctctattctcagcgcgtggactttgtaagtactgtttatagttcaattttgttcctcatttgaacgttgctcacacacattccttttccccgttgtagaatggagattcagttatgccgtcaacacaacaaattcaatactggattcgtggacccatgcaaagtgaacacgctgatgatacaacaatacgagaaacaaactaaggacaatatcgtccatttcctggtgcagcagcattataagaggttcatactacttccctacaacacatcgtgagttcctacaatcataattaacttcaattttgttcctacaaagttcctacaatcatactatgtatcatgtaatgcaaattgcagattccattgagtccttcttttcgaccttgagaaatccaaagttcatgtctacgattcaatggataaaccggagaaaacttttgcaaagattttcgaagtgatagataggtattgtcatatattgcactgtcattatgaatcattgtataactactagatctcggataataaattaatccttcctaacaactctaaatagagcatggattcggttccgtacattggtccgcgggatctggaatgaaaaactcacccggaggttcaattttctggttagtacatgctagctccaattttgtattgaatcattctttgttctaaatcagatatgcatactaaatctcttgttgtttctctttcagtgtgcaaagcaggaaaaggggactaacttgtgtggctactacgtatgccattacatgcactgcttagcacaccaaatcaggactggccaggaccttgaagtacgtaaatttattcttccgtcaattattgcttactggtttcatatatataatcccgtttttttccaaattacagatgatttacctgatagataacaccacccacgatgatttcataagggctgttcaagaacagataatgggattcatcaacaagcatattctccatcccacaggagaattctattatgatggatcgactattcataaagccggtccttcttcttcctatgtcaccaagtcgtagtagcaaaaacaaagattacaacgtccaaacgaattgtaatatatatctatatattcatatatgcacacatgcatttacttttgtgtacttggtttggtaatatatgtgtatatttacttacttgcaaactcatattttgttaacatatatatgcatattgcctctaattacttaagtgcacacatatttgtatatacatacatacatacatacatacatacatacatacatacatacatacatacatacatacatacatacatacatacatatatatatatacatgatatatattcatatatatatatatgtacaccaggcagcacaatcaaattaaaaaaagagtaaagtccatcgccggtccctaaacttgtgccgctgtgtcatcccggtccctaaactcgcaaatcgaccgttcaggtcctcaaacttgttcgactgtgtcatctcggtccctcagatcactcgtttaggtcctccaacctgttcagttgtgtcaccccggtttctaaacttggatttgaatattatatgggtcaaataggacggtcaaaagactttatattttaaaatatataattcattaaattttcatgtgaactctaatgaagacaaactttatatcaaacttgta

SEQ ID NO: 20743 - DNA, 2297 bp, Oryza sativa
agttttgggaagaaaaactgttggaagttttctagcaatcccctccaacaacattgaggcccatcaactcacaatgattgcccatcaacagtctggttttcactacacatcctccaatttcctgtcccatctccatttcgtgggcctttttatttcttgtttctggattgcaaaaagtccatttggactccctcaaacataggtcaaatatgattcataccctctgccgtaatatcctatatattgaccttccaaatattaacaacagtgtaaaataaactctctcgatggctggaaggaggcaagcaaatgaagagaagcatggagagccaactacaagaagcaaagctttgtaaactcgacaagtctcttatagaatgcggactactttttttcaaaagaggggaaacaaaacttaacgagctttaattggctgactactacataagccgttggcggagaaagctcgaaccttcattcgtagctaagccaaggtttcaggtctccaagtcagcccatgctttttcgaagaatcctacacccatgagcatggcaggccttccctttgccggagcttcatgggcgttgccccggggatgactgattttgtggtttaggtgtgtaattcgtacatctttataatttagtggtatttcagatattttcctaatttgattgtgaaatgtggttcaacattattgaaaaagtggtttaatacaaactgataacttacagacggctttggaacttggaagttaattacacatagatagataagcataagccaactagtgttgaattaatggatagtgggcctaaactccaggccctcaacgatgaggccaattttcttgacatggtcgttcacctcgcggaaatccaccatcaccgctgcctccgtgagcatcctctcatcgttactgaattctgccagcttcacctccatccagccgtcgtccctctcggtagggtaggacacatcggaggctccgctgcgggctgcaggatcaacactaacacggctggtggcgacgaccctctcaccacagagccgcagagacgacgtctaaacaccttgcaggccactggtgccactggttagattgtacactaggtaggctgcatagggtgtgtcgatgactgccaaccaatgcacgtctagcagctccgcgcactcggcgaatcttgtcacccagggtgaaacgatagtgagcaatctaagtttagattttgaagactggcaagtaaaattatgaattttggaaggtcatgttggtaagcaaacctagaattagggagggagatccatctccagtgtccgggcgtatctccccacgttatccttaatgatcttgatacccaaaaaatctgttcacattgatcaaatccatgttgcaacatttctaattaattaattagtagtaagtaacttcttcaaaattccggcacacaccttgttggttggtggtttggacaatgatggaactggtgagaacacttcgtatcgctcgactcgagttgatggttgacgggaaaaagttacagccatcaacttcaagtcattcatcaacttggagataggagtagaacttatctgcaacaaaatagaaatattaaaatacattatatgaaatcaacgaggctctgatcctgccgtacgtacgccatcaacaaagaatgactttattatataacgtaacaacgaaaactataaatatatgttctattaatttttttgttgaaaattaattagtttaacgccaacacaaacatatggtagttaaaatgtctgtaaaactagtaatttattgttaaaccaaaagctaacatgtattgagtcacatcaccataaaaattttaaccattggagtgctagctatagtgctaggaaaaactgggtgatgatacgatatacttgcatgttgaattttaggagtcagtgggtatctaactttatagtaacataggatatatgcttaaatttgttatacattattttgtaaaccctgaatacccttgctgaaaatcgtgactctgccatatgcgtgcatacctgcgctagcacaaccgaacaagttgcatggacagtttcagtctcctcaagcttatggaggatttcgagggtagcaggcctgttgtccagattagtatcaggaaaaaattttgaaattatactatttatcgattgattgtgcaaaaatataccggatagcgaacgatttgcggaaataaaccatcggtatcgccgatgttcgctcctggaaagtgcgatagcatggcgaaatcgctatctgaaa

SEQ ID NO: 20744 - DNA, 672 bp, Oryza sativa
cccaacaacggcggcataataagtcagccgtgcagccggaaacaccagtcggcggcagtcgaggcggccggtcggtgaagacgtagacgcccaacaacggcggcataataagtcagccgtgcaggcggaagcaccagtcggcggcggacgaggcagccggttggtgaagacgtagacgcccaacaacggcggcataaaggccagccgtgcaggcggaaacaccagtcggcggcggtcgaggcggccggtcggtgaagacgtagacgcccaacaacggcggcataaaggccagccgtgcaggcggaaacaccagtcggcggcggcgaaggcaagccggtcggtgaagacgtagacgcccaacaacggcggcataataggccagccgtgcaggcggaaacaccagtcggcggcggcgaaggcaagccggtcggtaaagacgtagacgcccaacaacggcggcataataggccagccgtgcaggcggaaacaccagtcggcggcggtcgaggcggccggtcggtgaagacgtagacgcccaacaacggcggcataaaggccagccgtgcaggcggaaacaccagccggcggcggcgaaggcaagccggtcggtgaagaggtagacgcccaacaacggcggcataataggccagccgtgcaggcggaaacaccagt

SEQ ID NO: 20745 - DNA, 1946 bp, Oryza sativa
  unsure (1)..(1946): unsure at all n locations
ttacagaagtaattaagttgcatgggctatatgttctcaatatcaatcctttgttttcttttttgcagcttgaatatgtatatgctctcctaagacttgaagaatataccaattgaataacttgaatttggaaaaaaaatgcaagagaatgattgcccactaactaaacatacctggcctatagatgttacgttctgggtgactgtgcagcatcagagccatctgctgatgaactatctgtgtctgtatctgcatatgcttctcacggtaaatttcatatgttatgcagatgtatatgaaaatatcctttatagagttaattgcaaacagaaatgctgctaatataaatttctgcaaaggatgagagcatttaccactagacgaagagcctgaatcgctactagaacttccagaactacttgatctacccgcattctcccccttctgatcttccaaatgaacaggtgatgatgagcctacatacctctcattatcatctgtaattgaacaaacttagctgttatccttaaactggtaatagagctaggtcacaaacacaattttacatttagattaataataacaattataaaacatgctccaaaaacacagtcgcctacctgctgtgttttctttaggtggttcgatatcaattgattctggctcaggattatgtaactgcagggaaataataagtaccatattgttaatatcacagtataattaattcacaacaattacatcatccctaagaagcataccgtctcttgtactggaggcatctgatcctgctctacttcatccaaccttgcatgctctgtcttctctagctctatatcatgattcatctcatcctgccctgccacgggattctcagccttccgcttgttcttgcttatactttttttgtagtttgtaacaaacctatcgagctcccataatgtctcaacatcaaagctatctatatcaacctcaatctcatcatcatgctggctgagtgacaagtttctcttctttataatctgcacaacattgtcaagtttctctggtggcaactcctggagattattactaagccgctgcttctcccagaaggtcatctccctcttattaggctcccttgccttgggcttctttaaaactgggggccgaccagtgttctgctttggagtggcctccatccccgcagcatgtactgttgagtccgacctctctaacaccttagaattatctatctccttcggcttcctgggtgcagccgatgatggcgttggcggctgtggtgacagctgtgctacctcggcctcaatttctggccacttctcctcaaacatgttcaacagctgctccgccatgaagtgcacatcctgccctttggggttgtacctcatggcattctgaaaggtaaggcgcacgtcaccggcgaactcccgcggcgacttgtagtgcccagcggccagccgcgatttgacagtgccgaggtccatgggcttggtgatgatggtgtggtagtcgtggaggccaagcgcgctggcgtcgacgggcgtgttgaacacccagctgtgcttgtgcttcatcagcctagcgagcagcgcgccgcagctcttgaacacgggcgcgtagagcttccgccgcgcctccgcggagaggcccgggttggaggaggggttccccttcttcgacttgtgcttggagaccggcgggtgcgggggcagcggggtggaagggtcggtggcggagagcgcggaggaaggcgcgggggccgggagggagctgaggcgcttgcaagtggcgcgcacctgcgcgagctcggcggtgagccggcggcggagctccctgcgggcggccggcgaggacgacagcgagaaggtgacggtgcggacgtgcgtcccgttgtgagcatcgaaggccgccgngacacccccgccgccccgcccgccgccgcc

SEQ ID NO: 20746 - DNA, 2774 bp, Oryza sativa
ggtgggaggtggtggggcagggcaggcagctgctactgttcgttttttttttttttttgccttttccttgtctgaaacgtcttctttaccatcctttttccctgtgctctttccattgatggtaaaaacttctgttcatctactgtttcggtttgcactgcgttcttggagctttgagcagtttgggtcaggggtggaccggggaagacaatgtgcttttctaggagtactttggagtgggagttacttgccaattgttgaaatgcaaggtcaacactcaatagtaagggaaaattggaaccatgccattataattttacaaaatttaagatatgccatcctgacccacatgtcattgagataccgatggcatatatcaaactttgtaaaattataatggtattacatttttttacccatagtttaaacctttagtttataagcataggtgaaattctgaatttttaaaaagtcccctgaaattgagttttgggtttcaaaacatttaaaaatttgaatttggaaaaaaaaagttgatttggggtattcatcttagtttattttctagtatttatttttaaatcactacaaacaagtatataaaaatttacccatcaattgatttttaattgctaatatccgctcaatttagaataagtataagcgaaattgtgtgacatgttgaattgatgtatggttgttttaaatgtaataaccactgtcgttttaggttttaattttttttattccacgaaaagacacacgtacacacaccactgcaatgtatgtaacacatttgttcttaaaaaaaagtgacgcattcacatatgtaaatgccctcttaacaaacatttaaagagataaaaagaaaagtcaatatactaagttcactgagttcccattaaaaaaagtgtaatatttgttggcattagaattcaagtctcggtagaatggtagatatatatgtcatgcatctgcaattttatcaccatcgtaaaatagtgctttcgtgggttatgtattatgtactagtattgcagaattaatgtcctatattgtgttttgcttatgaccaatcgttatttaattttgtcaccacagtatgaagggattaagggacatgacaaatatccttactcaagtctatagttacaaaaaaatatccttggtttttggcaattaatagaagaattttgtaaaatacacatgattcgatagggtaaaacacgggtaagaaatattttgaaatgggaacagtattttttattttaaaaattaagaaataacattttcaaatcatataatagttcaattaatagaacaaaaggagttgtttttctattttaaatcattgcaatttgaactgaaattatcaaactcgccacctcttgaggtgtatctatatggcttcataacctagaaatactttcactatcaatgacatttgaaatcattagaaagatgaaaatgatacacatgaccttgtcttgagaagtggacactttcgtattctcagaaacttgttacttccttaggacataaacttatgttctccgactacttgttcttttcgacgtgtaacattgatcaaatattttattagaataaggtcataaataagaagtctaagatatcgtgaaaatattttacaggagaaatctacaaatatcaattttatgttatgaagttaagtgtttaaaaaaattattgatggccaaaatttgatagaatctattccgaagcgtccaatgtttatgaccggagtggatagattttacgaatttattctaatatgaatttatggttgaatacttaacttaaaatccaaggaacctaaaaaaaactagaagaaactagtactaacaaaaaaaacactctcaattataggaaaactaattactgactactttctccatccaaaaaactcaatctagtctagcatattatggaacaatgaatctagataaaaccttacctagattcgtcggtttggattttttttatggaaggagtccatcagggaaatgattttcttaagacggaggggggatttggagattgcttgatccccatccgtgtgattcaaaccgatcccaatcaccaaactgcgccgccggccgccggaatatgcttgtcactgtataacagctcaccgctcgtcactgacaacggcatcttggactccttggaggcacgacaaatttacaagtcagttgctgccactgttttctataaaatcaaaacttgcacggaagtgaagtgaagcgagatgggatcttgaagttgaagacaaggcagttgttcagtctcctctagcacagcactagcgagtgactgccccaggcggatattctgaatccaaggaggaaagatgaggccgcggctggtgctcttcggcgactccatcaccgagctctccttcgccgacggcggctggggcgccgccctcgccgaccacttcgcccgcaaggtacgccacccttccctcctcctcgcgatccggccgctgtcccatccccgcgacacgcgtacgtcaccgtttctttggataggccgacgtggtgctgcgcgggttcagcggctacaacacgcggtgggcgctgcgggtgctggcgagggcgatggagggcgcggccgccgccgcggacccggcggccgtcacggtgttcttcggcgccaacgacgcgtcgctgccggaacggaagcaggtgcaccagcacgtgccgctcgacgagtaccagagcaacctccgctccatctgcgcctacatcaag

SEQ ID NO: 20747 - DNA, 14465 bp, Oryza sativa
  unsure (1)..(14465): unsure at all n locations
catatttggtttatcgggtatatatccagtcaccacttggtggcccttagcttgatctgaagatccttttttcaagttacaaataaaacagtgtgctttttttttgtaaagaggatttgcaaactgtacttattgtccctgtctttccttgcagggacatgtatggagaagatgacccttcaaaactacctgaaagaaccaatgaagctgctggcacttatgcacaggcatgcctgacagttgctaaagaattgaaccatccagtcatagacatctggacaaagatgcagcaatttcctgactggcaaacatctgcattatggtatggatctatttcaagtgaccttatacctaaacttgatgtatggatgggcttaataactgttaagggcttccatttatgctaccagtagcctactttgcagattgcataaacaatctgatcaaacataatggttctgtacttctattgagagtataaaagttctataaaaaatgtagattcatggtaaactgttctgcctaaagattcttgctgcttactaagatagggaatcaccttcctgttatcactctgtctaaagactctatagttaagatatttaactgaacaagacgaacctgacactctccataacagtcattcagttttcttgcttctgaattgtgcttagatcaaaagattctgtactctgtagtgaaaattgttggaacaaacttacgaagtgcgttttgcttagttttcatcttctcttctgatctgtatatagtaaaatggtactccatgctatgtggaccagaacatagtagtattttgttttgaacttgggtatatatctgtgtacatgtatttcttgctgaggaaatgcgttatgccgtgatgtagctgtgaataaacaattgtagagtttactgcttagaatgttttttttcctgatgacaatcgctatacaactttcttttatatcatgcagtgatggactgcacttcaccccattgggaaacaaaattttgtttgactgtgtgctggagacactggaaagcattggtttcagccaagggagtcttcaaccagatcttcctctcttccatgatatcgacccaaaggaccctttgaaagcctttgaaatctgaagaaggtcccggccggcatggtttgttcaggcacggatactcgttgtaacagggacaccttatgccatcgtgttgtgccagctgtatgtgcttgaattttccattataagatggttgaatttccatgtagaacataataaatggtttgtatttccatgtagaacataataaatagtcatacaattccatggttcacatttaaaaagaaagggaaatttattttggatctgcaaatatagaagctaaaagaatttcccagaaaagaaaaggaacatattaaagtttttttcttctttttaaacaaatacgcacacaccagccatgttcatgcatccctgaactttttcaactttctgcaaacgattgttgattattctgcagaatatatatgctgcgataatgcgtgcgtaacattttctacaagaaaccagacatttgcaaaaagacgaagtagggaaatgcatcgacttgggcctatgagtggaggcccattacgcatgactgatgaccctaccttagaaaaagtccattttgactgcctcgtctattagacgacatctaatttgcatcatcagttacaaaggctctcgtaactttgaaaaccaacataatttgactcccctggtgattttgatagtgattttgaccaacgtggcttattgacttggtccgtccatgccaatatggcgattgtgtgacagtttttatctctactatcataaaaattgaagttgttttcgtcaataccttggcatgccgttcatatttgagtcggtttttaagtctgttcgctttggaaatatataaggagtcatataagaaatccttttaaaaaactcgcatgctaacttgggacgaaagtcagactcctaattgtttcagaattcttgccaggccatgctattataaaaattgaatatttatttgagtccttttttaaaagttcgctcgcttttcgaaatacataaggagtcgtataagaaatctttttttttaaaaaaaaacttgcatgctaacttgggataagagtcgaactgttaattacttcagaattattgcttggtcataagaaagcaacgtacataatatggctatcatcctaataaaagtttcgaattagatatcaatactatcgaaataaaaatcccatatactttttagacggctaggcttcgtatctctccagttcaacggtgagaggtggaggagaggatagacaaggaagaagtgatcactgacttctgggtcccatgaatatttttctttagttttttatgattgtaatgccatgtagacgtcacatcagatgaaggctagttcaatgcgacaagtaggtgacatgttagccaaaaccattgtcaatactgtcgagggaactattttacaccgattttattagttggaggggattatgtacccggttttgcagtcgaggggtgggaatcagattaggccgattgtggagggtgtcaaattggactttgatgctttgcacccctcttcagccaattatagatgttgtggccttcccattcagtacaaaagatggggaataagttcactttaggtccctctatttgtcggtcagtctgattttcgtgtcttgatggcaaaaccgggtaagacctgtctcccaacttatgaaaaccgggcaaacgagatcccttggcggtatggaaggtagttttgggcgacgtggcgcctacatggatcctttgactaggtcttcgtcccacgtagcattgacgtggcgcttacatgacaattttatctgaaaaataataaaaatcgtgggacctatatggcagctatacaaaaaaataattaaaaaaggtggggcccatgtggtcccacctattggcctctcttctctctatccaaccctcactctcccctacaagggtggagtggcgggactgagcgaggcgggcggtggagggcgcggagcggctgagcgtggcgggcgacggccgacctcaccctcttacctcttccggtggtcatagcggcagcggcagcgggtggacgcggcgcgacttcattcctgggcccacctcatcgtgatcctctgggtccgcgaaggagctcttcatcccggcgaggggttgtcgccgttgccgctgctgcctggcgcgcgtcggtcgaggcggcagccatggacgcatgcagcgggtgatggaatcaggcgctgacgtcggcgatgggttttcccaaatccacatccgtcgtcctccattgatgagctcgggcagcgactcgccgccgcattctcttttccctccttctgacgcgcggacgaggagtcgctgcaggagaggagtcgtggtggcggccagagcgagaggagtggcgcacggcggcgggagagaggagcggcgcgcggtggcgggagagagaggtggcagtggaggagaagaggagcacgtcgtggccagcgggaggaaggagcggcgcgcggtggccggctggccagagtagcgtcgtgtggaggctggcgggcgagaggagcgacacgcaccgacgggcgagaggagcgccggcggccggcctccctgcctctcccagtctccgtctgtcatccgtatgtggtggaaaaggtgggacccactaacatgtgggtcccactttttattttttgtttgactgattggtgggtcccgcatattttgtattattttttttattttgcttctttacttttttttctgaatcaaaactccacgtaagcgccacgtcaatgccacgtgggacgaagatctagtcaaaggagccacgtagacactacatagaagccacgtcagccaaaaccgggatcaatactgccgagggacctcgtttgcattgttttataagttgagagatgtattgtatcttgttttctggaccgaggatgaaattagactgagcgataaattgagggacctagagtgaacttattctaaaagatggtgtaccctgaatttccattggagctccactcccctagaagcccagttgcctagttgggttgcaaagtatatgctgtccatcagtaagcagaaatcttactactagtagtatagtattagtactaatctactactactcctgtagtactcctatccaaatcaccagctcatcacctgggagtccacaatatcttccctggctttaacgagaaacaagatttcaggaccccaagaagaggatctagcttgtgcaggagtacaggtggtgagatgggcacgatcacgcgtatgcccagagagctgtacaatgccgttgtcactttcccaactctcaccttacaaaagacagaaagtctcacagacacacacagaggcggttttagcagagagggccattcccgttcatgctcagcaactgtcactcactctgtcagcctcgctggggtgcgaacaaatggatccatcatccatggcatgcgcctactactgctacagcgaaaaaacaaaacaaaagcctgggacaaccctactgttatgggttactgatccctacggcctaggttgattaacttaacttataaacccaagctgatcaaatcctaacgataaaacaagatagggtttagccttaggcagcgttaaaacaacctgcctatgtgtacggcaaagatcgcctcgtgaagcgtggatctcttttactattcctaccagctcagcctataccgctccacttcgctcactgacatgtggggccctggctgccagtaatatgttcagctgtaaagatccctgctgcaatctcctgctcttgcctgcttaattaattaactggcctgtgaagcatcatgatcagtagtaaatcagtggagtaattactttggattcagctcgcagcgtggttaaattcgggcgctagctgctctgcctccttttgcctgtgcgtgcgtgtcgtggaaagcggggactttttatcgccggcatctgatttgctgcacatctggggagaagcatgcatgcgactgtactagagcaattatttatctctctacacaattcgcatatctactgtttttttattagggattgctcgattttcggtcactggaaaatttcacagattttaggtctggtttagttcacaactttttcttcaaacttttaacttttccatcacatcaaaacttttctacacacaaacttctaacttttccatcacatcgttccaatttcaatcaaactttcaattttagcgtgaactaaacacaccctagtcgaatttctcttgtctgacgatgcttggcggccggccgggaacatgtgaggctcaaggattggaatgggaggaggggttatagatagtggaaaggggcagtgaagatgatggatacaggcgagtggtaaggcgatgttgtctaaggctgtcaatgagtcgagcgtcaacgagtcaagctcgtatgtcgtttgagcttgacacatgcttaagccaaacttattccgtcttcgagcttttaagcaggctcagttcgagctcgatcaagcttgagcttgactatgagtagtatggagtatagcactagatctaattacgcacaaaccggagggtttttttctaaaatttcaccccttgcactatagctatctgacgtggcattgtctagcgtccgcgccatcggccacccttaatattctcctaatgtattttaatgatacttttagataaaaataactattttctagtaaatcacactaacaatagaggagataacacatgttaattcattgtgtagatacgtactaatatatattttatttattagtttaattataaaaaataaataaacaataaaatccatatacagtcaagctcgttaaaagtttgagcttgacttaacaaagctcgagagctttagattgggatagggttagcttggcttgtttcttgaaccaaggtcgaattaagtctaagataaatcgtgctcgagtggcttgtgaacctcgagctgttataacaactctaacgggggctctatatcgaagccgctgggaagaaagaggttggtggactaggatggacgggtggtgacagcaatgagttcatcatgcaaagctatgaaaggagatgcatggtgttgaggtcccattggcgttcatctcaggaagaaagcgtggaggcggtctcgctggcgccgttgagacagaggtagagtagtgaatatagccatggtgtagcattcggtggaggaagtaaaagagataattgagagattactgtagtgcataaatcttggcgcaatccatgccatctaagggcgtgtttggcgcccctagctcccaacaccaacactgtgcacagaaaacagagcggtccattagcgcgtgattaattaagtattagctttttttaataaaggattaatttgattttttaagcaactttcatataaaaactttttataaataacacaccgtttagcagtttaaaaaacgtgcgtgcggaaaacgataaagaggggttggaaactaggggtgccgaaacacaccctaaagtgagagtagcaaaatttgagtctaaagttttttttttgaaaggaaaatttgagtctaaagtggagtatggtgaaatttgtgagtacgacgcttctcttcacctcgctgtgttccgttccaggtagtagtgctcataccaaagatgggtactagcgctgctgctactgcaatatttttgctgggttttcgccatgcatgctgcagctagctgcatgccgtactgcagatgaacctttttagggccagcgagctacattgccgtagcctgaagaaagataagaataggacatgacagttcgttcatcattggccactggctactctagtactaccatcccctcatttactggcacagttgcacccatgcatactcccaaatgacagttgctgggaaaagaaaattaatttattttaatagtttaatcctaaatgacagtttctgggaaaagaaaattaattgattagtaattgtttaatcctagtactgcatgagcaccggtagtgtgatctcactgccaccactgactggatcctctgtttaggcatccaatgaaatgaccatctatctccatagtacaacatcgcataaaatataggcacaaataataatctgagaagtttcaacccaaaaaaaaaagaacgcaaaagcatgcggatgcacgaggggaaaagaaaaaccaaaaaacggtctgcatgcgcgagtgcccccagctacagttgtttcacacacctccagaaatccgtactacgagtgtattcaattcgatgcaagcatgcaaaagaagaaacgcagctaggagtaggagtagcatgtatagcagctagtatactgtactaggagtagctgtacgtggccatcgccgtggttggggcgtcgcgaatcatttggacagatcgatgcacgcacgctgcacgcgacgccacccctcctcctcatcaggcatatcgcgcgcgcgcccacgcccggacggcgccggccggccggccggccggtggtcgccatgtgtacagcgacgtcgtgcttgcccaatctgccaatcattcctacggcgatcgatcgatcgagctagctagccgattccccgcgcactatactagctttaatttagccaggatgctttgccaagatgtgtgtcgtccagacttcaagcacacacaggcctgcgccgtgtatacaaatcaactcctgattacgaatctgcatatatccaatgttaagttttgtagatagaaatttaactttatggaatgaaggaagtatgttttgctacgtcactactagaaaaataatttattgccacgaaaaaaatcgtagcatcaatgctaaaattgttgcaatagatacatgttgccacaatctaaaaatcgttgctagccgtagtaataaatagtgtggtaataggttattgcaacgatttttatttagttgtaataaattttgttattgccataaaatgtatgtggcaaaaaatatatattgcaacacttcacatcgttgcaataaataactattgccaccactccatatgtggcattagttctacgtaccaaattaaatgtttcaatattaatttatcatcctaactattttcttttgatatcttgtcatggctaggattcgaacccaagatctctccctcacgcgcgctcttcatgaccaactcacctacgcatcaattttgtttaaaaatgcatataattccatttgagactgcttaactgagatttgaatcataaatttgagtatttaaaagatttcaaatgaaaaatttaagttgtagatctcatcgagaggtataaattttatataaaatttgtcctaatccgtgtccatatgaaaagaataagttgaattatgagatgataaattttttttgttgtaacgaatttgttgatcatggcaaatagaaaatagtgaaagtaccatgtactatgcaaattgccataaaaatttaatttatggcgatagaacatgttttttttgcaataataatatttttgtggcgatagcccatttcctattgcaacaaaaatactgaataaaacaacgattgtaaatcattgcaacaaattatagttatttgtcacagaaaaattatcattacgatagtataatatattgccacgaattatttttcattgcaataaattgatggcgatatctcaattatcttgtagtgcgtgtaacgtgtgtggcgctagggtcacgggnnnnnnnnnnnnnnnnnnnnnnnnnntgactgaaatcgatcgatcgatcatatacgtgttccgacggcgaccggccggccggtgcaggagcagccgagggggacaccgaccgtgcaatctgcaatgcacgcacgccaccacgcgccgcgtggccggccacggcgagcaaaagcgtactagtacgttcgtggcgtacgttggagcgtcgccgtcgtcacctctcactcacctaggaaccgtccagtttggtacaccaccaccactcccagttagtagtacgcaatgcactgtggtcgaattgaactcgatcgaaacatttgtggggacgtacgtacgtacgtacggtgtctgtcacgcacgatgaaggacgacgacggtgatggcggctaaggatctgtttaggagaacttaagattctgagaatcaattgctgagaagctagctggtgagaatatggagaagctggtgacccagcttctggcttctagtttatttttccaaattctacaaagagaaactgcagctgctagaaacttacctaaacaggctataagatcgatagataacccgcgctgattattggtgtggactgtaccggaatcgatcatcgattagtactactggacatgcaagcatccatgcatgcacgcgatcgccaataatcagtgtggcaggcgcttgtaaaaagccatgggactttacgagatggtagctagctagtgcgcgcgcggcgcggagggctggacgacggatggcatgcactactcacgcgcgcgcgcgcgcgcggccgccggcgcagataattgttgggggggaggtagctagggcccaaactgtaaagagcacggaaagctggcatgcatgcaggccggcctgcacacacatgtactgtacacacaagcgggggggcggcggcaggcatgggggcatgcagatgcaagcggacacggccggccgggcgccgcgccctgtgctactgctctgctgcgaaggcacagcatcagtactggggacggggagttggtttgtgcgccacatgtgttgatccggcctactgctagctacagccaactgctcacagtcagagactcagaggtcctatttaatttgaagaaactgattttagtatgctcgcttctgataatttagagaagatgatttttctagcttctgaagtactagtagttattttctagatcatatagttacagattctcgtaaatatgatcaaaattcgtattgtttaggagaattagagcttttaaaagaagttgcaactgctaaaagtctacaaaacaggaccagaggcttaaatgtataacttcttattagttactactcccttcatcatccataagtagtacaagtgattttaaacttctccgtagtttcatttcgcaaatataatgaaacttgaaggcattgtttttctaatctatccaatcactgtaatagttacatcgcacaacatgattttcttttctaacgaagtcgtcaaagaaatttcacattaaccttaaactctcctaaacaatctacaatcccctttatatactttaccttaaacgttgctaaaaatctataatcccctttatatactttatggaatggacagtaactagctagtgagtgcgcagtcagatggtcagagagatcatcggtgatgaggactatagctagtagatcatggcatcgctttctcagcatgcagtggccaggcctgtgtccggccgaacgggctaacatgcctaggcttctgtggcatcattctcttgctgcaggctctacatactcctatatgcctagcatacggagtattcctatgtgaatcgtacaacgggatggccatgagccatgagcccatgatctcgtgaccatcctctccatctggttgcatgcatgcatcttgatttttttttaacagaaatgggtacacggatactggaatactatatactccctccgtattttaatgtatgacgccgttaactttttgaccaacatttgaccactcgtcttattcaaaaagtttatgtaattatcatttattttattttgacttgatttatcatcgaatgttctttaggcctgacataaatatttttatatttacacaaaaattttgaataagacgaacagtcaaacgttgataaaaagtcaacagcgtcatacattaaaatacggagggagtatatgtcatgcatgcatatttcttcctatacaaaatctttgcaatgtatacataaagaaacaatgtttctaagtgctgaatacaagtagccaagggttgtataacatcaaccaataactaataattagcccataaaacagtcagctgtaggcaattttgttgatggggatgtgagagggggtaaggagagagaaacatatatttggggtagtgatcagctatgcatgatatatattgctctacagcgttgcatataatagctatggcatagctgtgccagcacaaaacagtagcgccactatacagtggctgcagatttgctctatatagtgaagccgacatgtatgcccattgactctcgaagtacaagatatgatgcgctacgcaagacacaacttgggaaaaaaaaccaaacctagtggcggatccagaaaaaaataacagtgaggtctaaacaaactagatagagttacagtccctcctcccatctacatttggtaaaaaaatttagtgggatcttcgtgggggctctcatagtcttcacgctagtagtgggggctcgagaccccgccaccctcatgctagatccgctacatatgtgaggtgatatggactaattggtagaacttactagatgtccgtacagcacatttgtgggagtagtctctggttgattaatgtggacttatatataagatgaacaagccctaacaaaaaaaaaaacaaaaaggtggcttcttggctcctgatcaaacaaatttaaataccatcttcctaaaatactaacatatataaaaaaacaaataaaaaattatacctacaaatcaattaactttgttataatttagattgagcatgttggaggccctctaggttggagctagcgagcgtttgtggggctaagttctggagctacacatatagtatatgggttgatacatcatacatgcatggaacagaaaagttttgtcctagaggccggaggggagaaaggggactttgtcacaaaccctcccgtgaataccaagcaatgtcagcagcgaactgtaccgtcgtcacatagtgcatcatatcaagatatgtgcttttttttacttcaacggcctgcataagtgtgttcagccctgtacagttttctgcttcctatggtacgtgatctgttgcctccacattcatcagtgtccatatagtagtagtaatctacttactcctatttgatttatcgtaaaaatagtcaccggttcatatatattggtatatatatatatatatacacacacacacacacacacactcaatttcatttccaaacctttcatgtagaccccaactaactcttcaccataataattcggaccgcacatcacaatcgtcgacaatgcatatatatatcttctttttctcctttaacgtgatactagctttctattccatttatccattttgaatacaagtatttctaggttgtttagcaaaaattaaaattgaggagaatttttcggtgcgctttattaaatgagagatggttgagggtaaaaaaaaagaaatttaaatgtgaggtaattaatgggataaatagtactctaaatagttcttgaagcactaatactttggtacaaatttaaaatgttagaaatacttatatttttgtaattgcgggaattttaatagacccaggaattaatgaatgcagtatagctagtttcaggcttctgttaatttggtggccctggcatgacatgacatggcatggcaagtgagccacaaacattttttaaataatggaaatggaatactgtcgacggtgtgtacccgtagaccggatatagagggtattgaggtgtacgaggatctacttagtacgacatcaaggaaacaagagacaaatattatactcgttcaggccccctaataggtaatagccctaatccagttgatatgggattatatggtgagaaccacagattacaaagggaataaaagaactcgacgataccgacgagatcgtagtcgagttggttcgactagaccacccggcgacttggctcctgtagacttcggcttcgtaggttgtggtcgttgtattggctatgagattcgatgccttaggtcctcccggggggtcccttttatatcgcaggtcaggtggtatccaagtaggactcggagacatcggaccctgcacgatacagtgacgacccagtcctatacgagtaggaatcttttcattggtggactccgtgatgaatttccttagcgtatacagagaacgtctgtacacgcgcagatgtaccatattgccgtatagcgtacatccaagggtagagggtataccttattcgtaaccctaacaaatacatctccggtctctgcccatgggtacacaaccaacaaatcttagaaatattggtcgcagtccaaattaaacatgagaataatagtaatatggagcattttaaatataccctcagaaatggaacagatgtcttaagttggcactaaaatatgaataaaattttgttacacaaaaacattaatatgcatgtgagatattccaatccaattaatcaggtcttacacaacaattttgaggaaatgaaattttcatttttatcaatgaaaattcagtactatataactaaattagcatttcttctgtgtaaccaaagaactattagtgtaccattgcgcacaaagttcactatatgtatttgtccgcaaaatagatccggagccaggagcctcgcgagtcacgagtcacggcctacttctgaattctgatcaaaccacaaaagaaatgaacgcacgatcaataattaacaaccgtttctccatgcaaggatcgatgcaaatggatctacacataattaaactaaggttttcggtcaacctcaaatctcacgctgcataagaaaatcccaaatagctagctagcgaccacggttagcggagagtacattcatcttgctagcaggttcagtcgatgactaaattaagctagcatgctactgttcatgtggccaatttgcatggagctgaaagctgcctttgtttaatgtgacatccacatgtaaaatattacactccttttcgaatgtcggcatccactcgttttttatggtcccagttagttcttttctgcaacgagcacacaacgaatgccatctcggacgtgtgtgtgcacaagatatataaaccaatgtatgtacgtataaagtggtagccagaagttttaataaagaaaaaaaatcgatgttattgtcatagtgtaacttgaggtatatatgtaatctacgtcaaccatatatatataggccatactaggctcgtctttccgtctaggtggactataaagtggtggggaatggtggagaggatatggaaagaaataataatatataaatagcgtaaatcaaatatctgcgaatcaatta

SEQ ID NO: 20748 - DNA, 5241 bp, Oryza sativa
atgtgtccagatttaggaagcgtatcctatgcacacaggccctcgcgtgtacacaccgtgtacatcaactaaaaattatcacaaaaaattctaggaaaattcatacatgtactttcaacagtattacatctacgtgcaaagtcacatcttcaaattcattctacatagagaataacaaaaaagataaaattctgacaaaattataaccttaaaactgtcagatttttttgttttttttgttacggctaaaatataatgaatttgacgttaatattttaaccctaggtgtaatacaattgaaagtatgtgtatgattttttctatattttttggtgacattttttagttggtgtgcacgtgtgtacacgtgagggcctgtgtgcataggatatgttgccccagatttatagctaaaagttgttatatttttggacgggtagtgagaactcatgtgaataagcacatcagttttttttctgttgtacatcttatcgaagtacctaaatgctcaattctctaatggtcgatataggtggtggggttttgttggcttaatacttacaaaagtggtcatttattatttgtcactataacctttccactacaatcaaaaaagacacctggatatattattgtaccaataaattttgcgcctgattttttttctatgtatgtcattttcactgatcgagtccacacatgcaacgaaattggcaagtgcaccgtgcaatgcgcaggtgttgccgagacatgaaaggaggaaaaaaagagagggagaaggtgacaagagagggaaaaggaggcgcctgccagcgttgcggctgtactggccggattctgttgggtgcgccaccgaccggtgcagaatccggacgcaagtatagtccagtccaacccatcaaatcaaacaaaatcgactaatcaaatcgatttgacatgacgcatccttaagaaaagctacttcagctaaaggcccttatcacaactgggagtaacagtagcaagtactcgtactctgccttttcctttccttgatgaaagaaagaattgattgcctctgtaattaggtgtaattaacaccttctctacgtcgttagtgcacggtttggttgatttgactgggcactaaggactggacttatttttatcatctttccgacagaaattctttggcaatgaattgtcctttgcaaaaatgtcactccagtgtttgtactactaccactacttttcccataaaactgtacaagtaaataagcttgtccatgtacgagccgagtacgagccatcttgactgaaacccggttttgcagacctgtgctgagtatcacccggttttgcaaaaaaaatcagggtttagttcccttcaaacttttaaaaatttcgtcatatcaaatatttggacacatgcattgagtattaaatgtggacgaaaaaaagcaattgcatagtttgcatgtaaattgtgagatgaatcttttaagcctaattacaccatgatttgacaatgtgatgctaccgtaaacatttgctaatgacggattaattaggcttaataaatttgtctcgcagtttacaggcggaatctgtaatttgttttattattagtctacgtttaatacttcacatgtgtgtttatatactttaaaaaaaaattggcacacgaagtaaacacgccgtagatactcgttgcagatcaacttggatgtataatatagtagtagtagtagggagtatatcactgtgaataaaaaaaaattactactcctatgtgagttttctggacagccagcgatcacgtgagccactgagccagccggacccgtacacattcagagacagagggcccaatgcagcagccagccagcagcagcagtagggggagtactacgtagcaataaccatctcgatcatgtggcaaggacagggtgttggggattttaatgctgagtttttcattccactggaatgtcccttgtctggccggagaggagagagagagaaacaacaacaccacatgatgatacagaagggggaaacaaacacccaaccatagcagcgtagtagcatgcatgcatgctgcagcagcggcaaagcgagatcctgatcgagttgtttattaatctcctcgtttaattagctgtagagctacacgcattaatgccacctatgccatcgaggagcaaactgatgagcaagtgcatctctctgttccagtgatcgatcggccatatgcatgtgtgtgtgggatgaaaaggccacgtctctttcggcaaagcaattaaaggctgcccccggaggaggccaaaagttgtaagagatcacaccacagggacagcactgcacacatgcattggcaggcaaggcagggagggagggagagtgtgtgcgcgcgcgagagagatttattggtcgtgtgtgcacagagttggtgtgttccacggatctcgcgcggcgggacgggacggcaacggaacggagaagggggctctcgctagctcttgcttgttggcttcttatgcacagccaaaattttaaaaaaaatttgcgggaaaacaaataattttacaattaaagcttgattttatatttgattttgggttctgtcatcgtagtctatttttaagacttgttattaatttaaacggtaaacaatactcactccgtcccataacattctcttagctaagactataacttataggttgtttttttggatggatggagtacatacataacattcttacctataaattatattttttttatcttgtttattttttttcacgccttatcagatgcatctcaattgatccgaacaaacaaagctagagaactaatcgctttatttttttttctatacttctggtcatgaaaacatgttatgcggtactgatagtgtacataattttttttaaaaaaatactaagtacttgtggctgagaaaaatctgtggtgaaagaagtttttttttctttattcctttagggtgtacagtagaagtgagtcaagtgacatccattttgtaactttgatggagtgtgtattactctctgaaatggatgaagtggtacatttcgcatgcattacatgtcctttcaatataattgcctctttaactatgacaaatcaatctatcttcagttaagacatccaactatgtactccatactgtacatgtcatttccaaactctgttcatgtctagcaggttcaaaacttcaccacatgtgtgggctcggcatgattgggtagctggttaattgctcttagctatagttatgatcatgtctcaccaccagacttcttgaaccatcgtacaacattataaattggccttttcattctcatatagggctgaattatgtttttagcattcttccctttgagatgtactacggcttacccatagcagccatgaaattgagcactccaactaagcagaagaactagggaaatctctctctctctctctctctctctctctctctcaaaaaaaaaagaataagaagaataaaaactagggaaatactccctccgtttcagtttataaaacaactttggtcaaagtcaaactgtttcaagtttaaataagtttatagacaaatatagtaatgtttataatactaaattagtttcatcaaatcaataattgaatatatttttagaataaatttgtctttggttcaaaatgttactacctttttctataaatttggtcaaacttaaaacagtttgactttgactaaagttaaaacgtcttataacctgaaacggaggaagtacaagtttacactatcctgtatgtagatgtgccaatgaggggtgtttccttctatcttttttgaacaaatctatgggcaccatctcggtccctcgacccgttatgtttttggcatcaaatgaactaaaaatagcttgatcttatttccatgcaatggatcaaacttggggcaagtttggacaatgacgccacataaaaccctcttttagcaaggtggggctacaaataaaacacaccatcaatctataaacaagtatctcaggggaaaggtctcacatttgaaactaatattgcaactctcgactttccaaaaaggaaaatcattaaccattggcatatacccttgaaaaagctccagttgccatcttacttgcctatgcaactgcccaactacaagaattatagtacaagcactctctaagaataccacaagttagcttctgaagagcatagatattcatgtcatgacaaacatgtctactgtacaacaaaaaagaaaaatcggctaagtagatcactccacaattgtgcgagtagatactagcggttacatatacacgaacgtatatataaacatagttaaaattgctatatattaccataaagctatcgagatgcgcttaattccttatccatggagactagggtgtgtgcctccggtttttattttttttcccaaaggcacgtacacgtgtgtgtgttcgagtttcatcgcgattcgatcgttgtctactgttttttaataatacaacagatgtcctaatcatccacgcatgcataacccacaatcccccagcatcatccatcccttcccaattcccaaatcaccacctctcttcatcacttgggctccagcctcctgcagccccagccaagctaaggtaagctccatctgcttctgatacacacactcacacacaaagcagcagccagcatcagcagcagcagtgtgaagcaaaaatctctatctctctctctcctcactaaagcacaaatcctactcttatcatcctgtcttcttgcctcccttctgcctcctgctcaccaagcttcccacacaaacccaacaagagagtgagagaggagcaaaagctttggctggccgtcccccctgttaaaatgtgatgtccaatccatgggattgcgtctagtttagtcccccactcctctcctgggtcagtccctccctggccaccacctcttcttcttgcagcctcctcctcctccggggccttcttcttgttgattcttttgatggtttttgtgtttcttgtcgacctagttatgggatccggcgaggtggatggacgcgcattggagcagcaacagtagcggcggggaagaaggcggcgggggatctggatccgaggcaccaccaccaccgggtcacccacggcggcgacggcggcggcgtaggaggaggaggaagcggggacaggaggaggcagatgagcagca

SEQ ID NO: 20749 - DNA, 3595 bp, Oryza sativa
tgggctacgaccgcccgagcaaggcggggactggctcatcaagaacgccaaggacgccatcgacaagctcgacgtgctgccggcgtggcagcccactgccggcggcgcaggcgcgggcaatgccgccgcgccgccgtcctcctcgacccaccccgactccgccgagaactccgacgaccaggcgcaggccatcaccgtcgcgcacaccgccttcgacttcgccggcgggggcagcggcgggaccagcttcctcccgccgtcgctcgactcggacgccatagccgacacgatcaagtccttcttccccatgggtggcaccgcaggcggggaggcatcgtcgtccaccacggcggcgcagtcgtcggccatgggtttccagagctacacgcctgacctcctgtcccgcaccggcagccagagccaggagctccggctgtcgctgcagtccttaccagaccccatgttccaccaccagcaacatcgccatggcggcggcggcggcggcggcaatggcaccacgcagcaggcgctcttctccggcgccgccaattactcgttcggcggcggagccatgtgggccaccgagcagcaggcgcagaaccagcgcatgctgccgtggaacgtgcccgaccccggcggcggcggcggcgccgcctacctgttcaacgtgtcgcagcaagcggcgcatatgcaggcggcggctgcggcgctgggtggccaccagagccagttcttcttccagaggggaccccttcagtccagtaaccagccctccgagcgaggatggccggagaccgtcgaagccgacaaccagatgagccaccaccaaggagggctgagcccctccgtgtcggcggccatcggttttgccgctcccggcatcggcttctccggcttccgcctccccgcgaggatacagggcgacgaggagcacaacggcggcggcggcgtcaatgacaacatgccgacatcgccgtcgtctgtctcctcggcttctcaccactgaccgcagcagtggcgagcagatgacttcaccaccaccaatccaccatgagcaaacaccacaccatgtaccagactatcagctagctcctccacttccatcacggtgagaaaaaaaaaccgagaattctcatggctaacctgcattagttcagaatttttctcgtgttagttagctgatcaatcttgtgctgctggttttggtgttcttgacatgcaggaattgtcgattgcattcgggaggagcaaagtttggaggtagcacaagtgcactactactgatgctactacatatcggttggttggttggttggttttccatcgatctcttctgctgctgcgcatgtcattggtttttgtttcaagaattcactcggagcttcttagaattaggcttgtgagaatgcagcaacacgatggcaagctttagcttagcttagcaagcctctgtgtctgttggctgttgcgttgcgctaggtgtagttgatcgatgtaggttcgagcttgctttgctttgttttgatttttactcttttgttgctgatgcatggacatgcttttgcttcctcctgtgggttcaggagcagttgctactagaccgatgttgttctcaaaactgataagtgggatggtgatggattgggagaggagcctatctttcatcttttccaaaacttgtggcctcttttctttatactgtagtgtaggctggaaacagatggtgcatgcatgcctgtgcaacaaatctcccccgccctaagtgtttttctttatgcaatccaagtatctccagccatccttattatatcttgggctttcttcttttttcaaagccttgtttggaactgagaaaaagagccgcatgacaatgcttgctggccctcatatataccttcctcaaaacaaccaaaaggtttggatttaatgcatgctttaagctttgaaaagaattgcctcactcacctccccccatggccgcacacaccctcacacacacacaactgcaatttcccctctcccctatatccatgtgattggttgggtctctttccctgcttctgcatcagcagcagcaggcagccacagctttcctttgcaccgtgccatgctgccatctatcccacctatcatcactgggcatggcaagaatgccacaaggaaaaggttttatgtgtgtgtgacattagtatcctgtctgtcttacatgctcttgcattgccaccagcggcacagtacaagccttttttaaccattttacctcaggctcttcaggccttggcctgctgcctgcactcactgatgcagcactctgtgacagatgccagagaagagagagagagagagagagagagagagagagagagagagagagagagagatgaggggtcggccatgattgctcacttctgctctcttctctgattggcttccacatggacactaccttagcttgtgtactgtaagtctgtaactttaaggctgggtaattagttgtggccttgtgggggaggggaagatgagcttaggcatgcatataccatgatttgagcagctagctaaccctctctcctatatatccctcttctatggggtcgccattaatgactgctttgcttgtaagatggaaatcatggaatgaggcaatgagcaatgataggactaacactgtgtacacccactatactcctaccataggagtacgttgtacaagtggttatcacaagcatgcatgctgccatactttacaggctttaggccctgtttagatgggactaaaacttttaagtccctatcacatcggatgtttgaaaattaattataaatattaaacgtagactattaataaaacccatccataatcttggactaatttgcgagacgaatctaatgagcctaattaatccatgattagcctatgtgatgctacagtaaacattctctaattatagattaattaggcttaaaaaatttatctcgtgaattagcttttatttatgtaattagttttataagtagtctatatttaatactctaaattaatgtctaaagacagggactaaagttaagtccctggatctaaacaccaccttagtctggcctcctttatttgctactccctacttgtcatgactcatgccatgcatgtggaagatatttttggtgtggatatcagaattactacatgcaaatttaacaacacgtagtagtattaagcacttaatgtgttcttttagctgaaagtgtggaagaacatatataatactaggatttgtagtagcagtatggtaaaggcaaggcttaactttttttagtttgggattgttaaggtttatatctagaagagtgtatacttggagagctcttctaaagcatgtcaatatcttgctttattcttgtgctagatttattaaccatggtttttcatttttatttgaaacttcaattttttgcaagtactctaaactttgaattccaatatgtggtgcaacaatgggattgttggttatttatgaaaattggtgtcgttataattgttgccaggaaaaaaaacgaaagtatatatatggagagttttttttaagacttatataga

SEQ ID NO: 20750 - DNA, 7744 bp, Oryza sativa
tcctgcagcccttaaaatcattcaaaccttttgttcacccacgtttctgcccaaccctctcaccctagcttagtttgccatgacctgtacccacttggcagccactctggctcgtcctcaccctgtgcaaatcttccagccggaccaaagacagccgagagagagagattggcgccggctgtgtacgacgcgtggcctcgacgtggcagcgccgaaccgaggcttcacctccacccagctgcgtcgccattcttcacccaccatcccagtgccgatccaaccgagggaggaagctccagctctccctctccacctctctttcgtcgccggccgccaagaagagggacatcgccaaccgttatcgagccctcttcatctctaactcatactcgttccattctcatctcaccatgacgaacaactttggttttgatcccattccatttcatcttctacagcagcgggaacaccgccatgtcatggtcgctctagagcgcgctctgtgcaccgccgcagcgacatcatcgccgttcccgcttatctggaccaagccgggccaagctgtcgcgccagcttcttcgcctcgacctcctctccatttcccctcaagaatctcgaaggatggtgctacgagtgtggagatcgtccaccgtcttctccacctccggtcaccgtcgccgttgccgaatccaccccctccggtgagtaccaacccaattccatgcatcagtagcatctctggggcctctctaacctcatggacacacatgcatgatagttcttggagctgattgagccatcgccgttcacccggaggttcttgccgccgccgagccgttacacgagccaccgtcataaacctagctaccccagccatgtctaccatctcggtgagcacccttccgcctatagaacatacatgcatgcacccaattaaccaatacatgattgtagaagcacatgcatcaccacccgaaaacatcctcctttcggactcgccgccggcgttactccgatgtccactgaccgagaaaagtagaggaatggaatcgcaataacatgatcttcattttgtattttggttgcacccccaaacgagccatcgtttgtcgccggtgagctcgagatcgagctcagccatggctgttctgcctctgtgcgtgagaaaagaagtcagggaccttgtttcgagaatttaaacaactataaggtttaatgtgcaacttttcaactcactgacatatgaggctaggtcggcgggttgattcttagaaacctcagggatctttttgtatattgatctttcactgacagtggaccccttggaaacaaaaatctgaaattataaaaggaaagtacctaaaacttgtaaaatccatataaaattaaatatagctcattttaagatgatacaaatttctgtcaactcaccaaattgtgaactatagtgttatggaataaaaacttgcactcacagtacaaatttagcctctaaaatttatccaagttaaatcacacataaagcatgcacaaatttataaaatgcatacaaaattcatttcaactcattttggagcaaactcagtttctacagatccaccaacttatgttctcctataaagcaaaatgaaatagtatacatactatacatcgaatgcctctaaaactattacctttaaaatgactagttttacataagctgaactttagaagtttatataaaattcatcttagatcctttttgagtaaacccaaattcagtagaatcatagggttgtgcacttcaatgttataaaataaaaagacatacttacagtataatgaaaacccctaagtatttaagtaaggaataagcaacatggagcataccttaaattgtaacatttgtagaaaattcatctatagtctaaatgaagtgaaccaaattttctatagaaccagcaagtaatatacttcaacctagtagagtgaattatagcaccctcttacagaccatggctctgaaccttaatttggtagaataggtactaaacacatagtaatggttaaacaatacatatgaaaaagtatatatatgcttggtagctccaaataaatccaaataaaacttgttgaaccagtgaaggcatagatccatccccttccaccaaaacttagtatccttaacttatataataatctccagattaatatgttaagtttctaacatagaacatcccctagcttataaaatgtgaagtaaagtaatttgaacactaaaattttataaactaagattagattagttaactaaaatactcattttatacaacactagcaagttagagcaagttctggatctaaatctccaaagccatgtacacatagggaatatatgcctagaacacgttaaaacttgtaaaatacataaataattcatattaactctaaaaattatgaaaccaaatgtgttagtcttagaaaacaaatatcttcaccccagcaaacataaacttaataagaatcaccttacaacagcatttcacaatagtaactaagtaaatcctacactataccgacgaaacttctaaaattcataactcccaaataaaatgagataaaatagaaattctttcacctaaattaattttagaccagtacctattcactgtgcacaaatcatccattttagagcattttggatttttcgcatatttcggtgtttaattgcataacgtgtactttgtatagatgattgcttaatcggtgaagaagtgatttaggtgctgacattttccagttgcaaggcaagtcccacctccctctctttgatcactttgaacctatctttggaggttattgaaaatgtttgcaaatcttgcatgtcgattgtacactaataaattaaaattttgttaaacttgttagataaactcctattatttgcattatcaccttaactccacatatatccatattcctcattcctaaccttaggaacaatatggctataccactttatatatgagttttggtgacactaggttactataaagcatagccatgcttagaatggtcttccttgtcattatgggctcatttcaaacatgaaaattgatttttaattaatctggacagaactttaatacttgtgattttgataaataaaatggtggaaagcatggattttaggtttgggcctcaagtggtgcacatatggtgattagttgtgtaccgatagggggagagtgcgcccaaaccgacctaaggacttcactcaatgtcagttcatttcgtatacagtacaaccacatgtgctagtatgggatagtccaagcttagtaaattatttatggtttagccttacattctggtaggccggtgtgtatgagttcggataactcagaggaacttcctatttaccacgacgtggtagtttaggtgactaagtctgtccaatacaatggtattatgccacgtgggtgggttcccgttgtgtccgccaccacggcgttaagttcaaggcgtgggcccgccacttaacggttctaggtcatatttccagtatgactaggatggaggaacacgtatcgtgctggtgtaaggctaaatcatgaattttggaaaagctttgttgcgggtaataaatcgggtacttatgtatcgcgtgccatgctcttgcatgattattatttcgcatcatgtgggtaaagtgtacaaactctgcagagttaaaactaatcgattagccgtgctcgcggtcatgagcggcgtgtggatatgtattgagtatagacttgtgtttattctcctaaatgctgaaatttaccttcaaattgtgatgagatttgagaatgatctccttgctgccatggatggcaatgaggtgaatatttatacatgattaatgcctactttgatgcccatatgctaagtactagcttgctgaaattttatttgaaagcaaatccgttttgaatgtgttttatgcaaataaaacttgctttatgctaaaaagaaccatactatgccttccttgattatataccttgcaagtagggtgttaggcttgtcttggtgcttgccagtacattatttctaataatgtactgactcttgctgttgaattaacttttgcttgcaggatttagacttagtctttgagtgatgcgggttatcgactgcttcttctaggacttgaacataatgggtaaacccctagtcggtgtgcttgtggattgggtagacaagtttccgctgttctattatttatttggccggtcggccaatgtaactaaagtagatgtagtttataatcgctttcatcttatttgtgtttgctatgtataatcatgcttgagatgaaagtgtgaatctagtgcacatcctgggaactagattcacatgagtatgagttaggaatatttgagatgttgtagaactttagccatttttgtcaagtctcctgaatgtgtaacacatctggtcgccgccttcgagtggtttgacgggcacgtctcaggctgaagttgactggcaggctaaaggcctagcaatatctccaatattcctctctcgaggcgtcggatatttcattatgcttgtttgatgacttgaattattcacttcatctctcaattataatggaaggtccggagagcctacgacaccctaaatacatgaataacagtgatgccactataccgataaaaaaaacaacaatgaaataaaataaacagtaaaacaacatgtcatccatacctccggctgtttaccctatcattcccttctttctctcctatacgatgacaatccaatccatggtaagaaatcacatgttgtgtgatgatagaccgtggtgaaggtaggatttaagatttgaggggagccaacttaagctaaatatagtaatccaaaatgcttaagtgttgaaagcttaaatggttacaccaaaatgcttaaactaatcgtgtaatgtagttagagaattattaacaagttctaatataaacagaactagttggatggcccgcgcaattgcgcggctagtatcaatttaaaactatccttttttacacatgattttatttaaaattatcgttcccgtgattataataattttatagttttaaaagccacgtcagtcgctacctcttactcctttatcacatttttatgtgcttactcaatctgccactacttctattcatgctttttagaactttaaaaattaggtcttatcgtttttagagttcattgtcttgttgggtttcgttttatattttagaagtatcgtcaaacatcgacaatttactattctacggcccatccgctgccacctctctttattgtcactaggattttaaaaattgaacacaaccattgtgtgtgttttttactttctataagtctcgtcaaattgttagttgcatcgtcactatactcctgtataacccgcccgctgcctcccctccttattatcattgagattttaaaaatcgattatgataatcactggagtttatttttactctccataagtcccgccaaccgtcgtgaccatgctgcttaatggcatgcccattgtcactcctcttaatcgaattctatttggggtttccttatagtttttagataccccataaaccgccagcactctcctcatttacaggcctattgcttctcccctctttattgtcatttgtcattgttgtgttctagatagacttttttttttaaaattatacatttttcactctgataacttttattcataaattatattcttacttgaactattataattatttttatatttttaaaatttattttatttgttatttagaactttaattattttcgtcatgtgttctagattgtctcttatttcaacagtctttgttttttttactacaaattagttatttataattgtattctagttgagctcttatttttatttttctaatttctgaatttattttatttttatttcgaattttaatcaatctcatattatgttctatatagactattaatttaatatttctttttttatttccaatttcaattgtttcaaaattgtattcctacttgaactctctttctaatattttataatatatgattttattttaatttttattttgaattttaattaatatcgtgctagtttcttatatggacttttctttcaatattgcttatttttaatttcgaattttagtcattttcaaattttattcctacgtgaattcttcctttatttttttttctgatttcggatttattttatttttattttaaattttaattaatcttgagttggattcttatatgaactcttctttcaatattgcttatttttaattccaaattttaattatctttaaattgtattcctacatggtctcttctctttttttttttaatttcagattttattttatttttattctaaattttgattaatctcgtattgggttcttatatggactcttttttaatattgtttttttaattctaaatttcagctatttttaaatgatatttctacttggactcttcttttctttttcttcaattaatgtgagaatttctagccccccaacgaacgtggtgtctcctttcaaagctgttttaataatataatagatagatagattgatagatatgcatcattgggggaggccaggcctccctccgcccctccctaactttggcccttatgatagtcatggaaaaactagacctattagaattgaaattgtggtatccacaaatactatgcatacacatatattactaagttggggtagagagtgggggtgtctatgtgcagtggtgacaggtgagtgtgcaaaaatccaacccacaataccatgcccaaccgatatgtgcatgatttagggtgcgtttggttgacggtcaaggttggatgggatatggtggccagattttgatcgatatggcgatctattttttgtttcgttgagtggatatgcgaatcagttttttgtttggttctagggatgaaggtggatttggtgatctatttttttgtttggttagagagctaggaaggatgaatggttacaatcaccccttcattagaggcggtgagtataccccttcatattcataaaagccacaaaattattataaatctaatacaaataaacaaatctaaagagaaataaaaaaatcacgaagaaataaaaagaggaaaaggagaaaaacaagaaaaaggaaaaaaaagtcatcctccatcttctcgccggccgctggcttgctcttctcgccagccaccggcgcatctccttgctcgccggccgccgcctaattcgctccatcgtttcgctcgcttgcgtggtgaggggtgacgcgatccacctcggttggtcgtccagctcgcctgggcactctggcggctgcgtccaggcaaatcggccggatccctccatccggcatctgggaggaatattcccctccgggtcgtcctatcccacctccacccaccaaccaaacacccaaaaaaagggaccgtcatgtcttatccacccaaaacccaccatccaaacacaccattagagtttatacctgtggtatgtccgacttgaatcccaagtacaaccgagagttttgtgttgtatagtaatcagtatcatgtccatgttaaatgcttgggttgcatttttgatgatattattccgcaaaggtctttatatgtacaaagtttttttttcctaagtttattcatacaccg

SEQ ID NO: 20751 - DNA, 26736 bp, Oryza sativa
tgtatacgtgtatacaaactttgtatacgtacatatacaaactttctctccgtatcttttttttatacgtgtatacaaactttgcctacatgtatacaaactttttacacatacatatgaaaaaaccgaaaaaactggaaaaaaaatatggatagaaaaaaacggtgcaaaaaaaaacgcggaaaaaacagaacaaacaaaaaaaaaaaaggaacgtgcgggaaaaaaggaaaccgaaaaagaaaagaaaccgttcgaaaaaaaacacggaaaaaaacagaacaaacaaaaaaaaaaggaatgtgcggaaaaaaaggaaaccgaaaaaaaaaaaaaaaccgtgccaccgcctgtgccactctccacgcgcgacacgtgtccagtcgcgcgagagaggacgcgcgcgactgatcgcgtattagcgttctcgatcccgacccgttcagtctgggtgaaacactgaaacctccaaacgccagtcaccggcggcactccgaaaaggcaagtcccaacccgttccagcccaacccagcctccgcagaagagcccaatagattcaccctcatgggtcgccccgccggcccactttgcacgcgagtattgcctgcgcagcccaacactcggaccgtacagcccacagaaaccttattgtcggccaaggcccaaaggcatctcaaaacactcgaattccggtccgcggttgcacaccacaagacagtcggcagaagagttttttgactcctcaatccattgaaccttcctgtccccttccttgatgcaggttggtaattacaccgaacagcgacgtctcatccaagtacgcttaaatatctcgttcatttcaacattaactgctcctgttcgtcgaatgcaaaatcggcagacagagaccggacgaccattctcgaggctaaaaacgtctaacgttgaacaaagcaaagcaagtaattgccatgtacagatgtactcgttggtgatgacagtgacggaatccccatgttgacctgctcgtctactaacccaaggttagcttatccggtgttgattaaaccggcggcgaggtagtagtagtagtagggctttgctctggtcttgcaagttaggttagtgattagtagcagcagaaagagtggaagatttagaggataagggatagtttggtcatgtcggatacagccttgtcgggcgcgccgccggcggcgaggtcggaggattcgtggagtcagcagcagagctacaacttcagcgggcgcgtgctgctcacggccgtcgtgatcctgttcgtgatcgccgtcgtcttcgccgtcacccgcgtcttgctgtactacctcgtggtgcggtccggcggtggcggcggaggccgtcgtcgtggcggcctggcaggggggatcttgcggtcgttgaactcgctcggcgtgagcggcgccgcgggctggacgcgtccgcgctcgccgcgctgccggtcaccgcgtaccggaagaacggcggcgggggcggtggtggggagggctccaaccgcggcgggcctggcgccaccgccgccgactgcgccgtgtgtctgtcggagctcgccgacggcgagaaggtgcgggagctgcccaactgccggcacgtcttccacgtggagtgcgtcgacgcgtggctgcgctccaggaccacgtgcccgctctgccgggccgaggcggaagtacccaaggcgagggcttcggcggcggcgacggcgacggcgcagtcgtcgtcgtcgctcggtgacggaggaattaccgtggtcgtgaccatacacggcggctctgacgaagccggtggcaggtcaacggcgttgactggtcaaccgggatcctcgaactctcctagctgcgaggctgcaaggaattgaggatcgacgatgacgacgaacttcagagttgtgatgtgattctttattttgctataggagctctatcaagtgtagattgtgaaacgcatttgtgatgtgattctttatttctttcccatatatagctaagaaccaactgcataatacattccccgcaaaagaaaaaaaagcaaaagtaaagtgcttctgtggtaattgttacgagttttggtccattgaatatagtcaagacgattgcatagctttgacatttgtgcaatacccaattatctaacacctcatctcctccctcctcactcctaccctgccgccatgactcaattgagagtccacttgatgccgccgcttcctctgtcgtcgtctagccttattggccggtcagaatgcgccaatggtgccagcaaggccccacaaccggcctcatcccctttcctagctttccttgtagttggccaaatgggccgcccggcccggtccgagcacgacaaggcacggcccgatcgatacgtcgggcagtgttgtgcccgcccatgggctgcaccaacagctcaggcacggttcagtaagaagggtcatgctgggctgggccgaaggcacaacaggccggcccatcgttctccttggaataagtctatttttcctccctcatctcttgggttgtgtcttatatgggtataaataagtctattttgaatccctcatatctttgggccatgccttatatggctagaataagtctatttttccttcctaatctatttggcctccctaatcatttgacctggtcgtgctaaggaagaggcccaggcatggcccagctttcgggccatgccgtgggctgggccgtcgggccccgacccttttggccatcaatagctctcatcctcctcaagctgatggcggcgaggtggccttacccagccatcgttcacgtctctagcagctcccatggctagattagccaacaccaaccacatcctcctcttaggcacaagcttcagtttgcccttgccgccaacaccgacccactaccttcctccatccccacggcttcatcatcggcaccggctcctcgcctcctgcccatgtcgatcgcccaacgcttggctgcctttttccatggtcatcactcttaagccaaacgatgttctccctctttcccctccccatttcctctctcaccccaactcaataccctaaagcgcaactcgcagggacatcgccggatagaagagaagtgttggggtcgctggaacatgaattgtgaagaaaatcctaaggttagaaattttcaaagttttggtctcaattttctaccaacaaccatttagcaattctgactatagaagggctttagggattgatttccatataagttatatctcttcacttttgttggtcaaatttgtcttctcatcattatttgttagatactttcatgtttggctttttatcaaaaacaatgtgattagtagttgtagcttctgttgaaacaaaggttggattttatatagagtaaatttcactttaggccatcattttattaccgatgtttcactttggaccactcttttatctattatcttaaaaatacatttgtcagatgtaaacaatgcatttgtaaagtaaaaacaatataagttgcatgtgactacaacataatttctatgtgactttcacataattttgaactattagatttgctttgagatacatgaaagaagggaaggaaaaaatcaccgtgtgcaaatgggtgaggagatttgatgatgcaacctccacttcacaagagtagcttgttactatggtatttttgaaagtttcgtataagttatactgtagttacatgcaagttacatactacaatataaatgcattacggttgcactacacttatatctgacaatttttttagagaaaatttatcgatagatattataaatagtctcagatgctcccacctctccttcaccagttaccacctttcaccgcctacattgatgattagccaccacgcaaacctacaccaccatagctaccggcttgagctaaacttttgcttccatgctgtttctctctttctccctctcttttcttattacatcctcagattgtcagataccaaacgaatgaaactatcctgagaaaaagtaagattaatcaaccatatcagttcatatctaagaacaaacatatttgagaatggacaatagtaaaattagggatgtacttcagaagctgtcggaaggaaggtaggaccttcctcttccaccaatacaactgagacctccacgcggttctaccgtcgccaccacaaatgagtgcacatgtatgagtgcacaaattggggcgaattggactggttttgtctggtgtcttgttctactcaagctcaacttgacccattggcattcttacacctttaactaaaacccaatgaaccggcttgacccacttacagtggtttggtttggattgggttgacaggttaattggtttaattttcaaaaaccatgaacaaccatacatacatgggcaaagtctttctgcataggctaacggaataccatgaagaaagaggaccagggtggcatttctttgataaagtaggtgaaatcccgcgtgttgttgcgtttctttgaaaaactaggtgaaaccccgcgtgttgctgtgggagtttagtatgataacagtaagtaaaaataatgtgtaaaatagctagacaacataacattacgtaagttaatgtggtctatgataatttaaatttaaatagtatatagaatgatgatttaaatgtaaaagtaaggtgatatgactttatgaaagaagaaaagtattgagatagtttggaccgtagattaatcatctaaaggataaaaacagttgaggtgatatggcttaattaatgagagaagaaaaggtgagagataatttagaccatagattaatcatttaagcactaaaaacaattgatgtgatatgacttaatgagagaagagagaaataacattgacgaagtgaggatgaactatataggtacatagcatattataaaaaaaataaagatataaattgaaatattatgtgaattatgtgggatgatgatttagcatgctttcattttaaaagctctaaaatttaataattataaaataatagataatatagcttgttcgcattatgttcaaatttgatgattgttagtggatgatgatgtggcatttttgcatattaagatttaggagttagtgggttataactttatagtaagagatgattcgattgtatgatagtatttatttttgtagaacttgtacttgttgatgatagaacatagattctaaaacttatcgatggcaaaacctagatttcctctgaatttttattttattctgattttcatttagtcgtatatagtatttggctcgaatttttcagtttttttctatttttaatacggaattagatatttttaaatcgatttttcaacagggatttactacatatgtttcaaaaggcgtattttattttgttaagacaataatttaatcaacagttgctctattagaatattatttgtgtaataaagaaaatattagaatatcataagcaattagtttttttatattaataaattaattttgtgtgataaaattatatcgtagagtaatcattggttaaagtcttgacctaacgaaacaaaacacacctatattttaagatgaaagtaataatattcttcgtctaatctaaaccatcatatataattgtctcccatgctaatataagtgatatatattttttatttggtttatttgctaaatctaagctttttagggcgaacgtgaacacataattttatatttccttaagtaagataacaacttgacaaattctcatagagagagtgtacaaggttttcatccttgttaacctcaagggtaaacggctcaaggacattatctgatgaacttcaaccacttgcatggataagactaattatggagtctcttgaaacttttcattattgcagtttcctctgtaaaatctttcattttttcttaaaaataaagtatgataattaatgcatgcggtttgtcagttacttgtgccaaagcattccaaaaatagcaaagatccaacactccacaattaaaggtatcatataaaaggtatttaagtattgctatagatacttaggtaggaagggtaaaaggataattttcttaagagatgaaaaatgacataattgtcgtaatattagttggaggtacattgataccgcatcggtagttcatgaccatcggatgctctaattctccattgcattatttgcgtactttttttgtgatttacatattgtttctaagaacacggtcgattaaaatatcaacaaattattgtgtggtttcacgaactttgtggttggttaaaatatccaatctgagatattcacgaactttgtgtcgtattttgaataagacgaatagtcaaatgttagtcaaaaagtcaacgacgttatacattaaaatacggaggaagtagtttactgtgagcagttttcaatgaagagcatcatcatgtggaccccacctttctaacccctcccactaaaaggaattctagaggcgagacaagtttagttcacacgtgccctatacagggtatatctacgtgcatgtaacatgcatgcgtagtggtacgtgcgtgcgtgctcattcttattgtaaaaaaaaaaagagagaaaaaagttagttatcaggcacacattttacgagcctaaaattcatcaaaatcaataaaaccacatatattattcgcattgcctcaacaaacaaatattattttgccacgagtctaaaatttatagttggccataaggcccgaggcccgaaggcccggcccacggcacgcctttttggcccggcccaagcacggcacggcccgacttgggtcgggcccgtgctggcccggcccgaccgtcgggccgtgcctgggcctccccaccggcacgctgggctggcccggcacggtcgggccggcccggcacgatgggccggcaggccaggcccggtacataaagtatggggactaaaaatagacatataaatgtaactgtctaaagaatagggaccttaaatagacttattttagctatttatataccccagcccaaagaagagggaggtaaaatagactttttgtagctgtacatatgtcacagccaataggagggaggaaatttagacttattctgaggaaaagcacgacggcccatcgtgccttcgggccggcccggcacggcccgaggcgtgttgggccgtgcctgggccgtgagtgcggcacgtgggctggcacggcacggcccggtgcgtcggtcgggccgtgccggcccgacaagcctcggcccaggcacggccgggcctgggccgtgccgtgccgggcggcccacatggccaactatactaaaattcatcaacatcaataaaacacatatattattctcattgcctcgacaaacaaatattattttgcctccaagaggcctaactaaataagctcaattatcgagacacatcagcattttccaaaatgctatctaagaagagacagacagacagacagacagacagacagtcggttcctagttcctcagaaccatgcaccagcatcaccagtaatgttgtttccccaaccggacgaagacgcatgctcgacttccggcaaagcagcttcaggaacaccaccaaaatcaccagcaggaggaacgcccatgttatcaaccccggagccgaagtagatctgtccatcatagagaggagaggcaaccaactgttggtagccgaacgggttgtcgtcgttgcctatagctgcaaagcctgcgtcgccggcgccagcggccaccggctgtgcctgtgagagccccacgttctcaaacatgtagtcatagttttcatactcttggggttgctgctgcacggccagatcttggttatactcttgtgctgcaggtggcaggtgagcttccaaaggcatctgcaatggaggtggaggaagagcatgcacagatttctgatcagccattataagtgattcttggaacaatggagcctcgagtgggaagtgatcagctcccactggcatcagcaatggcgttggtggaggagcatggaccggtgcttgatcaggcatgagaaatggttcttggatccatggagcctccagtggcatgtgagcttccactggcatctgcaatggcgtcggcggaggagcaagcactggtgcctgatcagaaaacagaaatggttcttgcatgaacggagcctgcacttgcagtggcaggtgagtttcagccacaggcatctgcaatggcgatggcagaggagcaagcgtcggtgcatgatcagagaatagaaatggctcctgcagcaatggagcctgcagtggcaagtgagtttctgccacaggcatctgcaatggcgccggcagaggagcaagtactggtgcttgatcagcaaacagaaatggctcctgcagcaatggagcttcctcccgtatcagaggtagtggtgctagctgtgtgctgacctgtgccggaggcggagcttgctgtgattcaagaaaggatggctccatcccggcaaaccgtggtggtcgcagcggaagcagaccagcccatggcgacccctccaccggaggtggaggcagctcagggatccagagagaccctcctgctgctggcggtggaggtggaggtggctgatcagcgacaaatggcggcggcgccacaggaagcaactggttatgaggaccggacagattcggccattgcggcagctgcagctgttgctccggctgcggcggtggtggcggcggcggcggtggaggtggcacgctagagccctggattggccgcttgccaccgcgacgacgtagcgggggtagccgcacgttgagttccttcttgatctcaagcatctcagctaacagttcattcatctcgtctgagctgagcttgtcggccttggagaagaagagcttcttcttcttcgtgtcaccctcctcttcgttctcctccttcttctgggccatcttgaaccgagctttggatgctttcgtcgtctcatccttctcggcagcttcacccttcagccaagccagctccctctccagcggcgcgatcctctccatcagctgctcgtcggcgaccggccgcgcctcagccgccgcctcctccacgtcgcttgagagggcggcgtcgacgacggcctgcaccgtcggcgtcccgaccgcgtggaacttgctgcggttctggtcctcgatgaccacggcgacgctagcgccggtgaggatggagaggtcgctggcgcacttgaacagcccgttccgccgcttgaagaaggtgatgtcgcgctccctctcgtcgtcgacgtacgccgcgccggtcctcctcgccctcctcggcatgatcggcgatgaggggatcgatggaggtttataccaaaaagagattttgtgagagaggcgaaccctaaaatggaaatttaataaaagattagtttatagtgatagacatataagctagatctaaaaaatataaacatagctagatctggaaaaaaaattatagctagatctacactcttgtttctggatttaattgcttttaatgttaagtggttccaaatagctagtatatacataattatatagatgcatctaccatttttgttaaaaaataaactatggacatatggctaagcatacatatgattcatgttaaagaagagcatcattatcaaaattaaggaagatgtggctacttgggtaagctggagctgcgaagctccgtgagtttccttcgttaggagataactcctgattttttttaatcattttacgggcatgatacttgatggcggatggcctgtgtatatatatatattttaccgcaatcgttcactgctctattaatacaaacacggtaaaacttttgtcgcctctttaaaaaaatgttagtgaacatctaaaattaactacgtccatatagctccactactctatcaatacaaacacggtaaatcttttgtcgcctttttaaaaaatgggttaatgaagacctgcatctaaaattaaatacgttcatatagctatgcatagatatgaatcatgtcgaagaaaacatgcatctcctctaatggagaacaggatgtttaccttagctagggagattacagagatctctggtggagaaggaaaccattaagcgagagctacaaacatcttgccaccttgttggagaccagtcatggtgagacaggcatccgaaaggagatggaagaaactactaaatgatttcttaagaggtatatgtggctatagcaagaatgagctcgatgaagaacaaagagggggaggccgccttcttatatagggaaatgaggggtgtcataataagaagattttatccaatgtgtttttgataaacatgcaaactatagaaatcctaccaattgtcactgacaggatggtcatccttttacatgggtatggtgggtccatttgtcagtgaaaattggttctaacgaatagtagcattatgtataagttcaataagaaaacattacaatgtttcaccctatgagcacactaaaccactcaaaattcatcacagtatggatcaaccaagtgtgctaagaaaactctattttctatgaagaaatcaacgtaaaattgtagctccccgcttaaaccctaagttcacctagcagcattaggtcgggccgggtttcccgggcaaagacataatactatttgaatgatgtgggtgcaactaattattaagaatagtccgttatgtctaaagccaacggtttcgtataatgattagttgaactataactatggtcccacgttaatataatgtggcgcttcaacatcgtaaagacatggtacatagtaaagttattccatttaagttgccacaatactaaaagttattctttttttttctaataatagttctcttccaagcaacctaaggctattttcggcaccccttttctgaacgactcttcctcgttttccgcttgcacgcttttcaaactgcttaatgttgcttttttgcaaaaaatttctatacgaaaattgcttaaaaaatcaaattaattcatttttttaaaaaaaattagctaatacttaattaatcacgcgctaatggaccgcttcgttttctgcacgaactgttccggttaggaacgtggactagcgaacacagcctaaatcctaccagtgtccccattcaatacacaaaattttcatagaagattattttccacaagcaatacttccagcgtgttgtacaaaataggaggccacatttcgttctgcctgtgtgattccaacgtgtcatatgcatttcagacgaattttagccggcacaaactagctcatttttatcttccagtaagccgtttcaatcttgcaacgccaagtcaacatttttgtagcagttactagataattgcgtacaatagaagcgtctgcattgtaccgtaattcccctccgtctttaaccccctcttttttgaggataaccgcgtacgttttcttctgcctttttatagggtatataataatataatcttgtacgtatacagttttagatacagagcttggatgaggacgaaaacgcccgttaccaatcacagccagacgcggtaaaaaaaaagacgcgtaaaatcaatagcaagcaaataaattcacctcattccatatctgtatttactaactatagcaaacatttattcgctttcacaccagtaataaaggtaccgaaaaactgtcaacggaacggaaaatactgtaacggagctgaccgctatcatcatcataggaaaaggtaaaactgggaaatgggctaactgaaacctgtgggacgggcccatgcgaacgcaggccggaccgtactgctaggcgggccgccaacttgggccaaacaaacaagggcctagctggtccaaaccaagcgacaacgtggcaatccaagcgccagctcagcacacacgtcgtcttctcgtttaaacagaaaagaaacgaaggtcaacattatatacggttcgttactaagttcacggtctcacaagtcacaaaagtcccttccttccaccaccaccaccatgtcgtcgtcaaatggcacgacgacatacttgccgggaggagaggcggccggcggcggcggcggcggcaactccggatgctgcagcaccacgacgttgttcggcgcgttggccgcgtcgttcgccctgagcttcttcctcatcaccatcttcatctgccttcgagcactccgcgttgctcgtcgccggcgtgatcgtcccctggtcatggagcaggagcagcggcggccgacgccgcctaggttcggcctagacgccgccgccatcgcgcgcctcccgtcgttcccgtacgtgcgagcccgtgacgacggcgaggtctcggactcggcgtcgtcgtcgtcggtggagtgcgcggtgtgcctcagcgccgtcgacgagggggagacggtgaggcagctcccggcgtgcgggcacgtgttccaccgggagtgcatcgacatgtggctctcgtcccgcgcctcgtgcccggtgtgccgcgggaaggccgcgccggccgacgagctcgccgacgccatagtcgcgcgcatagcggtgacgcccgacctcgtcgggccacgcgtgtctatgtccgtcgtcgtgccggttgagatgctgaagggtgaaatggtgggcgcgtcgtcaacgtcgcgtgccgcgtcggcgccgccagagcagctcgatgcgcgagcgcctggcccggaaacggacttggagagtaaatagcagtcgttttccggtgagccttgtaaactctgctttgtttttggatttacaaaatttgaggagcgtgaaatgttgtatatatgttttgaaatttacattagtcgcttcttgttcatatttacttattattcttctctagtttttagcatcgttgcggaagtgcatgcagctgatcgattgaattatatcatccaccagatattcagattgagattcgatccagtaggactctagctaggaggtgatcgacacggcagcacgtatgtacatttacacacaaaaaaaagaaagaaagaaaaagcatcctaacgtgcggttaaaatgttgctttagtcccttttagggacattgttttttgtaaagatgttttcagacatagttgaccatgcaaacatgaaattaaccagttaacttgaaaccacgacatgtacacgctgttttatccccctttgaaattttctccaataattccagtaaataaatggtgtctgtaatctgttgtattgttagaccaagtcatgcaactttctttatggcaccactcgcaaaattttattgatccacagctatcatattcatgtcgcacctccctgatcaggcattagaagctgcaaaatgtgaattggcaaaatgaatttgttaactcatctgtgggtatgatcatccaaagtatttgaatccattttacatagtacaacatataactttcaaaagaaaaaaaagatatcgttgttttggtggagacagatttcgctcaatatataataggaaaatacaggaaatgctaaagaaaatctgacagtaagcaaaacaatatgttttttaaaaaggaatttagaattcagctgtcgttgtcataattctcaacccttcaatcatttcaaaattaatcaaagcaagatcttgaagtagtattaaatctattcacttacccttttgatacatatggtagcgaaatggtagagcccatcgatcaggctgtgtagtttttttttttttttgaaaattcaccggatcaggctatgtagtcttcctaccctctccacttcccttgcttcatcgtatttaaggtcatcgagtattttttttaagataatagaataaaacatcatgatatttactcaatcagctacaaccaattattataacctaacactcaaaatgagtgtagtttaaataaatataaagacaccaataatgaagaggaaacaaatcaaaaactaccaacccaatataagtagtacacaattatttaattctatttgtgaatcttcatctgaaattggcaaacagtactcaagataaggtcattgagtatgcgtattgcattcataaaacccatggcaccctccacatcaacaaagttactctttcaattgctaaagaggtatccctccactcctcaaataccacacaaatagtcgtgaattttttttaaaaaaatatccataaaaatcattacaatgtgcacctgtggattcgaacctgatccagacacactagaggatcagccgcttgtggatatggttcacaagatatcggcagccgtcatggaaggggaagctcatggcctaggctggcaggccggctagttttcgtgcaatccgttctttcttctatcccggtgcacccatccatgacgattggattgtcttgtctcctgaggtgatcgacaagagacggcgtgaattcctttggaatggttcagatcataccgagtccatggcagccattgccttgtcgcctggcccaaagttttccaccccaaggacttcgggggtttgggcgggcgtcacggacctccaagtttatatgggctgggtgctgtggattcgatggctgtggttgcaacggacgaacgatcctgcctagaggccgatttgaaggcagtccatctccacaaagcagcagaaataatatagcagtggcacaatgaaagcgaagtgaaagcacgattcacacgttcctatttactcgtagccatcagagtagtatcactcacaaacaagctaattctgtcaagggtcaacatgtaccacaacactgttcccctcccccctcattcccgccgcaggttgctccctcccatcaccacaaacatgcataaaaccccagaaaaagacacccaacctattaatttatcccttatcccacactcgatcgatctccccccgcccaaacgtctgcatgcatgcgcgccatgggcgccaatgacggccacctcgacgccaccagcaacaacaggggcggcctgcacgagcagaccaccaccggctgcctccccgtcgaccagtcctgcttcgcgctctcccggctgtcgtaccgccgcagcagcagcagcaacccgcgcgcgtgctgctccaccacctcctacctcgaggtcctcgccatctccttggcctcgctgctcgtcatcgtgctcgtgctctgcgccatacggtgctaccgcatgcggcgcgcggtgaaccgggtcacggtggcagccgcgtcggcggcggcggcggcggcggcggccgggaacgtcaccaacaagaagcggccggcgccgggcctcggcgaggacgccatcgccgcgctgcccaagttcgagtaccgcggcacgggcgacgagtgcgaccggtgggagtgctcgatatgcctctgcgcggtggccgacggcgaggtggccaggcagctgcccaggtgcatgcacctcttccaccggggctgcgtcgacatgtggctcgtcgcgcacaccacctgccccgtgtgccgggcggaggtggtggtcaacaaaccgccggacgaggacgacggcaggtgcgcggagacgccggaggatgaggccgcgccgccggcgtcggcgctggagccggcgagattggagaatggcgagagggacttggaggcgcaatagcagcgtgacagagtacatgaccgcgcgtttgcgttttcattctcaatcttttccttttcctttgggtagacatgtgtagtttttgcgccccattacggaggtgatcatttttttaacaccgtttgattttacgcaagcggtcattagaaaataagaaaatgatagattgattctcattagaatttgcatgtaaaaaagaagaagaaacatagtgtataatttgaagtcttgaacgaatcaatgatgaaatgtaattgctccgttcggcatcagctgctgtggatgcatttagctacgcagcacaaccggtttgaaaaaatgtgtgttggctttcctgtaccaattggcagccatcgcttctgatttctgaacattcccattgtttgtatgtcagggacttgatgaaagtaggctgtaggccccgttattttctgatgttcgggctaatagcactcctttgaattattgtgggtacatttttcaaaccactaaatgttttagataatgtaaaacattttcattatttaaaaatatacaagttttttaaaaatatataataaatgtatttttcaaataaatataattatattaaaaacttgattaattttgctcttaataatccaccttgtttcgtgtgcggttagtaagctcagcttatcatctaaaatgaaatggggccttaagcttacgtgcttacggcccaaagccgagaaaagcctggccctcagatcgattgtagcccaaaatgaagtggtttagcccctactttttcgaagactaatttggcaccgatcgattcgaatgttgtacatgtatagatcttcaaaattcaaatggtacaggaaatttcaagcatacaagtaatacctatactaatattaaactttcctcttatttttgttaataaagatattccagctacggttatatgccaaaaatgacttttcttttgcggaattaattgcggggaataagatgtattactaactaacttcactgtatatgaaccccagtttgttgctccaagcttaccagttcccagtagtccgaaatcaaaataaaccaaaccagctggaaaaagattcctgtcatgtgtccaattaaggctttgttcatcgtgatgattgaggagacaccctctttatcttatcagcttgtgatatgtaatagtactaaccttggcttatggggcccagttctctaatggagtaggcgagtagcagtaatggaccatttagccgaatgccaacgccgaactacaacacgtatcgttgtgctttgggctaatcagggttcctgaacctgatttttcttttttcatttccccctcaccctggcaaaggcccacgcagcgctaaccaatgtactagtacgctggcacgacccatactgaagtagtactaccactaggattgtacacactgtcatgtcctgtgcactcttcatgcgaccattactcgcccgttgtccgatagcgcggcgccaccgtactcccccctcaatccaaccgtcgtcgcgccgcacaccggccacccaccctcctcgcgccgtcgcacgctggcgcgcgcgcgcccactatgtagcattgcgcgtgacggcagcaatggcttgacttcccaacctcgcgaacggcccaacacttgcacgtcaacgttgccatgccttgccgttgcttaacgccagaactcaagtagtagtagtattttattggacctattttagtcggcgtggccgcgtggttgcctcgaagatagagtccgaaaccgctgcggcggcgccgcccgatctgcgagccaagtatcaaaaaaaacagcagcgcgcgcccgcccaattcgtgtgcggcgaccgttgatatttctcgtctctcatctcaccaccggtaggcgcgctccaagaatctcccagtagctcactgcctctctcggtttctcggttctctctcccccccagctgcagacaccacggtggcgtgccggggcgagacgtgtttgtcgtaatggcgacggtgggcgccgtggacggcgttgaagttgtgagcgcactgatcggccagtactacgacgggctggcgctggagctcgtggtgttctccctcgccatcgtcgtcctgcggtacgccgcggtgctctacgcgaaccacctggtcgacagcctgagcgagctccaggcggcggtcggcgccgggatcggcggctcgtcgtcgggaggcggcctcgactccgccgccattgcgcggctgccctgcttcgtgctccctccccgccgcggaggtagtgcggcggcggcggcggcggagtgcgcggtgtgcctgggcgccgtggaggaaggggagacggtgcgcgcgctcccctgctgcccgcacgccttccacgcccgctgcgtcgacgcctggctgcgcctgcggccgacgtgccccctgtgccgcgccgacgtgccggtgccggcgaggccgacagctccacgacgcaggcacgtgcctcgtggcacagtggagtgacgtttgctcgcaaattgatcccacgcgaattcacgcgagagcgggtgagaaatctcacctcgacgatctctattgttcattctaattctagttcgatttttctttctctttctcattcgtagtacgtacagaaagcgttttctcgctggtgtaattttatcggtcaacagaaagagagtcgcaactcattcagccattgtttgttaatttcatttcatttatcttggactgttgggcctgttccgttaaaaaaatagaactagttgtgttttacactcaaggcccaaaaggctctaacaaacaagcccatatgtgactactagtctatttcttgagggaataagttcatctaaggtcccttaattttacaccgaatccaattttcgtccgtaaaccccaaaaccagatacaaacggtcctgaactgttaaaaccggggtaaacgagatccctcggtggtttggaaggtggttttgactgacgtgacgcctacgtggatgaattgactaggtctctgtttcatgtggcattgacatggcgctgacgcgacgtagacgtggcaattatatctcataaaaataataaaatccgtgggcccacatgtcatcctcacaccccctttcttccctctcccttttcttcatcttcttcctgtaggcgagcgaggctgcgaggcggcgacctcggcaacctcaccgccgccgccgcctcagctaccaggctcctccctcgccggaccaccgcctccatcctcctccccctgcgctgcctctgcgccgacgcagcagccagcacgaggcggcagagctcgttgcgacggcgctccgcacggaattccggccgccgctcgtggctcgtggcgaagaggcggagcacggcgtcgggaggggagagcacggcgtaggcggcgagaaggcgggtcgccgcgaaggcgtcgtcggcgaggcggccggagacgagcatggcggcgtggacgacggcgagctcacgcggggtcgtgcaacggtcggccaggagggacaggttcggccggcgccggacgccgctgcgggggaggcgggcgttgacgactccgctcgcccgccgccgcgcccctctgctccatgtcccggagctgccgctgtccccgcgcctcactccccccggggcacgcgcgtataggaaaggggaagaggaacgaaggagctaaagccgtggcgagccacgagctcgtgttgtctagtcgcttcaccaaagccggcgtcgtcgcttccccatcaccgacggcctcccagagccgagagcggagggcgacgccgaggtggaggacaacgccggaggggacaccagaacccgattgttctgcaccacgaccaaaatcatgcagcaaccaagcaagagaaacaaattaatcagcatatggtgaacatttgaaaaaaataaaataaaattcatgtcgcgggtgcactgcaccagagcgtacaccatcgtgcgcggtagcgttcagcagcaccgcgacgtgctcccggaacctgccggcgacgaaggcgtccaccacattggtgttgttcagcggctactccggcttgttgccgtacccggagacgaagtccacgtcggagaacaggagctggaagcggcctgttcgtcctgttcatggcggcgtcgaacacgtccctgatgtagccggcgcagaggaagaaaagagaggggagaggaagaagggagaagtgaggatgacatgtggggggcctacgtgggccccaccattttgtagttattttttttgtgtgtagctgacatgtgggcccaccgttttttattttttccaagatataattgccacgtcagcgccacgtgggatgaagacctagtcaaaccagccacgtaggcgtcacgtcagccaaaaccgccttccaaaccaccgagagacattgtttgcaccggttttgacagtttaggacaagttgtatctggttttgaggttaaaggatgaaaatcggattcggtgtaaaattaagggacgttagatgaacttattcccttcctgagcaataggctcactgtacccactactacccagggccatttcaacttgtgccgtcaacattcagcggcagcatgtcatgccatgccacgccatgccactttgatagggcataaaccgggccagcttgtgcgcaaatcctccaacgaatcccggcggtaccttcgtcacattcacaacggcggaaccagaaactgagggcggaaaggtagggtgggacgtgagtgcacgatccattgcttctctttgagaaaaagaagcgattttgaccgacaaaaggtaaacattttggggacatgttcagaagaggggagggtcttaaccctcacctttcgtgtcgaatcattgcagcttgaagaagatagtgagatcttttcctactactgtagtagtacatgggcttaccggcctctgtttggctaattttgctggaagagaatttagtacagatcttatcttcctgtgggcagagatgctagtgcagcatctgaatctacgagaaccaagcatagcgcatattgcaatagtgtccggagtcgctaaattctccttgtgaggaccttcaggtcatcaggtcatttccattcttttttccgtgtttgtggttaaactgcgtgctagtttattctcttctttttctagtaacagaggcatcttgctgaattgattagaaccacaggaatcctgaactcaacaaatacagtacatgtacacccgacatcagcatgcttaccatactaacgtctgaaaaggacactagtaaacgcgtgatactgatgcgttcatcactgtaccattcttaatcacttaaaagcagaagcaggaaatgcatcatggacctgtcatgaacccaaagaaagaataaccatccgaacgctagccgtcagttttgctcgtctgcattccataacctgtcaattgtcaagtctgcgtgagctccttggcctcttgcccgtgtcgatgaaaactcaaagactacctgggtgcacttttccgaacccttttgacacacggatgattaagtgtcgtcagtggtgccattccagggcaatcaggtgctgcacctaacagccagcctctgaatcaatcactgtccattttgcagtcaccagctgacacatgaccatcaagaatttgacgcttcggcagtactggaaacagggtgaaaaatgctacactgcaatactgctctactatttcgatgttgagattagtgctcctttttgttaacacgattgagaattttagtacttcaaatcgacttgtgattcctaaatcgatctcgcgatggccgctcgctaattctgtgtgctaaaaaggctaaaaagcccaaaaggcgtacgtgagaccacactggaatattgatttgcagccgagcagcctccactactgggttagtgatgcaatcaatgaacctttcttatcatgaaacaaataatgcagcttgttaaattatgaccactaaagtgctaattttctacttcctccgttttacaatatcagactttatagtattatccatattcatatatatgctaatatgattaatgttagaaagtctcaaaccgaggaagcaacgaggaacgccaaacttatcgacagcttcttgacggcatcacgagttcacaacggcttgttgacacggagatcatattattcatgctggcgtgcataaacgtgcaaacctcgctgatcagcgctagttaacaaaaaggacaaagctatggaaaagtattagtggtgtaatggtaaagtcatgggtgtattagtaaggttagggattaaattatcgttattctctgtttatttaaacgttatttaaagagtgtatttacatacagttgtgtgagtgtactatgcgtgcgtacgtgtcttatgcgcaatagagaaaatgaccaagcaaagcatcatgagtcatgacaagccgctaacccaagcaaaggatattcagtgataaaaaaaaaacaaagtaattcaaggttagccaagtgcgcatcaagaagccaaaggggttgaacaccaaacgccacgtcaactcaactactggcataaagtttccttccgttcaattttagcacctcacatttatcttaaaacaaatttattttcaaatatagttattgcattgagagtttatgaaagtagaaaataattatattggtaataaataaagtgagaaatagttgtatttggatttgataaagtaggagtatttagttttctttatatatatagagtatattggtatgtgtgggataaatgagaaatgaatttattttgagacgaaggaaatacatatataaatttgctgagtttttagattaaaattatacaataatgtttacgtgcatggactacttcgagagtatacgaaggctctctttaaagaacttaattttgagaaacaattggttggtaattagtttttagaagtttaagaatctgagatattgagaaatccaactcctaacttttagttcattttctagattctataactataatttttcaaaatatgaattgaaagctataccttttaggaaaacttttgattctaagggcctgtttggttcgcgaaaagaaaattcgggtttcacattgaatgtttgaccaggtgtcggaagagattttcggacacaaatgaaaaaactaatttcataactcgccgaaaatcgcgagacaaatctttttagcctaattaatccgtcattagtacaagtgggttactgtagcatttatagctaatcatgaactaattaggctcaaaagattcatctcgcgtttttccctctaactgtgcaattagttttttttaattaatatttaatgctccatacatgtgtccaaagatttgatgtgatatttttgataaaattttttagggactaaaccagacctaagagaagttatcaaaagctgtcaaacatgctcatattaaccgtcaacaagttaaacccttctgtcacgccccgaactagtaccgaccggaactagctcgtgacgctccaaattaacctgttgatcgataccagtcccaggaaacagtgctggtatcacagggagacagaatatcacagcaacagcggtctcttcattatagagtagggatacagtcatgttgggctacggacagatcccgagctcacaactgcattacaaaagggaaacggaagcaggacttggaccaaacaacacaggcgcgacttgggaactaggccgaaaccctaaaactcatcgtagccggcttgctcctgaaagaactcctcatcagcaggatccgcttcatcttcttcagcaactggggggggggaattatttatatagagcaagggtaagtacgggagtactcagcaagccaagggaaaatagatgtttaatgcaggcttcaaggaaaggctgttgtttttgcagttgattttatttgaactctttttctaaaaacaactaagtgagtgcttctcaaacgacacggttgagacggtgcgtctcgtccggtcggagtatgtgcaatgtatcagtctttaaaatttaaaacaaggttggcacccggccaacagcttttcaaacggccacccgggccaacaactttcaaacggccacccgggcctagctgatcccatcagctgcagatttttcaaacagcgaacccctttccacaacagcaatttcacaaccagtagtcaaacaaaactacgctaggaatcacctcacatccgcccatgaccgtgggcacggctgttcgaacagtttgttaacctctgcagagggggtacactttacccacacgacattactaacccggatcacccagcccgtggggatcagccacgtcgggagacctccaagctttcatgacaaggcatttccaaagccgacacaggtttaccatatgccgacgagaggggtcccagaccaacaacaggttaggtcccagaccatactgtgccaggaagcccaggggtcctccccgacaccaccccggcgaatccacatgtctctcggcatcaaggctcccctgataagctagttactcagccaggggtgtcccattccacccatgtggtcgtacttgtcttatgttcggatgaaattccaaggaaacggtccttaagtgcaagagcgggaaaaccgtacacccggtacgttccccggtccgcggttttagaaaatccatttagttcgcaagcaccgacccaggtgtcgggttttccaagtcttttgtaaaactcaagttttacccaagaagttgctcagattttaaatttgaaggcgcccttcggtactcgcacagattgcacgatttcagaggcgcaactgggaggttacaagggaacatggtataacaattaacaaaggaaggatcaaatgcaacaaactaggtagatccgccaatctgccttacagacgggacaacagattaagtgcgatcctatcaatgcataatattttgcaagcaacataattaaatttcaaatataggctcaagatgttcaaaggtggcttgccttgctcgaggtctggagcttgatcctcgaaatcctcgcgttgcgggtctttgggctccgaaactacatgcgaaacgggacaactcaacaaacggcgaaaatgaagccctaataatgacctctaagcgtgccattagatagatctcgagatttgaggaattttggaagttgaacggagtcaaacggatctacggttgggaagatattgaatttctaagattattggatttttggtctaaaggaaaaggatttaattaaatcctttttggaaaagaaaaagaaaataaaaggaaaagagggagggattatagacttctcctcgggcggctagggcgcggcccaagggaaaaaggagcggaccggccgagctaaatgggccggccgacccaaggcggcccaagtgcgcgcgcgcgggaggggaggagagagagggccggtggaccgggctcaccgtgcgcggtcccgggtgggacccgcttgtcagcggctcggctcaccgtgcggagggagcacgcggcgcacgcgcgcgggcgggggagggacgcggtgcacgcgcgcggtctgcggaggaacggatgcggcaggcccacgcgcagcctcacggctcgcggtggaacgcgcgcatgggaggggctgaccggggtcggcccgtcccgacctcggctgagctggcgccgacgtggcgcctacgtggctgccacgcgggccggcgggaggtagacgacgacgccggccggaacggacggcgggcaacagcggcgagcggcggagcgaaccacggcgataccggcgaaagcgagcacaccgggtggttgcacgagacgaggggagacgagccaatggctcggattcgccggaggaagcttgacggcggcgaatcacggcggcggcaaccggcggggagggaagagggaaacggcgacgaggtcacgaggggccgattcccggcggtgagagcatctacgcggccacgggaatccgatgctagcgtcggattgggtggagctacgccgagcgaggctggcgacgagcgggtgctacggagctcgagcggcgacggcggcgagcacacggcgggcgacggcaacggtcggggcggcgccggctagctacggggaggctactcgtgctaccaccgaaaactaaggggggagatggagcgaggagaaagaacggagggaggcatcaccgaggtgaggaggggcgctgtgacgagaggccgacggctcgggagtaatctctccggcctcaggccggggaagaggaagaagagggcgcgcccggagtccccttccgcgtcctagtgcgcaccggctcctccggcacacacgcgacgacgaacggtgacggcgaacaggggcgacagtggcggcgagagacgaaaacgagggagattggagggggagggcttgggtttaaatgggcggcaatgtcggtttgggagaggggaaccgacattggacagtcaaggcgcgagctggcgctcggcgcttgcggccaaaacggcgacagggcggagggaggatgacgccggcgggaaggggaaaagaaaaagagggagagaaaagggggcttgcccccatgcttctttggggaaaagaatgaggggagcgggagcgacgcggcagagggagaggggctctgcctccgccccttggaggctagcgcgcggagtggcggggccgaggcgatgacgacggcgatgacggcgggcggtgtggagcggagcggcgacacgagcgacaggcgcggcaggcgctgacgacggcggcgaccaggcggtcggccaccacggcacgcgcgcgcgagaagcaacgggcggcgaccgcgcgggcgcgcgcacgcgaacacggcgcgcgggaagcggcagcgagggagcggagagggaggactcggctcggcgcgggcggctcacgcgcgcgggcagagcggagggggagggagcgctcggcgcggctctcgcgcacgcgcgcgcggcgcgcgggcggagcggagggggagggggggaaagagagagagagagagagcggacgccgggagggagggggagatgg

SEQ ID NO: 20752 - DNA, 8586 bp, Oryza sativa
agatgggccgagagggattcggcccatcgaccccgggggaggcaaaatagacttttgcggagggatttgatttggaaggatttggattcggaattggactcgacgatagatcggggattgagatccgggatggcacggacactagacaacaagcaaggaaacaaatttcgcaattagggttttttaagagataattttcccgctatgcgccacgacggaacgggcgctacaccttcgaggctagcctgtttgaaaagatattttttatggtgcttgttaagaatactacacacgtgacgtagtaaaccaatggaaaataataggggcaattataaaattttcactggtttattcaattttataaggatgtcactcgaatgataattctactgacattttataattttgtttccagtgacagtcttgtaataatgatttaaaccagtggtaaatttatgattgtcccaaagtaatgttatctttaagatttttatttttgtactctttgttaaaaatataaaacgagttgaagtgatcgaaacgatggaaaaagctatgtatctactttgctcggaattcatctttccactataaactacaaaattggttatttttcacaatatttgttagataaatgttttttgatagcacaagctaaataatgtaggtaactttcatgggtgtggacctaaataagtagcatttgaatcaaacaaaatttactcaataaggtataaatagaaaatcgacctcatttcaaactaaaccactacaaaaaaaattaactgcagaattataagtcacggccccaaacaagcagggctccgactgcaagatcgactgcggagcacacatgctacaggcacagcccccattctctcgatttgccttagagcacaatagcagattattagccagctataaatatattttagaaagataaagatgatagagaagagcatcgggctatatatctgtagctagctgcagtacggattccaaacgcaatgtgtatatgacaggtgagaccagatattaatattatagtaagcaactattgtattaattggttattaaatattggttatagatgatttatagcagctagttgactctactattggacttgctctgatagaaaattgcaatcttcccacaggccagggcagcgcgcaagcagccagccacaccgagacggcgtcgcataaatatctcgcgcgcgctcacttgctcacggccccgccgacctcacgtcaccttttgttgcgagttgcgcaccgtgcagctgaagctgccaccaccagctagcactgacccgcctcctcctttatatattgccccggcgcccccctttgccccagcaaacgcgaaccaaaacacaaagcaaacgtccatctccgcagcttgctccggccgccaattacaagcgccccacacccagctgcttcgccttcacgtccacttcaccggagttgccatttccaatcccaaaccaaaggacttcattggattgcgaggggagtggagttgctgtgctgctgctgccgctgccgtcttcgacggtgagaagccaagaaagaggcggaccatgaacacgcccaactcgtggctgttcgcagacaactccaagtacagcacgcgggcgcggctgctgttcatggggctctccttctccatcggcatcctctccttcctcgtctacctcgccatctggtacacctgcacccgccgccgccggagccgtcagctccgcggcggcggctcggcgtccgcggatcaggaggcgcccgaggcgaacagccacggcatgagcgccgccgcgatcgccgcgctcccgacgttcgggtacgaggcctcggcggcggcggcggcggcgctggattgcgccgtgtgcctcgggcaggtggacgccggcgagaaggtgcggcagctgcccaagtgcgggcacctgttccacgccgagtgcgtcgacgcctggctgcgcgcgcactccacgtgccccatgtgccgcgccgccgtcgaaggccccgccacggccgccatcgccaagaaggccagctccggcggcggcgccaccgacacgccccccgtcgtggcaccagccccaccggcggcggcagaggcactgccactgccacctgtctagcttgctgcctaccagtcgccgccgtacgtgcctccggatggaccgccgcgcccgcctcgggaagcgtcagcgcatgattgaggaagtagctaaagctacatgctacagtgacgagactagagtgaaacctagctaggatcgacgtcgtagatcgagaggcagcctaatcaaccaagattttattcgttcgtgctcaagtagctttgtacgtagtacgtgtacataccgttttccttattatagtgatgggtactactatatgaccgaaaatttccgtctcttcccacacaaccaccttgctgatgagtagtgctgatgaaaacgtcgcaggcaccagcaatcgtgtgctcgcgcgcaacggcgcgagcgtcctgacacctttttgtcccgtggcggctacttccgcggtcgcgaacgaacgtttccgttgcacggttccgcctcccccagcgaccagctagcgtcagccgtcagctatacctctcggtctccgggcgccaattcgcttcgcggagccgatcaactcggcattgattccgatggtgcgtgccagtgcaagcgatcgaaaaccgcgtccgccgcagcctcccccgatcctttccttcaccgccccgagaggcaaagcgaaaacggattcgatcggctagaaacgttggtggagtagtcgtcttccgtgggaaaaaaaaaagaaaaaggaaaaattctgtacgtacaaatattttttacaaaatacttacaaactctgatgtgacaagccgtgagtaaatctaaatttcttataatttttattagttaaatcaaaacggttgagaaatatgtgttagtaaaagttttgtaataaaattatagtacgtctatcagtgttaaaaaaagaagatgtgtccaccgctccgagagatcaatttttactgcctgcgagtgcggttcgggtgctggtaggcgagttttatgagcggttgggaacctggaagaaacatagggggtcgtctctcttctctctctcgctgaccccatttgcggctttcgcaaaagtggcggagcctttccttgtcctttctatctctgatctctccacctccatcggtttcgttttgtttcctcgcccgtggctttagcatctccagctagcttgcctctgcatgttgcgtattgctctctctgtgcgctgtgtagttatgatctctgccggtttatctccagctgtggtcactcgcctcctcctcatctcatcatcaattggttcactagttgggtgcgtaaaacacgtactactagtacttcacgctcgatggatgggaagactagtgggtacggtgtacgtagtttgtgccaattaacgagtaggttggagttagcacacgattcaatgagccacacacaccgtaccgactcgttcgatcgcctcttttctcatgctttatatggtgcgaacataccacgatgctgcacgcacctttgcactcgtcgttgcacatgcgagacgcatctgaatctgaccgaaccaaccagagccgcctgtactgtctcctgcaattcgttaatttggtccgccaggaaggatgagcgcgagaacgcaataactgcaagcggtgacgacatgggggctaaagctttagcttacggttgcggcgggcggccggaaaggcggaaacctgtgtgtggctcccgaccgtcgaatggtttgggcggcaacggctgcgtgcccgcgtgagctaagctaagcagccggccgcggccacgagctgagcgcgcggacaactggaaccgagctggtgtgtggcctgtggcctggttgatgatgcgagacgagacgatgagctaaaggtcgtagctagagctgcgtgcgtgtgtgcgtgcttgctttgcttctgttggacaaaaaggaggggggaattcaatgcctcgatatactactcctctccttggcttgttcggtttctctaggttaattggagggagtgcattgatcgtctgatcaatctcggcagctggccagcctacgcaacattgcaggcaatgcgtgttgggtgttagcgcggggacctggcctagctactgctaccgtggcctttctgtttgggccttgaggtgcaaaggggtggagatggcaaagcagtctcgctttgcaacttgggccagaggcggtatggccacggattcgtatcatctgtagtctgtgcagctagttccgagttccgacagtccatgccgtcaatgcgccaggacaaaatttggcatggagaaagaaaaaacggggaaagaagaaaatcgaaaaagaatggaaatcacaaccaattgatttggttcaccaagtagcatgcaataggtcctcttttccggaagttggttctggttcataaccaaatagcgcacgtgcaggtgtgcacgaagcgcattactgtccttcatggtctaaacttaaaactagtgagatgcgcggttatgcgttgagtgagtactcgcgttgctgcagagatttttatgaaataaaataagaaattttattgtccttaaaaaagtatatgaagataccaaatttgatttacactagaaaaatatgataactcccggtattttttaagaatggtaaaattacccataaaataaacaattaagaaaatgctagtagacgagaatgaaagaaaatagtaaatcaaatcttcttgatgcctatatagcgcaattcaacggaaggatgagctcagctgcatcaaaactaatctggaagcaatgggcaccctccaaatgcaaacactgtgcctggctattgctacaaaatagaatttggacagcggattggctacagatcaggcaatggccaaacaactatttctgtcaactgtgctacaggaatctagaaacaactcaacatctcttcaaggattgcccttttatgcgatatatttgggagagggtcctaggtaggctgaactgcaataaaattgactagacacatgatgaaaatgtgccactgctggactggtggatcagaaggacatctcgaggtggaaaagacagagccaaagaaaaaacaatcagtcgacatactggtagcatggaaaatatggtgtgagcggaacagacgagtatttcaaaatcaggataaatccgcagctgctagacaagatacaggataaaatcaagctatgaaagatatgtggagcaacaaatatcgcgagattatccgcctaggatgttttcattgtttagtagcttcttctttcctctctctttctctctttcacccgttttgcgatcttgtaaatacttttttttctcccctacttaatatatataacaccagctttgctggcttcgttttttttttaaaaaaaatcttcttgatgatgtggcctgacacatttttcttataggagtaattgcagatgctgaattgtagtaattaactgtatagaatctacatagaggatgcacgtacttccatttttttttgcaggacagatgaaattttgttaagagcttggagagagttacaagaaatttttacagcaaacatattgcatacggacttgtgtttatattattcgacatagttttcaagcgtgtgaaaaagcatgtactctcatgtactcatatatcatatatgtaggtaccaacattagtagtgtactatgcataacgcgtattgagtgtgactgtgactaattgtagttcatcgaaaaaaacaaataaacatctgtaaatcgttctgtatttttcactattcgttagcttcctttacatcggcctaaacattaaaaaaatattgtagcgtggaatgccccaagagtactattatatattctttagtagttaggaccataatattaaggtaacatgtgatttatgtcgcttttcgtgaaagtattcgcttggaatatttgttgatgtcacaagaccctttgaactaaaacccctctattattgcacctcacagactttccatcgaatatgacttcgagtgttaatttgagttctcgaattatgctgaaatgctcagagtcctcttaagtgtctttgaatatcttaaccctcaaagcctccttgattctctagcattctacaacatctttggaccacggttctctgaagcgtcttcgaaccttgcttgtatgatgaagatggctccatatcctgcatgttagaaataggaacatggccttggatccttgggaggatggccggggtcttgctcttacgtacaaaaccctctcttttatttttacatatataaatagtgagaaaaaaaacatatattcgtgggagcggtcacaattattcacttagaatattcgtttatgtcacaagaccctagcttgaaactaaaccccctattattgcacatcacagactccccttcaaatatgtcctagagtgttcgatcgagttctctaatcatcctcaaatttactcattgtttatacatgcctaaagctctgtttttttctaatttactcaaccccagattactggatctggaaccacattcactctgattaattaacctccgaaatgcagtgtctaaagtctagctaaacccatctacatttgtcgtgtcaccacatttgtcgtgtcgtactagctgttgggatgatcccatatttagcttgtatcgtacaatgccatcatgattatgcatggagatgattttctaggatcttggaaacaacacaatactttatgttggaattaatgaatgggccttagcccactcgaagattaattctttggaaaatcacaaaagcccaccttatgggatggcatgcatgtggagtttagtaccaccttgcttattctaggagagggggacctccttaaaagggaggatgccctcctagccacttgaagcatgtgtgatggagagaagaggggaaacacacgcgcgcgctggctcgcctcgcctggccgggcaggcggcgcgcgtgcacgacgtacgcgtcgaatggtccgaaaaattggctcctcacccttgcgcagatgcagcctccttttgcagttttgttttgctgcaaattcggattcgtttttgttttggaaacgttccgaaaaatccggtgcgtgcaaacggcgtggagtccggataagttacgcgcgacttatccggttcggttacgcgcagtagagatcgtgcggacgccctgatcaagcgacccttctctatataaaccgacttgccgtcttcacgcaacacttgcgaaatcaatctagggtttgtctcctactctgtactgcgccgtcgctcgtagactactccatcccgctcgccggcgtgcaccggcgatcgggagagcaggtctccggaacctctgccttcgacgttctgcaccgggagaaggcggcaataaggtttttgggaagcgcttcgcgcgactgctccctgttcgttcgcgacggctcgccttcctcttcgctcgcgtgtttcgtgccttcgtagacacctgcgaaaagtttcgaccaagcaactggtctttccgtcacctcggtacgtgttcaatatgttgcgcatatttgatctgttcatgttgtactgtgtagtttacatgtatagatctaatgatgcgttcatgctagttttcatctgtaatgtcatgatttatttatggaatagattaaatcattatatgtctataatctcaacaatccaaaaaccttattataggcactgtgattttactatggctggttttgccgatgcactgaggccggataaattcaccggtgtgcattttaagagatggcagatcagggtcactctgtggctgacagctataaaatgcttctgggtgagtactggcaaacctgaaggagttcttactgctgaacagcagaagcaattctaggaagccactactctctttgtgggatgcattcttagcgttcttggcgatcgtctggtcgaggtgtatatgcatatgaccgacgctaaggagttgtgggatgcactaaatactaaattcggtgctactgatggtagcaatgatctgtatatcatggagcagtttcatgactacaaaatggctgacaaccgttctgtagtcgaacaggctcatgagatacaaaccatggctaaggaactcgaactccttaagtgtgtcttacccgataaatttgtggccgggtgcattattgcaaaactacctccatcttggaggagtttcggtactgcactcaaacacaagagacaggaatactccgttgaggggttgattgcgtctcttgatgttgaggagaaagctcgggaaaaagatgccgcgtctaagggcgatggtgggcagtccagtgctaatgttgtgcacaaggcccagaacaagagcaaggggaaatacaaagctcagcagaccaccaacttcaagaagcagaagaagaacaacaacaatcctaatcaggatgagaggacttgctttgtgtgtggccaagttggtcatctggctaggaagtgt

SEQ ID NO: 20753 - DNA, 31013 bp, Oryza sativa
ttatcaggtcgcacggggttccaccgtcctaatggggaatgggtcacatgcttctgttcatggtgttggcacggtagatctgaagtttacttcgggaaagatcgtgcaactgaagaacgtgcagcatgtcccttctatcgacaggaatcttgttagtggctcccgtctgactagagacggatttaagttggtttttgagtctaataaagtagtcgtgtctaaacatggatattttattggtaaaggttatgagtgtggaggcctgttccgcttttccctttctgatttctgcaataagtctgtgaaccatatttgtggcagtgtggatgatgaggctaatgtttggcattcacgtttatgtcatattaattttggcttgatgtctcggctttccagcatgtgtttaattcctaagttttccattgtcaaaggttctaagtgccatagttgtgtgcaatcgaagcaacctcgcaagcctcacaaggctgccgaggagagaaacttggcaccactagaactcctacattcagatctttgtgaaatgaatggggtgttgacgaagggtggaaaacgatatttcatgacattgattgatgatgctactagattttgctatgtgtacttgttgaaaacgaaagacgaggctctagactattttaaaatttataaggcagaagttgaaaatcaacttgacagaaagataaaaaggcttaggtctgatcgtggtggagagtttttctcgaacgagtttgacttattctgtgaggaacatggcatcatacatgagaggacgcctccctattctcccgagtctaatgggattgctgaaaggaagaaccgcacactgactgacttggtgaatgccatgttggacaccgcgggactgcctaaggcatggtgggtgtaaacctgtggggtgcaagtgggtgttcaagaagaagcttaggcctgacggtactattgaaaagtacaaggctcggcttgttgctaagggctatactcagaaagaaggcgaagatttctttgacacttactcacctgttgctagattgaccacaattcgtgtgctactttccctagcagcctcacatggtcttctcgttcatcaaatggacgttaagacagcttttcttaatggagagctggatgaggagatctatatggatcaacctgatgggtttgtagttgaaggtcaagaaggcaaagtgtgcaaattgttgaagtctttgtatggtctgaaacaagctcctaagcaatggcatgagaaatttgacaaaacattgacatctgcaggctttgcagtcaatgaggcagataaatgtgtgtactatcgccatggtgggggtgagggagttattttgtgcttgtatgttgacgacatactgatatttgggacaaaccttgaggtgataaatgaggttaaatcattcttgtctcaaaattttgatatgaaagatttgggagtagctgatgttatcttaaacattaagctaattagaggtgagaatgagattacactcttgcagtcccattatgtggagaagatcttgaatcgctttggctacattgatagtaagccttctccaacaccttatgatcctagcttgttgcttcgcaagaacaagagaattgctaggaatcatctggaatactcccaaatcattggctcgttgatgtacctggctagtgcaactaggcctgatatctcctttgctgtgagcaagttgagccgatttacctctaatccgggagatgatcactggcgtgcgcttgagcgagtaatgcgctatctgaaaggtactgtggaattggggcttcactatactgggtatcttgcggtactggagggttatagtgattctaactggatctctgatgtggatgagatcaaagccactagtggatatgttttcacactgggtggtggtgctgtttcatggaggttttgcaaacagacaattttgacgaggtcaaccatggaagcagagctaacggcactggatactgctactgttgaggcagaaaggctgcgtgatctattaatggatctgcctgttgttgaaaaaccggtgccggctatccttatgaactgtgacaatcaaacggtaattgtcaaagtgaatagttctaaggataatatgaaatcgtctagacatgtgaaaagacgattgaagtctgttaggaaattaagaaactccggagttataacgttggattacatccaaacagcgagaaacctggcagatcccttcacgaagggactatcacgaaatgtgatagacaatgcatcgaaggagatgggtttgagacccatgtgagttatactatggtggtaacccagtctatgtgatcggagatcccgtgaattagatcctgggaagaacaaaccattaataaactagaggagagtaccaatatatataccctctccaagtgaagatgcatatactctcgtgagctgcaaggcaggttggctatgccttaatgagttctgttggctttaattagcaaatatattgtcctgcagagcattcttgaaagaactcacctttgtgagcttgactgttggtcgcagtctatgaagattttgggtgaatcttctaggaagcttactaaagacctaggagtatgacttatacgctccacccgaggggtagtctacagacggtctagtaccagataagactttgagtgaaacttgcttgcacaagacttgcaattcaaggcgtagtccattgttcaagttgtgagtaagtgtagcttggagttctaggtggatgttcaaccttaattggtctccatcgaaccgctggtatataaacagtacattggaaaaggcaaatctcagtgggattttgagatttggtgggggattgttggaattaatgaatgggccttagcccactcgaagattaattctttggaaaatcacaaaagcccacctcatgggatggcatgcatgtggagtttagtaccacattgcttattctagagagggggacctccttaaaagggaggatgccctcctagccacttgaagcatgtgtggtggagagaagaggggaaacacacgcgcgcgctcgctcgcctcgcctcgccgggccgggccggcggcgcgcgtgcacgacgtacgcgtcgaatggtccgaaaaattggctcctcacccttgcgcagatgcagcctccttttgcagttttgttttgctgcaaattcggattcgtttttgttttggaaacgttccgaaaaatccggtgcgtgcaaacggcgtggagtccggataagttacgcgcgacttatccggttcggttacgcgcagtagagatcgtgcgggcgccctgatcaagcgacccttctctatataaaccgacttgccgtcttcacgcaacacttgcgaaatcaatctagggtttgtctcctactctgtactgcgccgtcgctagtagactactccatcccgctcgccgggtgcaccggcgatcgggagagcaggtctccggaacctctgccttcgacgttctgcaccgggagaaggcggcaataaagtttttggaagcgcttcgcgcgactgctccctgttcgttcgcgacggctcgccttcctcttcgctcgcgtgtttcgtgccttcgtagacacctgcgaaaagtttcgaccaagcaactggtctttccgtcacctcggtacgtgttcaatatgttgcgcatatttgatctgttcatgttgtactgtgtagtttacatgtatagatctaatgatgcgttcatgctagtttttatctgtaatgtcatgatttatttatggaatagattaaatcattatatgtctataatctcaacactttaacggacagtaggattgagatcctatatatatattcaatcattcataaatcctacgcaagcgagaggttatttagtttttgctgtctcttgtagtaggatcataggacggcagtacagtggtaataataaacactcttctagcgcccatacgcatcctacgtatgcatacacacatggcacatagaagtccatatcagttatttttctgaggctgggcacagcaaaaggttcagaaaagaaaaccaacaataaggcagcttttttttaattgttttgcttttattctacggccttgcatgtcaaacacattccttcagcgtggcctgtaccatgccaccgtgagcagttgagcactttatagctggcgggggcactggcacatcactctcatgcgtgcacaaccatgcttccatccatattttacggtgtttggaactgagctgtttaaaattaaaaattaatatttttcaagcacagtaataaaagaaagagacttggagggagagacgtccctccaaatatatttttaagaagaaataataagcatgttgggattgaacacagacctcagggttgaaatcatatactccttgccactacactaaagtgcatctctttcaagcgcagtagaatatctcgtctctccgacctaccttttttttcataaatatttaatgtatttatgaaacaatttgattatcactacttagaaaaaacaattttgcagctctagtcttttcttttcacagactgctcagaaggaaaatcgtatgtaacagatagccgaggtcatgttactatgttagggtcatgactgccttagaaaaacacctatgaaaacaagtctatttctgcgagtcccttttctaaggagctgtttgtgaaaattctgatttttagaggtggtttttaaagaaaattatttccaataaaatgtgaagtgtgatggttcttggcagttcccttaatgaaaaggcaagtaaaagtcgatttttatagatggttctcttgaaaaaaaactgcccatgaaaataagagcaatactatttcatgaaaaattacaactcttttatggtgaaaaatcttatatagaaattgtttgttgactatatctatataaaaaacaaatttatgggtattttaaaaacctctaatggagacattctctatatcaaaattctagagttcagaaaatctaaaattttatcgttgaaactttttacatttgagatcatttcagtgcctaaatattcgctacaggttttagagagaagtaaaaaattagcatccatcacacagtcatgaagtgtgagatggtaaagaggctatacgtgtagggagaagaattggattaggatcctacataccacacgtgtaatcgtgtatagatgtgtgtgtgtgtgtgtgtgtatatatatatatatatgcgtcccaaagtataagaatttttaggctagacgtgagtattaagtaagtaggtggaattaatgtgcttgggttgatattttgagatgaggaaataagtggagaatttgaacggtgaaatgttattattggttgagaacaaaaatgtaggtgaaaaaattattgtactttaggggagtacaaattacttttttgggttttgggacgcggtggaggaagggggaaggggggggggggtttgcacttaaaaaaatcaaaaaaagtattttcacgaatggtttcttaagagagtcgtgtgcaccatgatcgtgcatatttcatgatgtttagaattgagatatttataatatcttcccgttaccgtaagacatatctctgtccatgatccctctttgtatatattttgttttctttcttttatcttatgtatagaaccatgctgccattattaaccacttgttatatgccgtcaagtcgcagtctctgcttctcccgatttgtgatctttctcttagtatatatatttttgttctttttctagttgagacataagaagagagtggcccatatgcatctaaaatggtctataactagtggtctggtgcatacaaatcctcacatagccatgctagggccaacatagcacactctgtcacctgttgtaaaggaaaaagaaatagataagatagggataagatagaagaggatgacatgagagatcataaaaataacatatatgtaacttttttcctcaataaaatactctccactttttaatttatgacattgttaacttttgaacatacgtttgatcattcattttattaaaaagattatacaatattttgttgggatttgttttatcatatgtattttaagcgtgacttatatttttttcatatctatataaaattttgaataagatgataactcaagcatatgtagaaaagtcaacagtacctatactcatttaaaagaagggagtaatggtgacactaatctgccaccccactatccattgtaaattttgcatattacccctaaactttttaatattacaaataataaaaaaataaatgaataacacagataaaatcaaattaagccctgcagcaaaaaggtgagtaacgcattttttgaaaaatatatttttatttattttaaatgctattataatatgtttttttcacttttattcaaagcaaaaacacgggcattgagttcgttatacatgaaaaatcttaatcggagggactagcacgtagggcccgatcaactaacgagtacattactcctttggattttgcaaagatccaatcactagagctcacgcccgacaattaaatttacaggtgagctcgttcctaagtacttctttatttgctcttgaggatagattgctacctaatgatttaattatgattaggaattatggagaggaccatggagcacttggagagaggctaggagatggaaaaggtcattatggatgttcaagttaagatggagatccaacttatatcaagttcgagtccacttcgggctccaagagcagtctacactaaattcgttgctcaggtttcatccggactccgatttcgacgttccacacatgcatggaaagctaacgaaatcacctttccaatggatttggtcccacatcaaaaatccttccaagtcaacaggaatcttcgaaacaagaaggcattcaaaatctatccgggtgctgagtcaccgtctttgggcccgttgggccatgtatcgagtcaaagtctaatagggtcgcgtccatgggtctaaggtcgacactaaaacctatatattcagtagccgtcattgtgttagggttgggttttgcttagattatttctgccttcacagtttcgccgctagatcggtttgtgaaacctcaacttcgagtccttgataatcattcatctgcaattgagttgttgtttttcttgtttttgattgtgttcttcgattcatacgtagggattagccttctcggcgaggtcaatcgggtttcggcatggttgataaccagaggagacgtacgtggtgctgcgattgaaaggtttggatcgtgttgatcggaagccgaatcgtgtgtgtcaagtttccaccaaattgatagatatcttcacctgacagaagatcgggcatcccgttgccatcatcaactttgtactactaattacaaacggcatatagaagttcctcggtgaagttcatttacttgaggtcatacaatgcaagacaggaaaagtgcaaaagttggatcaaccaatcgatctaccggtgcaaatggcaaaaaaaaaaaacaataataaggaaaagggacaatacgaaatataaactctcatcaaccaaaaggcatatataagttcgaatactgcgcttttttcccgaaagttttaactagctactagtcgagcataaaaatggataggtatgacttgaagtacgcagatcgaatattcgatccttccaacaacagggacacgaagaaatggaggatacgcttttgtagtaaaattgagagattgtttcctttgaggtggtggtcgcagcttgtgctcacaaactccaaagtgttcttcttcgcttttgcgttgcttgctacagtggaaaagtccacctgccagttccatgttcgttggtgtgttgcaggtctctccccttttagttttcaacatggataagtaactggttcttttccattacttcttcctcgaagagatgagagttcttttgggtcatctatatctgggtgcattttcttttattagaggggcactgttccatatttacattcatctcatattctcgtaatctgcaaacacaagcacacaacctggtgcctccatttgtcttcactgcaggatttcttaaaccaccgggaccagggttaccgtgttccgaaggtaagcacggttaccacgcggtaaccgtgaaaaaccgtacgaaaccatgcaaaatttattaaaattcaaattatttttaaaatttatttgaatttaaggaggttaccgtggtttttctattaccgtaccctcgcggtaaggccggtaaccacggtaaccgcgtggttaccgacggtaatgtaaaccctgcttcagagtacacatcgcataatgcttatattttctgtgatgagactcatcaattacccatattctctaacaattatatattttgttcgtatcgaataaaaagccaacgttaaaaagaaattatgttaaaaataatttagagtcatctccaaaatcaaatttaaaaatttaaattttagtttttttcattggctcgtgccaatcgatggatctcgaaatatgattactatggttgttatgcagaattagaaaagctagctaggaccgacatgctattaacgaaaaccgtagcgaaataaaccgtgcgtcacactgagagagagagagagagagagagagagagagagagagagagagagagagagagagagagagagagagagagagagagagagagagagagagagagagagagcgcattttatgaaaaataaattaaagtccctggcagggaggataaggaggaggcgtctatagcctgtaggtccagcaagatattttctttagcctatccagtttagtgaggatcgcaatatcgaattatagcataaaatcgctataaccaacagtaaattgagtttgcttaagtggtgcaaacaattcagtgactgattttaatgtgcactgaagaaaagcaccaatataacaaattactgtagtgatctgatcgaagtcggttcgatctggatctatctaacagtgcaatggggtagcaaatgcacacaacctgttcgcctccgttgtagcaagttgatctcagtcgagtcgttgatcgatgtcttgtccgttgtcacgaaccaaactgatcggtttgcaaaggcaaagaaaagaattccattgccattaaaatggtcgacacaccggcgatgtttatcctagcacgttgtatcgatcgatcgggacctcgcattttccaagacggccagggcaaacgtatctactcctactccagtactagtaggagacatctcgtgcacggttgcgtaatcggacagtgctttgacgtgcaaaacgtcctgtgctggtgtacgatgtgtcgagcactcgatcgagccagtggccaccaccgcggcgatcctgaactttaccggccaccacccgcactgtcttggcattggctcgcagagtcgcagctcgcttcaccgcggcggcggcagcagcagcttgggccgctgctttcgcagtccctcggctgggccgcacggcgcggcggctgctcattgcgcggcccgcgtgggtgcaccgtctcggcgaggtgcgttgccgtggtagatcagtctctagccctcagagcagtaaggagaggcctcaaattaaatgggcttcctcctcttctgagagagagagagagagagagagagagagagagagtagttcttgggcttttttttttctcatccgttgagctacttccgatcaaggctggcagtcgggccaaacgagatttaaaggccagtggtctaatcgaaacacagaattacaacatccaaggctccttttcaagttgttggattattagtacggtgcatccaaggtttatttttcccttatcgggaaagcatcggcgatgtcgcagtggagatttttgttgcataatttcactttttgacaagcacaaattaactttaagtttttaatacgtttttagtcctcgtgaccagagtttttctcactactagaaaaacagacgattaaaattgctatgtgcacacaagcgttcctccaggcaaaaacctacgaaagttaattttaggggtacatttgttgttgtgtttagtggtacgtgcacgtgtatacctttttcaatagtagaaaaaaagagaaattgttttcttatcttcgcattgttgagatgaattatattacttcaattacaacatgtatacatatgtgtcctagagagggattgtttgcatatcattcaaatattttaaaaaattgaaaaattatcaagatatattaatatgtgatagtgactccatataaacatgaaaaaaaaaatcaaatttagcttttacatgttacaacgtaaaaaacaaatttgattgttaatatacgttaactaattatattttaattggtttttttaacttgtagaagttgaattttaacttgtatatttgtggaatgatatataacataataatccatcttcttagtttttttagaactatttagataacatgcaaacaacgatagaatgtccccttaagagtttaaatccactcccctaaacagcttctaggtgtacttaaagttataatagcactcccttcttccatataaggtctgtaatttcacacggcttctaactttaaccattagtttattgcataacatattatcaacaactatgaaattggtattacatgaaagtattttttttaatacgagtctaatgatatactccctccgtcccacaatataagggattttgaatttttgtttgcaacgtttgaccactcgtcttattcaaaattttttgaaattattatttattttatttgtgacttactttattatctacaatactttaagcacaacttttcgttttttatatttgcaaaaaaaaattggataagatgagtagttaaacgttgcaagcaaaaactcaaaatcccttatactgtgggacagagggagtaattaaactcagttgtatattgttagtttaattattgttcaaaattttcaaatattaatttctcttaaattaaggtcgccttataatttatgacggatggagtacgtacatacatatacatatagtattgttgtcaaacttcataacctagaccccatctataaataatgaggggccagtagatgtaaaagcatggtgaagaccatggaatgcaagagccaagagcacaagaggagaataacatttgggtcatggactctcgtggagcaccgttcttaaaaagaccatatttctaggggagtagggacggagggagtagttaagagatctgaaatcctttttatcctcgaaagatactagacagatacaaatagttttaacatgtaaaagtattgcacgtcaacatattagaagaagaaaacatagtttagttacacaggggaacaaacggttagaagaccgttgctaggggataaagaaaaaagaaccgaaaacaagaacaaacaaaaggtagctactaagaggaaaaaactcctatcgtgagggaggggcgggtgggggaaaaccactaaactcccaaaaggcccctacagcagcagagccaacaatggaccacaaacgaccttcttagaagatggactccagcactaccgaaaccgaagagagagagagagagagagagagagagtagtcgaaaaccctggagttctgctccttccacagttgctaggataccagaagaacaagggagtcgaaacccttgcgaagatgctctggcaggcaagcccgagcagtcagccaccagacctgaagtgagcagccatgggaagtggcgaggtccggccagctaggaggagaaagaacattgcacgagacctggcaagtgaatacacagtcaagaaagatgtggttcaccgtcttaagctcttgggtgtagaaaggatagtccgagtgtctgtcaatgccacgcttttgtaggaggtcagccttccagcaacgctgttggagcgcaagctaaaggaaaagcttgcacttagcaggacctttgaccgaccaaagcaaatcagcgcaagcgaaggagtgatggccgagaagaaagcctggtagaccaagcgggccgagtaacgctgatctctcgtccagcgcgagacaagttcgtcttcagtgctcggagagagttggacaggaagcaccatgtcccgaaagcaccaggaactgggggatggacgagacaggtagtgggccatggatgtcccacagccaagagttgccggtgagggcaaaagcgcaaccgtacacgaagccctgagatgtggtggccaccgagcgaccgtcgatccattgattagtctagaaaagagctgacgtaccatcccctagcacgaagaaggtggatgccgcaaatatgtaggagacgcttagctcgacggaggccttcagacccatccagtaggagtggccagagcgctgaagccagagtcagtgaagacgtagagcgaaacccgttgtactcaagtccgcaatgcccagaccgctgacagcttagttttagtagagatatttacactttatgatttacgctaaaaatttctcggtagatgacatagaaaaatctcctagagatccatagttcggcaatttagaacgtggtgacgaaataccgacagctgacaactggaccatgcaccaccggaggtctctatcagcttcctagatggcacaaacagcgatagtatggttgcaagctacgcagcgttctgaactaaaagaagctgagatcttcacaaggcaggcgaggaccacacgaaaggaagctctgggcagctgggctagctagcaagccagccagccagcaactcaactcctgcctgcctcctctgccagaaactacccggaattactacacaagcgtgcgttgcctgctacagtacagtgggattaataactggcacagtcgacacagctgctgcccacgtcttacaacaatgctcctttctcaactactacacggccatggtatcgatcggccgatgaactgcatggttcaagagttcaactcatccgtgcatgcactgccggccgcgatgccgttgcgtaatcagtgagtaggcggtgtggtgcgtatagcaaaattaacgtaccacgtaatgtgggcaccgtatctgtgtggcaacgacgcgagatccacggaggatcgatctgtgtggggggtgcgagtctgttggagcttgaaagcggaaggattcggtggggcgcccgccggacggggggaagggtgtgacgcgcgacaccccgcgaaaggcgtccccgtgcacgcgcgcgcggcatacgtgcgtcggtccacggccacacccacgcatgtgtgcggtgcctgtgggagcgcgtgatgcgtgcgaggcgatcgctcgcgagggcgcgcgcaggaaccaggaggcaggaaggcaggttgccgtgaattgtttccgagtaatattcctcatctatatcgacaagatcaaaggagtaactaggcaagtatacaatataatagttataattaagcatgatagacactacacaacttatagtaattgagactaaaagctctctctctctacacacacacaaaaatgcccgtgcgttgcaacggatgaaaaattataatgataatatacgttttttcatgcataaccatgttaatgcaaatgtttgtatggatcatttgttgataagacaatcagaaaattagaacatcttcaatgtaatgacccaacctcaacgatggcaaccttaccgatgcttatttacctaaataattagattattcatatgacaacatcaaatcaaatcaaatcctacactgcatcgcatggtcaaatctacacaaaacagagtcactgtgcactcttctctaaatactaacaattaaaaatatgtttattttttaataatattttcatatcatatgttatcaagaatagtagctatacttaacaaaaatagtctgataattgcatatagagacgtgcaaggtctacaatacaggagaatacatgatgaaacaaaagtcgtgtaggagatggaaaaaaatcgatggatcctatccaacccaagcgtccatcaattttatctcgcgttaagttggacggttttccagagcggttcttattataaacggtattttttttctcatattgagtcggattggttctctctagcctttttttagaaaaggtggtttttctcttgcgttgagtcggacggttttctcgaaccatttgtagaaacaacaattttttctcgcattgaatccgattgttttttagatttggctttgttataaacggtgtttttttctaatagttttttcagagtggcttgattttttatgaacggtgttttttttgcgcaattttctcaaaccattttcacaaatgttgcatttctttctgaaatttctttcctagcacgttttttttctttttttacagacgatgaaaaccgtatttttctcgcttttttttgctttcttttctcgcgcgttcttttgcctgttttttctgacatttttttcttgcgcatttttcttgcttgttttttctcgagtgttttttttttgcttttttccaatataggagcataaatgacgaaacaaagtcgtgtaggagatggaaaaaaaattgaaggctcctatctgatccaagcgtccatcaatttagtattttttttctgacagtttttttcagagcagcttggtttttttataaacattgttttttttcctgcacagttttttcttacagttttttcctcgcatgcattttttaattttttacggatgatgaaaatatttttcctcacgtgttttgttatttttttaggacgacggaaacctttctttgcgcttttttctgacttattttctcgcgcgttttttgcttttttttctcacactttttaaaaccgtttttattttatcgcatatttttttatttttagttgtacgatgaaaacttttatatagttagattagatttgattagagatagagaaaatatatatacagtcttgcgagtttttttattttttacgaaccgttttttcgcctcccttttaatgttttacccgatttttttttattttttcggactttttttttgttttttttttgcctttcataggaatcatttttttttgttcttcccgtttgtttttaaggggaatcggatctatgattatttttcgccttttataggggaatcggatctacgattttcttcgcctttttttgtctgattttttggttttttcaccttttatcgggggaatcggattttttttagatttttctcctttttttgttttccccgtttttaaggtgaatcggatccttgtttttgttttcgctacttctcctgcgaatcggacttctactttctttttttttatttttttgccacttcttctcggaatcggattttttaaaggtgtatttttttaattttttgccacatcttctgggaatcggacttagtttaggttgtttttttcgctatttattttattttgacttacgaaggaaacatttcgtattttgaatcggatctacggatttattttggttttttcaccttttatagggggaatcggattttttttagatttttcgctatttttctctgattttttttgttttccttttttaaggggaattacgtttttttttcgctactcctgggaatcggacttctacggttttattttattttttgccacatcttctgggaatcagacttttaagtttagattttttttcgctatttattttattttgacggacgaaggaaacgtttcgtattttttaagtagtatatatatatatatatatatatatatatatatatatatatatatatatatataagagacaattctaaaagttcctctctccaccattatatagcaaaatttccttttatcttgaactaaaactagatgcaatgtttcatagatgctttactttccttatcttctctcttctcctcacactactacagaaagggtttttctgtatgaggctcccggaaagttccaggcaggccataagtgccacgcctagaaaaaacgctcccctcggggcctgatgatggacaacacgcgaagatgcattatcgcgtgtggtcctcttaacaaaccgcacgtgataatgcgtccacatcgcgtgcggtccacttaagcgaccgcacgggatgatgcatcttcccgttcggtcgcgttaagtcgactgcacgggataatgtatcttcacgtgcggttgggccgaccacatgcgaaaatatgattatcacaaactttcttgggtgtgtgggccggccttttgcataggaagatgccttttggcccgcacgcaaaaaccctttctgtagtagtgtcatgaagtgattggtctaggtcacattttatttttttttattatacataaaacacatacacatatactactacataatacgttaaatatgatttcctatcaataatagttaaaaaagagtagcattgatggggtttctcgtccaccctacccaaccttgtgtgcgctctgtactagcaaaaactagcattgtatcagaattataatagattataaaatgtgaaaaactattagttccgtaatttaaatgaatcgatgtaaataatctaagccgagccaaaccgagagcctgcaaaagaactttttagccccatcgtctcccccctcactctctctgtctctcattctctcacttctcttcgatccccctctacccggcgagcgctccctactctcgttggcatggtggctccctccccctctttctaaatcatgtcgtctagggctcaggagctactggatttattcgccacaagctcaaaaaccgccagatgcgaggttgtccgagtttagagtgctagctcaacggtggcagatgtaggttgctgcagatatattaggatgggcggacttctccaccacagtgagcagtagcgataagggttatctcggcctccgacaccctttctctgtgtaatttagtttccgttcttccaatatgattaatgttttgacttgttaaagattgattatgtggctaattttttgttggtttttttattcgtttttgttggttggaatcatccacgtcgacgctgatgttcattaagacgacacttatgagatgtcttgggatagtggaacgacactaaacacacaccacactcatgtacccgcaagtgtgacctctaacattctcaaagagatgaagaccgacgacaaatctttagccccaatggatctaatataattgaaagcacatatgcataatatatatgggcaccaagattgaaactttaatgaatggattcatgcaaccacacgactgctagtgtacgttttcctgatgagagttcagtttagttgaagcattttttttctttttatcttgggccagctattagttgatataattgatgttgtacacgtccaagactagtcgtctaggtgctaattaactagctagaagggaagagatattctatacgtgcacgagaaagatctggttgttagatatacggtgacatggggagatcgagatgccatgtccacaatatggaggtagctagctactctttcccttgatgaatgttgcttgcagttgcatcgtactaaagctgatcgatcgaggtagggattgggttgcgtagatagctttggtcccccataagttttttgccaccttattggttatgatagagcctggccatgctttttttcctcttctactttgaagctccttgacaaaatcccagacaaaattagtgcaggatgtgtgctaatctcagcgatctgtagactgtagtagcgagatgaagcgtcttcgtaaagacttcgaacgtactagtatctactgtgatgctgaaagatttgcataaaatctgacaagatctttactgaatggtacctgtgaaaagaaaacacttaaagctcgtccttcttggtcctagttttgaacttacggtaactacacatgttaatattttactctataaagctcatgttttgaactataaactgatgtggtttcacctgagtgattccagaatttggccggtggagcatacatatatatatgtacacacgtttagctttccaatagaaattggatggtccattaaagcgaaatctacgtacaaaactgaacatgtctatctaatccacttgatccaaacaacccacaattgatttacatatgcatcatgcaattctgtgggacaggttgctgctgtggatttggaccagcagcagcaggcatgtacaaccctacccaaaacaaatcctgatgctagttgcacggaacaatatgtatattccaacacgccagtacatctgtacatatatgcatccatgttcggaacatgtacgtacgatcactgcaccacgctagacaattagctttgcaccactaaattcagagaactggtcatgaaattaactagctagccagccagaaaaactaacatggcaaaccacacattactaactcgcttgctcatgtgtcataggctcctttttaaaaccaaacattgccacgcttaattaatggataagtatttgttagccacattttgatcacacctttgacaaagttaggttgtggcaaaaaggcccatgatgtacagggaaataaacgaaagaagctagctagcatatatatgccatgcacacgcacacacatcgatccacatacatgtctcttgttctcagagcatcacacacaccaccaccccagccgatccagcatgcgtgatcgatcaatctaggctaattaggtcgcccacatgcacctcgtgcagtgaacgacacgatctcggtaggactccgactcgatcctccgaaccgatctctgcaatttgcaggtggctctgcagaaacgggaaacgtaggggaggcccggaggccggagcccggaggcgagactcgagagagggataagaaaggaggcgagcgcgttgccgagccgagcgggatgcccgaaacgagacggtgaaagcgtcgggagatcacgatgagatcgcctccaaatcgcaggagatttgcagggagggagaggcagcgaaaggctgaaagctctcctttcttgtggtgtggtggtgggggccggctcagctagctatagctgggcagagctggctgcccctcttgtcttggctccattgaaatgcttctgcgtggcccccgtctcactggccaggacccaggattagggaggttaggccatttggggtctatcattgtggtctctctatggaaaccttgtcaggctcaggtccactagatagggttcctccctttgatggaagtacatgatgtgcactacagcttatggttccatttgttttttaaaaaaggacacgttatataaacgtaggtgttcacacgcacatcctatcacaataaatatgttcgaaatactggaccgacatatcttgagtggtttgtttttaatccctcaatgatttgggttgttaattggattttgggcgaaaatacttctaggcgatctaaatgttaagacagtttatatggttaatggaacaaaggaaatatgctactcccttcgtcccaaaataagtgcagttttagcactgtttatgtctaacgtttgaccgttcgtcttatttgaaaaaaaattataattagtatttttattgttattacatgataaaacattgatagtactttatgtatgactaatttttttttaattttttcataattttttcaaataagacgaacggtcaaaatgctaaacacggatatctatggttgcacttattttgggacggaggtagtaagagataagaccgtgcttcatgctgaagactctgattttttagctccagttcatacagaagaatgaattatttagtgctctttcaactaaaattaacaattaacataactaattaacaatttgttcgaaattacttctgaaagttctcaaaccatacctgaataggttcaataagaacttcacttgctcaaaatagaggaaatcggcaatagtactacatatttacatgtgagttttgaagtttcatgggaccacgactactcactggaatccttttacaaaaaacagtacactggcaagttgtacgtgccatcaatagaaagctctaaaagtaagtggccaagatcccagcggaatctgaattcaattgttcttttatatttttaatttgctttaaagtaaagctttgttacttatttttaaaaacaaatgttttagtcataccacccaaggttgggtatgctatagcaagttgcagtagcacaaaatattcatgccatggcaacaaaaaccaagatactttatgccacggtcatatgttggtgacaccagctttgtacgtagggttattctttagaagtctggtttattgggattaatggggaataaccctatacctaaggtgtactattgagaaataaccccatacctaagttgtttataaactaatgtaataaacaactattatgcccccatagcaatgccaatcccataagaaagccccaagggcaacacaataatttttcgttacatatgaataaataggaccctcaaggggcaagtgggaggagggtctcccattgaactgccatcatcactctcttcctctcgtcttccctcctacgagtctaaacttgagctcccttcgagagaggggcgtccttgttatgcatgttagattttgtttcaatattgatgcaatggttgcagtgtattatagttggagatggtggtgaaagtgtttttttttacgcaaggtcctcggtatcgatatattcttagaattgatggccattaattctcatgtaatccactatgttttatctttgggtgcgtgtgagttggttgtatgcattcttatctatacccagtggttattgtcagtaaatcatttaccccttaaacttcttaatattaaaaaaataaaatctaaataaatagtcatgtacaaaattatattaagataaatattttctatattaaaaagatgggtaacacattaatgcatcttattttatatgtagcaaatcacgggcaagtaattatgcaaaggttggtagtgttcttaagacaaccgtatcatctatatgtaatttactatgttcaataaagtttttcaattatacgtgcaaatgtaggcaaccccaaaacaaaatcaatattgaaacgatatttagtcaattttttttaaaaaataaaataaaatatacaaaactgcaaatattttaatcaaactatttcaaaattacagatttaaaataatatataataaagatatggatttattatcaaaattattattaaactacgggttcaaggcaggctatcataagactagagatttagtaataaagttatcacaaaactatatagagttattgctagcactattaccctgtgatattataagtgttgtagtttggtgataatactgccactaaacctacagttttgcaatattattacccttatttgatcatagacttaatgtttaatttaattttgtatacactattttaatcttataaatttctagtagtacaatagtttggttaagaaattaaattttttacaaatttacttacaaaatacattgggatataaatttttttcttaaattatatgttttacatttataagtaattgattatatgaaatgcaattgatagatatgagttcaactaaatcatcacacttttgtttttcttcccttttattatcgtagttagaactttgccaaccccttataaaaattatattttaccctacatatatggctttccttttatcatcgtagttagaactttgctatccccgtataaaaattttataagtaatttttcccctacataaatgaagaagtattcactatgttatattacacttttaagggtaacatgatatgttgcttggttttaacggaagtccattgacgacaatgacaaaaaaaaaatgcttgtgggatgctatttcatagaagtaatatttattgatggcaatttgtaaaaccaatcacttgtcaaaatgtaaaatttctcaatatattatattggaaataagttatcttaaaacattttctttaataaaaagttctaaatacttaaccagaaaagtcaaatctaaaattacagatactttacctaaattattacaaaactaaatattatttaaaagttaagtaaattttataaaactaaatatactttgatcaaattatcacaaaactacatatttaagatgatataactacatatttaacaataaatttatcacaaacatagggtttaaggctaagtatcgcaaaactacaaatttaatgataaaactatcacaaaactaaagattttggggtttaaatccttaacgctaatgctgtgtttgagctatagatatcaaagttttgtgatttaatttattttaacactatagttttgtgacatttcaccttaaacacatagttttgtgataaatttagtgttgaatatgtagttttgtgatacattgttttaaacctatagttttgtgataatttagccaaagcatatgtagttttgtgaaatttattcttaaaagtttgtgtaggagaactatacactgatttcggttaagtaagttataagatgttttgcgttccatcctcacatgtataattagtgaacgagttaatacttctacagatttgcaataacctgataataaaataggcaattgtaagtaagttaatgttttgagctccatcctcacatgcacaattagtgaacgagttggtactcctacatacctgcaataacctgataataatatagacaattgcatgtaagttaatgttaatatttgagctccatcctcacatgcacaattactgaacgagttgtacatgagttggtacttctacatacctacaataacctgataataatataggcaattgcatgcaagttaatgttttgagctccatcctcacatgcacaattactgaacgagttgtactcctacatacttgcaataacctcataataatatagacaattgcaagtaagttacaagttgttttgtggttcatcctcacatgtacaattactaaacgagttgttgcaagtaagttacaagatgttttgagctctatcctcacatgcacaattactaaacgagttggtactcttacagaattgtaataacctgataataaaatagacaattgcttaaaaaagatgccacaagtttttcttctataaacttttaaatgtaactacttgtagtctaactataatgtaatttgtactatagtgtaattaaactgtataactatattattatctctatataacttagtataaagtttcatactttttaattttctttggagaaacacagtacaaacagtacaaacgcagacgctcataacgcgcgcacgctcacccctatgaacatacatcctacccttacgagtgcctccgaaaaattgagacggcatatcatgagattaaattttaatacttatagttaattgtagtataattacggtaaaattatattacaatttaaaatttttccataaaaaaacttacggtatttttttaagatagtcccataaaatatttacaaaactttgtgaaatttacctttttaaaaaatccccaaaccgcaaactgacagtttcccaaaaaaaaaaactgagtccaattatcacgggggcttaggtggcttcactctgaactctctcacagcctcggtgtgagatcggatgagagggagccttgcccctgacatttcggccccattttctcctacaaccttggacaagagaggagagggagagaagggaggcgcgtgattcgatcgagagaatagggagcaaagtggagcgagggtttgggcggcaaatcagccgggcggaaggaacaagattccttcgacgacgacgatctctctatctatctggatctcctcctgctccccgagtctcccgctcctgccaccactcaccgctcgctcccacactcttcgccctatatatataccccctcctccatcgattcggtagcctgccacatccgtgcttgcatgcggctcaactcctcttgtgttcctccgagaaccacgcctccatcgatcgatcgtctgcgatccttgtcacggcttgaactgtgatcaagaaacgcctttctgatcgatgcgcggttgattgatcttggtgcggacggagggagagagagagatggtgcaggagcacggcgggagtaaccacctgcagcagcagcatcagcaccagctggcgaagtacggcggcggtgtggctggcaccggcgtggcgcgggcgtcgaggaagaacaagcccaagaaggtgccccagcgcggcctcggcgtggcgcagctggagaagctccggatcgaggagcagaagaagatggagggtggcgccgcgttgtcctcccacggcgcgctcggcggcggtgatggcgtcctcggccacctccctcctccgccgccgccgtcgctcgcgttgagcgccctgcagtcgaggtccgccgcggacggtggcttcccggcggcgctctggagcccagtggatcccatcaaacacccgtacaagaggagcctgtgcccacagcctccatccccgatggtacgtgtctttctcaaacctctccgtgtcgcggcgcggcgcgcacccgccggcgtggtctggtctcaaacccgctcaaatctctttggctgatcaggtgagcacgggcctgtcgctgacggcgtcggcgcgccacccaacggagcccccttcaaaccaaatgtacagcagcagcggcagcaggagcagcgccgcggcggcggaggaggagagggtacgtctcaagcctcgccgcgtgccgagtgattgcgtctttgatggtcgctaaatgtgagcttggttagaggttttgcaggagacgggcggcgtggacaggtcatggcctttcatgttcaagggcatggccgccttcaggacgacgacgagcagagctcctcctctggtggcgcctttctcggcgaggacgacgaccaccggcgagctggcagggttggccgatgttggtcctgacctgagcagatacgagttcagagcaacaaattatttcaggtagatttgcaatgctaattaacttgttgattgattctgtgctttgtatcttcgaaacaaagattctgtttttctttcagaagtacaatcattcattaaaaaaagtgaatctttactcggttttctcttgctctgctggagctgaactagttatttcatttgcatcactgcaaagtatttcaccgtttttgttaaatcttactaggttttctctgcctttttttttctgaacatgagttttctgtgtcccaacaacatagtagcaaaaggcaaagaccaaacgaatgaacttgaataccttgttttccttgaaaaaaagagtagcacattcgggtgcattcttttctcttttcgaattggattctcacggataatttgattttacttttgatctgtgatatgcagtgccaatgcaaattattcagactggacatctgactttgctcactgcaaaagcagcaaggagaacggccgtgccagagaccctgccttcctcaccttgagctcacagcctccacacctcctcaagcagcctcatgtggtgccatcatacaacgacttcagtgccatggcatctcaggcaagtgaatgatatgctctaccatattctgaaaccagtaatgtgtgacttggctgtgaaattgtggtggactaactgatgatgaatgtgaacttcagggaagcaacatttcatcatcgtcgtcgcagccattctacagcttccttccagtcggtccggttcgttgcgaaaggaccttgagcgagtgcaagaccgatgtgtctgaaggcgtcgacttagaactgaagctaggaaattgctgaactgaacttgtcctgttgctttctgaaaaaaaaaaactgcaatgaggtttacccaattaccctgttgtgtgaaaaaaagtagaaacttgtttagtcagtaagaccagatgtataatcagttgcttctagaagatgctttccctcccaataatcatctgctgatggtttactctgtccccagttcatttctagcaaagcaaaagagtgtgcataatggaaacatgaagcatttatattacacacatgggtccagataagatcgcgccaaatgtagtagaaactcaacagaaaagggtgtcagatgaatacatcatgtggtgttgatgcagcaacagtttcaacaaggaaatgagagagcatgtgctggatgggcaatacagctaatctgtggggtctgttttttcacagatctagcacaaggcacagtagaaaactgaacattttcagacatagatgatgtgtgtgccaattagaaattcaaaagggtttgtgtagatgtaagatgtaatctacggttgcattgcaagttgatttttgttcacataaagggtaaagtcttagcagaattctaaaactgtcaaggacgccaattccagaaataagcttgcttggttactttcaggcaactctcaatttatatattatgctcatctctgttcaagatcaggataaactagaacaaatgggaaccttaggataggcacaagttacaatgcacagcgtgaagtgcagacagataaattacagggagataaatttacaagatcaaaccgaagaaaaagtaaccgtcaaaagcaggagttcagatgcattagcttatgaagcagaagttcagaagcatttgcttatgaccagccaaagacgaagtcgaggatgtagacgacaacgagcgaaagcgggtaaagcatgtacgccaccagacaggtccagagcgggaatgtggttctgaagcttgtgaagagtcccatgatgacacagacgagcagtatgatgagcacctccgatgagaagtcccatgtcaggttcctgatgtagatgagcgccaagaacacgcccaagcacagcgtgttgttcatggtcacaccaccatatacctgcaaacaaagaatcaaacgcttagaatcagtaacatttttgtgtagatttagaaactagaaacggtttaggaagaataactgcttctataatgtacctcagagaaagtaagggaactggtccgtagcttcttcctgctagcgaagatgatggcagacacagcctcgctggagttggtcgccagcgggagggcgatgaacgaaatgaagaaggatgggatgtgcgaggcgttggagaagttgtggacagcatcaacaagcgggtctgcgaatgcagcagcaatggcactgccgagaagcaggagtcccacggctttggtgatgcaccagccagggttctcaacgctctcaactgtctcgtcagatctgtccaccagaaggtcgtgttcctgccttgttctctgcagaattcagacattttttcagcacttaaatctctagacgtctgagtcacattcctatatctgaatcttttcgtgtatcgcctgtctaagttatgctacttgatatagattttcagaaactaaagcactagaggaaggaaaatatataccgcatggtaatcagtgatgaacttattggaataggcaccactggtagggacgctgcgcttggcctcattaagccatctcttcatccccgagacaaactctgcctcctcgacgatatcattgcctgacgtgtcaaagtcatccatgatcttgtcaacagcgtcattcttgtcaaagtcaacctcctcaaagttgataccaatgataagtgcatgaagctcagcacgggacagggtttggctctcatccatgtcaatcttgtggaacaacctgcgtgtgaggatatacaaggttcatgtcaagttcacgagctttctgttggcatatcaagagaatcaaaatgtctaagcacccacttttttatgacatcttcattgggtgtgccatcctcattaagcagccgcccgagcgcttccatttgggcatgcctgaggattccggagatcacatgcttgtgttttgcgtatgcaagcttcctcttctgaatccatggctggaaaacctgatgcaaaacgcagaacctaacagtcaaaatctagagacaagagtttccaatctatgccatcgtttcaggaggctcaagtgtccttaaacataattgtgcttacctgataaaggcaataggcaagcacaagcgagaatgatacgataagtgccagcaagacagctaggcgctgtccgtggtgggtcttcaacattttggggaattgagcaatgataaagggaataacagaaatccccatgatccgagctgcatagctggtttggacatcagttgaaataccagtgcctgcaaaagaaaatttgtgcatcttacattcaatatatacagaaccagtaggtcaaagcagtgtaaaggtaaggttaacatagtggcttgtggtttttaacatgttaaccagaacctccaaattgaatgcatccttacaaagaagcagacaaagatcagtgtttgtaatttaaactccattctactttaggatttagatgtaacaggatcaacaattatcagaaagactacattaataacaatgttaaatacaagaaggcaatttaccagtcaagctgaagcccttgttgttctgtaaatcaactgcaacgccatttggaccaatgtcacacttgccaacaacaacacaggttccccacagaagggtgagaagaaagacggtcgaaccagcaagcaaccccattccaatcaggacctgactttgtgcggtctctctactcccggacagaccagacactgttaatgtgacagaacaaagagatcagaactctaattggatatagttggatattcagagcagtaaaaggtgagtagcttcatgattgtagcatatgtaccaggagaaatctgttttgagcaatatggatatgcaaaatgtcaaaatctgcatcataccataatacaagatcggtggtcaaaatcagagaactggtttttataggagtaaatattctttttattaatggcacagaagaacattgatgtttagacttaagagtggcagagccagaaacgctaaaaaaaatggttgaagagggccaacagtgctagttttttcaaagtatgccaaagctacagtaaatttagtgtgaaattagaatccatgggggaggacacacgcctgtctccgccctaggtaagactggtaaggtggaaaacaaatactaatagagcaaaatttctagaataatgagttgatcaaatgtagcattatcatataaaaaaggtgtaccagcatccacatttaagtctataggcaagtcctacatcggtagaatacatatttcatttcagatctcattgcgatcaatgaaccatgtgcagccatgctatcatagtaaagtgtagccaaatcagtattgtgttctttttaatgaatgagtacctgaaaatgagcagatagctacaaatttcactaatattagagcaatattgcctattatctatggagaattagaatctttatggcacacgaaaggatttaacgaagagggtttcctcttataaaagtttatgaatcttagagagtagttaaaaaaaacgttaatcactatttcctatgtcgcaaaataagtttatttttcactcatcccacatgtaccaacacaaaataaaaaagactaggatactcccactatatcaaatcccaacataattattacttgtactattttatttttttgctcgctctggtctgcattgcacggtttttcttttctcaaatcaaattccggcagagctcctgccgtcagtttcctcaaaaaaaaaacataattattacctactttatctacttacatttatttcctatttttacaaactccgatgcaatgatttcttaaagataaatttatattgggatagacgggaggagccaaaaatgaacttattgtacaacggaaggagtacttcagtactactacgtcacaaatgtttaccgtgatagttcaagcatgtgattagtatgatctgctattttcacgtgacaagatcggcaacggtcttgaaagaaagacggaaccgaaaaagcataatttctggaaagctaaactccaacggtccaaccactctatccagttgcacaacatgttgcctttcaatgtgttcagttaaactacaataatttggttgcatacaattttacaaatatataatttggaactttggatgtaaaattctatgagtaaaatatcaaatctatgccctattaatttcctctgaggacaaaccatcgtatttgctacgtacaagaatagtacaagataatgcaacacagtaaaagtgcatatcaaagcaagtcgatcacttgatcacatccactaatcagataggtgcaacgcacaaagaaatattccatacaaaaagggtcaattatgcaagaacgtaataatgaaaagtaaacagaaaaggggaaaggtcaaaatgacaggacaagcactggtggaactttatcatgctagcttatctgacacatttcagagaaaaagcagagctcagtagaactaattcctcgaataagcaggaggttaatcaaaaggcatatatactttgctagagcttatactctgtttttcttttcttttgaaatagtagaacatactctggttcagtcacaagactaacagaaactttagatctgaagcaaaccaagaacagacaaatctctaaatttacggatatgagttacttttttacccttcataaacacgcaagattttaccagtgctaattccaagaaaaactttgcatcctcgaatgttaaaaattcaaaagtttcactataaaatccaaaagtcttactgctaga

SEQ ID NO: 20754 - DNA, 5561 bp, Oryza sativa
cccgtacgactgctcgcacttctcctccggggcggcggccggcggcgaggaggcggaggcggagttggaggtggtgaggcgtatcacggctgacacggggttggagaggagggaggtggcggacgccgaggccggcgagccgtcggagatgaggcgtccgtacgcggcggcggccaggaggaagaggaggagcgggacgagcgggaaggagcggcggcgagtcgccattgcgggaggcggccggaggcgaggggcttctcgggtagggatgggtttggtgcgcgtagctttatatagtgcgatctgtgcgatatttgatttatgtatttctttccttaattaatttagtaggagtactactagtttataatatagtaatatttttttgtgtgtgtgtggatcaacggcaaggagaggctgtctggctgaagagccggatccaatgatcatatgtacgccttggttaaagtggttcgttatacattccttacctagcgatctgtacgctttaacctttccaactagagtaaattccctttgtactcctgaaaactcacttaattccttttatatctctgaaatttacccgatcccttctatacccctgaaattttaatttgattccttgtatgccctcaccgttacattttccatcatttcactgttacgtttggttgcaaatgtcatttttacccttgatgctttaggtttaaatataagcttcaaaaacaattgaaaattttatttgagtgcacagtatgtgtattttataaaactaatgggactaaataattagtgcagaaaattttgacataaattttgaaaataaaataaatgtaataaattaaattttttatttgaaattttaataggacaatggatttttttatcaggagcattcataaaaaaaatgttgtgaacatgggtagtcctatctttatatgaatgcccctcatttttatgacttcttttaaaaaaataaatacgtatttttctatttcattatctaaaaatattttttgggataaataatacatcgcacaacaaactcataactataatagtctcatgcgagaagcttttatatttttaataatgtaattcatgaatttctttcttcatccaagggtataatagtcatttttatagaaaatacacggtcaactgacgggaagggtatgcaagggatcaaaatcaaattttaggggtacacaaggaagtaagcaaaattcaagggtatagaagggattaggtaaaatttcaggggtatataagggattttctcttccaagtaaccacactcaaacaatcaaactatgacatgttatacatacgcgtataaaaactatggaaggtgcgaaaccatattttggcctattgtgtgcagaaattaccatgagcttaaacattgaaaaattgtgaacaaggcaaatctataatttgaggtttcacaaaagaaaaaaaactagaattttaaaataatgctttggtgcgagcacctgatactacgagagaggaatgtgtggatctttttctctttcgccctcaatctcatcaatccctttctgcatggacgactaggaattcgtgggtggctagtagcttggagttgtggtaggggagagcacctatgcccctattgtagagttatggcgaccaatcacgtataacggtgattagctcgacgttaattcttttcttaagctagtatctgagagtcaccagtttcgtggtggcgggttttttctttttttcctgattgtagcatttcagggttgtaattttatttttttaatgctacattaaaatgaaatctcacacctatcttgtgtggttcgtttcaaagagaaaaaaaaatacacgcatcatgtcagccatttctccgctatcttttctctctcttcacctctgatcccttctctcttctctctccagtcttcatccctattctggcaaggttgctcatgcggctacaacacataactataacgacggtggcaataactactagtgacgagcttgaggtggctattgcagctatgatgacgagcttctcacaaagtagtgcctatgacaatgatgagcaatggcggcagtcgcaagttggggcatgcggatgccccgatctggtacttgtgaagcttggggctaccggattcgatggtagtatcacttagggatgctcgatccgacatcagtgaaactcttgagacgctagactagtggtgatggagcttgggaggttcctcctttgtaatacgtgcctagcaataattccctgcaggctgaatggataaaaaaaaagccattcattatccaagcaatataaggcaatcaaacacacccttaatacttttatgatgagcacaggaacttagaatatatgttcaagaaatttgttcctcagctctccggaggatagatcctgaatttcgttttaagagtccatttggctcaataatgtgcataaacgatgcaaaaattatggctcggccgcatacgtggccataactggcaaagagattagctttctaaatcaaactgtgggacccgctgatttattttgatgtttgtttgagatctttggatggaccgtggaggatccagagttcacactgctgccacatataattttttagaatcagatcctaatttctcattcccaaataaaccgaaagttcagctctttgagctcagaaattgatatatcgtcttgctcttctcttttcttgcgaggatagctttggcatttggtcatttaagtcctactatccttagcttcgttgctatataaaagcacagtggtacatgatcgtgactcggtgatgccaacaggcaacaagttatacgacaataacatggcgattttcaatgctttttttttctttctgaagaccgtgtcaccgtgtgtaaagcctgaccccgctggatgtttgacaaaacaagtgcttatagatctgcttatgcactgcattagcaactggatgcagactgcttgtataagctacgaattgcttttataaaaaataaaaaactaggatggtcatgcaacccaccaacaattggtcgagatggacaaataaaaaacaaaggcaaatcgctcttgcaagtgcaaatttttaaacggaggcaactaaaatctactcctatatttcaattaagactctgttcttccctcttctttctcaactcatatctctctcttttctttttttttgttacgtacgcttttcaaactgataaacaatacgatttttttgcaaagttttctatagaaaagttgcttccgaaaatcatattaatctatttttcaagtttttaggctacacttaattaatcacgtgttaataagcaacaccgttttctatgggagtacttttcaggtcactcatgttccagctgattggcgctgcatgtgtccgcacagtaggcaccttgtttctataattaataatttggagtgatctgatcctgaggaatagatctaccactctcatccaacagatcagcaggttcatcagttattttattattattattattaaacttattttttagatcttaacttgtgccgttagtccaggacaatccagtgctccatccatccatccatgtgctatttcaaatctatttacaaataggcgagttatgtatgccatcttagcaaaacacaagtaaattcccaatcccgttggttattcttttcaaaaaatggattgttgttttttttcattatattttttttgaacaattaaaataaaactccctctaaaacatatgttgtttaaaacagttgaattgacctgcgcttagtagaatttgtgtgccaaaaacgacaattaatattcaccggaggaagtaactcgtctatgtaccaactaaagatattcacaaccatatttatgaaaatcaagctttaaatcccaataggtagacttaaggctttgttcgctactcttggttcccaactctcctatctcgttttccgtgcgcacgtttttcaaaccgttaaatggtgcgttttttaaaaaaattatatatgaaagttgtttaaaaaaatcatattgatctattttttaaaaaaaaatagctaatacttaattaatcacgcgctaatggaccactccatttttcgtgcgcattgtttgggttgggaaacagacctaacgaacgcagccacctacaaccccctaccacactttcggcatttccccggattaaaagagaagggcgaagcttagtaccaggatccaataaccctggtgtcctctatatgaaaccccttattacaagaaaagataaaatcatgagaattcacaagtagtgtatggtgagcacggttcaattcctcgtctacgcccccaaagagtttgttagtgcaaaagggttttctaaggctggcatttggttgctaaagttcgtcgtgcactctaaaatcttagtctaatgtaccatctgttctatacacacaattagctaaatcacagtttagcaaacattttctgggcacacaactgttgtatggcactctttgccaaaaagacaaaaaaaaagaggttaattggatccatgccactgcaaatatgccaattcgaaaaaatatcactactatttacaatatcggctacgtgccactggaatttgggaaaattggaatcatgccactcccatccagttttctgtcaacctccatcatctctctccctcttccttctttgcttcttcgccatggatgccggtaagccctccacctcggactcgctggtccttgccactgcagctagcaagcagtcccctccatctctcgttgctcctccgccggcagcagccatgacccgtccattcctcatcgtccccaccggcggacgcgacaccctcgccgttgtcgttaagggaatcaacggccggggcgcttctccgccatggaggccggcgagcccaggaggacaacggctaaggggaacgagcgaccggggagccgagggtgaagctcagcgggacgagcggcacgggggaaggaggtcggtggtggcagcgacaagggttgaggacggtgacgcggcggtggctgggtggcaaccggcacaggggcggtggccggggaccttgccgggggagcagacgatgacactgtaggcgcagcctggcctgccggctccgagacgaggggctcgacgacgacgacgcaagcgcagtctggcctgccggctctgagacgaggcactcgacgacgacgacgacggcgcagcccagctcgccggcttcgagacgaggggctcaacgatgatgacgacgcagtgcagctcgacccgccggctctgagacgaggcgctcgacgatgacgacgacacagcgcagccccactggctggctcagagacgaggcgctcaacgacgacgacgcaagcacaacccggcccgacctccatctctaagatgacaacggcgacgacacctgccgcgtcaatggtggtggcgagagaggaaggggaaatagaagagaggggagggaggtggggcccacgtgcaatagggggtaacggggatttttgacggaaaata

SEQ ID NO: 20755 - DNA, 27508 bp, Oryza sativa
tgaggggaagttcccaaccaggatcaacaactccctctggacaagcattttgatatgaaaaatgtgaaaagggtaattcggttattcttgaagcttctgttacttgactcatcaattgtatggttataatcaatagatattccttttgccttttttcttttgtgccagattgttcttgaggctgatggttaccaaccatacctgatatcacctgaaaaaggtttaagatctcttataaaaggtcttctagaattagcaaagggaaccatcgatactccttgtggatgaggtaacatagttgaggatctgtttccttattctgaactagatagctttcctgttgtagtatattgcagtattatttcttattactcttcaaactctcttctacatgaacctttgaaagacccttgacttacagtctattagtactcttgtctggcactctgatcttgaaacaaatttgagttgcatgcttcatatctatatattccactgatatccgagtgcacttgcataatgcatatttagttcacatcattacatcaaaacctgcaaccaacatttgtgttattctcaattcatatttgttctgtgccttcttctacaagcatgtttgcaaattaacacaccatatgctagttccaagattgtactctcgaaacaacccccccccccccaactctcaacttacaactgtcatcactactcatgtactttctgtttgaattataattgccaggttcaccgtgtattgctagatatagtatcagccacagcaaatgccaccccaggacttggcagatatcctctatttaagcgtgaggtatcttcttaggattcataaagagggaagctttcatgattcaccattagtaacattttttatctccatttccgcaaggtaattgcaattggatctgctgctttagatggctttaaagatgaggctaaaaagatggtaattgcactagtggatatggaacgagcattcgtgcctccccagcattttatccgcttgttgcagagaaggttagtcttattactacgtagtaaccttggttaaaatttcaatgtaacttaatgaaacactgatgatacttgacaaaacatttgtggaacactgatggtactaggtaatactcagtgtctcagagagattcctaatgcctcccaccatctctcttttttcatcatctataggctcaatgcctgcattatctttccctcttaagcttactaatctctatttagatgtgtttttcaatctttatgtgttcacagaataagtactcgaaacttggtcttatattgcaacaaactgcataacctatataatttgaaattctaaaattacaattacttaacaaatattttgtgtttccttatttatcctcagagtcgtacccagcatgaaaaatactcagatgattaacacataggagacaatgccttaattagagttgtaaacaatctgctgatcttgtcaacagcttggtctattgaaaaaaacgagaacaccaagaagggaacatgcgcaaccacaattatagatggccatatggcccgtggcctggcccaaggcaccccattttggcccggcccaagcacggcatggcctgattggggtcgttctcgtgccggcccggcccgacagctgggccgtgcttgggctacgacctcggcatggtgggccggcctggcacggcacgatcgaacaaaaatattatagggatgcaaaatatacttaaatagccatataatgcaaggcccaaagagaagaggaatacaaaatagacttattttccagtcatatgaacacagcccacagagttgatggatgaaaaatacacttattctgtggagaagcacgatgggctgtcgtgccttcgggctggcccagcatggcccgagttgtattgggccattcctgggccgtgtatgcagcccgtgggcatggcacgactaacctcgggcctgggccgtgctgtgccgggcggcccatttggccaactataaccacaaacactttgtctattcttaggcttatgccccggtctaaagtggcaggttaatgtgctactaccatccaatgcactattcagacagctaccaactcaactaaagtggcaagttaatgtgctgctacctactccctccgtttcaggttataaaacgttttgactttggtcaaagtcaaattactctaagtttgactaactctgtaaaaaaagtagttatatttacaacaccagcatagttttattaatctataattgaataaatttttataatatatttgtcttgggttaaaaatattactactttttttacagagttagtcaaacttagagtagtttgactttgaccaaagtcaaaacgtcttataacctaaaacggagggagtactattcaaactgctaccaattcagctcagcccagccaagtctgcagtttagaactgaacattagttggcatactacaaggttgggttactaagagaaagctgtctgcatgtctaacactcgttttttttcaacttttaacatttttcccctaaccaacataagccacatttctctaaccatcagagtagtggacagtctctaacaatgcagaattaccatgtctgggggtatgtgtgtgacatgaaagttccttggacatgcgcatgataagtgcctgctgttcataataataaaataatatattactcccttagttttttaagtagatgattcgttgaccttacgtttgacactttattttattcaatttttctgtgtaaatatgaaaaaaatgtaactcatcaaaccaagtcacaacaaaataaatgatggttacataatttttttaataagacgaatggtcaaatacatatccaaaagtcagcagcgttatctgttaaaaccggagagagtatgtagtcatacttaggcagcatgggcaaccacaattaaatgcatttttttttgccaaatgtacattttcagccagtttggatgttttgctcaaccatctgtgctaaatttatgctgtacggatggatataaaccatatctgtgttgaaatttttaagaaattttgtttgattgttgtatatgttggtgcatggtctttcctgtttctttcaatctacaaagttttgcatatgttgtcttgcaccgtctagttttgcttcctattgctttgaaggctttgtttctatcttgatgtatacgtgttaggttttacatgcagaatggaaaggcaacgtcacgaagatgagctgaaaagtcgctcaacaaagaaggtttcagatgcagaacctagcaaagtacgcttctgtatattgtatattgtgtctacctttacattgaacttttttttcgtacagatattttttccttggccatatgttttaatcattacttctgtgtgtgtaatattctacatcatgctatttccccagttaacgtgtggctttcgttatatgttgtcaggccacaagtccacaaacccaaacaaaagaaggatcaaatttacaagtcttaggacctgcaggagaaattactgctggtatagtcttaggacatatggcagtttgtttaaagcttatttattggacgtagaaatagtcaaaagtatatgcctattagcataatttactctaatttaaatctatgttttttaaagtttccaacaggtttattttcttatttaatagttttttttcctatatcaaaggtttccttttcaaaaaacgtgcaaaagcaaatgactggagtaaccgctggtttgttctaaatgagagaagtggaaaggttggctttctgtttaagcatcttacatcccgtaacgtcatttcaaattttcactgggtttttactactttgatcatgggacaatgaattttatccagcttggttacaccaagaaacaagaggagaggcattttcgaggcgtcatcaatttggaggtacatatcttcagtgctctttgcttgtgattcttctcatcgctcgagtaactttctcgagatgaatgtgatgatgtcatgcacgtagatggattctcggttgtgccagtaaatctataaaggcagaagaaacctaccattttgcatttctccaaagcaccagtttatttctatttttggatctaagcattagttgaaaacattttgattggtgaagtaaaagaaaaataattagctctaactcaattccatagcactagagcaaactgaccgtcagtagattatttttcctttggtgtgaatcccatgataagtcatcgctacattagatttgtactggcttttgcttgttaaagtttttaatgttttcaaattacaggagtgcaatcttgaggaagttttagatgaggaagatcctacgagaagccttaaagatcctaaaaagccaaatgtgccagatattggaactcctggtctcattttcaagattacccataaggttgcttataaaaatgttttaaaaggtacatttaaatcagttctcatttataccaggttgtttcatttcttagtcttcacctgttcattaattaccgtggcagctcacaaggctattatactgaaggctgaaagtatggcggaaaaaactgaatgggttactaagattaggagcattgttgaccaaaaaggagcttctgcaacgagtggtttaccaatgaagcaaagccattcggatggttctctaatgtccacttctaaaaaggatggttctctagtaagtcagaatccttcttttattcttcaaaaagttcatcgtgaaaagattttgaaaatcatcttctagagtagaaaggattaattagtatatcgtttttgtaatcctttcctattttcaggacacgatgcttagaaagccagtagatcctgaggaagagcttaaatggatatctcaagaagtccgtgggtatgtggaagctgttctcagcagtcttgcggcaaatgtccccaagttaagcatgtctggtgtcttgcttaagctttcctggtctcctttctagcttcttgcattaatatcattgatcctgttgagcaggctgtggttctttgccaagttgagaaggcaaaggaaggcatgcttaatcagctctatacttcgataaggttggagctaattgatacacagattgaactcagtataacactttgtttttagtggcccaattcatagttcttgctccttttgtaaccattatgtggcattattgatctgacagcaaaaatgcacctatcttactctgcccttgtttagttcccaactttttcttcaaacttccaacttttccatcacatcaaaactttcctacacacataaacttttaacttttttcttcaaactttcaattttagcgtggaactaaacacaccctctgtttcattaacaatgtgttaactatgtctagttcacaattgtcatttgtggttagcatgcgaagcgtagaaaggattgaagagctaatccaggaggaccacagtgtgaagcacaggcgtgaaaaaatcaaaaagcaatcatcacttctttccaaggttactcgtctgctccgtatccatgataatcgctcagctacttctaattggtcgaatgattctgctggatcaggtaaccatatccttgttcctcattagttgacatagactagggaaccacttgcaagatgcatgaaaactgccccaaggaatagccctggacatttcttacgaaatagtaatcaatacgaatcttacagttagtatattcgactgtaatgttctgtgactcattattctcttctatctttatttcttctcagcgtaaaatcagatcacatgattggctttcgttaccaactcactgaatttccaacttacctctttcagatagtaatccagggagcagtggccagtctggagacgaatggaaatctgcatttgatccatcacaagatgttgatccatctgctgctggaacaaacacggggagccgccgcattccgagccgaatgccgccgccacctccacagggtggttgatcagttcgtagttttctggtcctggggcttctgttttctcagctgcagggagtacattccattatactattgctctaggtgctcttgatcaatggctaatttgggtttcaagaagaaaacagttaacgggaattgaccggtgaagcgttcataggcctttgaataacttgttagttgaagatagaatgtcagtaggacctcgaatattgttaggcacataaccgcagtacgtttatctctgtgtttttttttctcatggaactctggcaaaatcttgtatttcatgataattatgttgtttttgagtattctaccgatttgctatccatctacctatttgttgtattgtttgggcattggttaatgttgagtataatatgaaaaactccaacaggcatgcttctaaaaaggaatataaaggtttaaaatagcatttacattgtgtttcatgcaatactccctccattcgtgtatgatcattgtatatatcttttcagtgataccaaggagagcttaaaccttcataatgcatttaatttctgtactaatcttatcttagggaaacataacatcgtctgattttcacgcaagcatggctaagggcacgtacaacggtttttattagtagactttctctattgtcatgcaaataaatttggtgatgtgaaagaaagaaagaggagaaaagagaaatacggtgaaaagcggtaagacttgccgaatatattaaaaggaataaacaaacgtgcaaaaacagcatagggagagacagaaattagggtacaactcgagaaagagcatattacataatctcgagaaaaggattggcaactagggataaccacattcctttaaagggtctgggaagctagattgatctgccctatattttcctttacagcgaaagcaacttgttcttcgtttcgatggatttgctggaagatccggcgattacgttctagccaaacattccaccaggttatgagatctccaattattttcttcctcttggctatcggggaaaggttacagagtgtctcccaccagttcgacaaattgtttgtcgaggaaatctgtgatgctaaatcgtgtccttgccattgacaaactttgtcccaaactgttgctgtaagtgagtcgtatttttgaaagcatttctacaaaggctacagatccaatcacagggccagtgtctctttagcagaattttagcagtgaggattctttgatggagtaaaaaaataagaagagtaaaaaaaatattttggtacattaataattagagaccatattgtttcagctgttgtaagacgttagttcttagatgctctagagtttatacatgtcctaacgattgaattaaggctgtgtgcacacgaaacaaagggacaaaatgcaacgatcaatcagaaagtgacttgtatactgtggaatcgataaaaacgaataggggaagtactatctgttctaataaggattatattttttgcacggtctttaataactagtattttattatattctatgttcctaacaaatatgaaattagcatcacataaaagtacttcaaaatacgaatccagtgatataacatgtataatgcttagtataatgcttagtataatgcttagtatagatataattagtatgattattagtcaaaagctaccaaatttattttttttaaaaaaaaatgagacgtcctataatttaggacggaggtagtactaactatggcatgttcagggtttgattttagactgcgcaaaacgagatgagttattaatgtatgattagttaaatattaaagcactataaagacttaaaaataaatttatttaattttagaaaacatttatatggaaattatttacattgaaacgcaccgacgaaaaacatgctcattgatcttccattggacacaacttttaattcacatatttgaattttaacactaaaatccgtgctctattttaacctttcaaactaaagacttggagtttggtcattgccatttcaactcgagaactcgattcagtaacaccatttcaactcttgctgaaaagctggatactcaatctctctatctattataaactaaaagtctattaaactttctacaaacgctcccaagccaccacgtggtgctcctacaaacgttcctaggccgccacttggcagagtctaatcttaccgtcgattttcatttaaattgatgggcccgttattctgtaccgttagattagatctatacctgccatcagcggtggagccaaacaaaaaaggatgtggggtcatcactgtgaaccaatattaccgataaataaaaccataaaaactgcttggttttcatacgtcaatccagtagtttgagaacgttttttttattacggagttgtgacaaaaaaaacatcgatatttttttttcttctacactgttgcttgaaaatcatccaatgagcttgcaaaccagccggctaatcacaaagattttaattagtagctgtgctcatacaagatgaccaggtggactggggttaaatcaataattttactgggagcacattcaactacaacataggtaacaagaaacccttttacatgccggtttttctaaaagacacccagataatgacacgtatgacttcagtcatcggtgttagattataaaatcggcacctataatatgtataggtgccggttttgtaccaataatcggcacctataccgacttataggtgccaattatggaccatcatgccacgtggctgcccttatatgtgtcgattatttacaacaaccgccactcaataaatcagataaatcgaagaaattataagaaaaaaagaaatacatctagccatcgattttcagttaatacggtggacccaatattttatatcgtcagatctatcttttaaaaaaaatcccaaaacccataaaaaatcatctccaccgccctttcctcctggacctcctccccctcacggtgactacgtacatacatccctcccactttccttccttctttctctaatttaactattcaactttaattgatgaatccatttacatataaatagctcaggcttctaatataaatgttttaagagcagatttttaagcaccatattacacaaatattaaatttagattctataaacgctcctaaatcaccacgtggcaattcgacaaacgctcctaaaccaccatatggtactctaataaattatgaaaaaaaaacacagaaattataagaaaaaaaaagaaaaacatctaaccattgatttttttctttaaattggtagggccaatattttcaatcactagatctaatcttaatcttaacctatttaaaaaattcaagatgacaccgtgctctgtcacttgatgacgctatccatgagtcaaccacacatactccgcgcgtgtgttccgttaatgagggagagagaaagagatcattcttatgataaaatcttccagcctaatcgtaatgcagtgttgcagtccatcgaaatcaatttttgtatatgttcactgcatataaattaagatatgaaacatcaatgaataagcacaaacaaagtttgacgtgaccaatgaacagaacaaggaaatttgatcgtatcatgcatggaggaagtatggcttaacatagcatgagatgataatcaagaaaaataagtcacaactaacctaattagataaaaccctgtataaggcaacgttaccgcataaatgatgtatgataatgacagaaacatagtacaaaataaatttatttcgtagctaaataacgtaatcttatatgttactttgtacagtttgcatctttagttaatcatccacaaaagctataaacacagttaagattatgtgctttgaaaatttagatcaaatatagattcaacatcataagacaaaactaaggtggtatggctttgtgaaagaagaaacaagagagagagctttcgaccagactaatcatcgaggtgctagaaattgagagatgagaaaaataacattaactatacttagtgagggttaagtgtataattatatatatgattgtagcagacataataaattggcacgaacataaaaaatgcctaactatgtaacacaaatttagaagtggaaagatgataagcactaatttatgcccactacaagctagctaaaattattaaaaaaaaggtcagtttggagcaaataaattataactctaatataattttatagaaaaatattcaatctatgatatcaacaaaaattttacattttaaaagcaatgacacgtgagcagttatgtttagacatcaaatcatatttccatcgaactacgtggagcctcgcacaatctttatgaaatggcatatgggttgtattccacatcgcacaattaaattggacctcacgaaactttttattttagcaatggaaaaaatgcaatactttgagaaaagaaatagaaagttagcagcatcagagcaggacacaatgaatgagttataatatctagcatgcattgctaatgttatttcacatacggactatcacatattagcacaaataattttaagtctcttatccaacttttttaatcgtttgaacaattatattcatcacaatgcttttactcatactattatatagatcagttacaccgagcttaaatcagtgtactcccttaactatacaaaatatctcattttatgtcctaacaatatttttttatttaattttttatatatgttttaaatgagtcatatttaccttcacatatataaagagacaagagccaatgataattatgtgatatcctaaattccaatgtgtcatgggtttttactcttgcgtgtatataagccactaatagcattgcataattgatggcctttcatatttaaaagttatatttttcatattaaatttacattttattactcctgttgaataggtatttttagaaaaatatcatatgggtgccacgtatcatagatagattgatgttgtgcaagaattaatatacttacatgcatatggactagaggtaaggatagcttgatacacataaaatatattcattaattaataaattcttaatatttcataagaaaagagcaagacggtgaacattcaattaaaaagaatgaaaaaaacatatcaatttaacttgtcaagcatgtttttaacgaactaacgcgcgggctacattcctagttaatataaaatgaaacatgctctgtttccaaacccacatgcagatactaatttttcaggaaattaatgaaatcccactgaaaaataaaacaaatatctactgcctaaaatatcctccgatggccgcaacgaatggctcagatttagccgccgtcggaaaatatcaaccaatctccttcgctgccggcgctcagcattttggctgccgcgactgcgcggggagggagcatcgttacgcgactgcccgccatggcgtctcctcgctgcgccgccgtcgccctcctccatcccgccggagtcgccgccggcggcggagctcgccggcgtgtcctcctcctcgaccaagagcggccgttgtgggggactgaggtgcgccggcgccggcgccggcgtttctcgagcctcgagacgccgccgcggtgcagcaagatgtacgtacccggtaattatttgtctgccctcctcttaattacgccactactccctccatttcatactgttagcttcaactttttttaacttatttaaatttagttaagtttataaaaaatatagtaatatttttaagttaagtttataagaaatatagtaatattcctatcccaaaacaaacataatatctaaaaatatctaatgttatatatataatcaaactaatttaatgttatagatgttactaatttcttctattaacttaagacaaatctaaagaaatttagctaagaaaaaaagtccaaacgacttataatattgaatgaagagaagttaaaatgatttataatatgaaacggagagagagtattaacaatttaatttttttagtcgcaatgtttgaaacagaatcatataatttacttgctttgcgtcagttttgcataaccatttcgaaccaccagccagttttggcaatttgacatgaaacagttttattgagttttcttgtcaaaactaaaggaacagtttgcctcaaatatgctaatcacattagtcatctgtcatcctgaaaaaaaataatttcaaatttaatccacacaataagaaaaaaaacaaattactacaccctaagtagtactagtactattcatagtcatagccagatttgttatttttcttcaacttgttacgtatttacatgttggtgtagtgatacaccacacaattatctgtattattattattattgtaatttttcataaccatttaaaacacatgtgaagaataactgtacatccacttaggtgacaaaaatgagttttcctgtttataaaaaggagagacacgtttaacctcgaaaatgaagatgagagagacgtaagctgggccagcgtttgatgttttgggcctcttgggtttggatttgtgccattgtgtgggcttacttacatgtggtgtgggtttgggtttgtcggtccaggcttcggagagggatcgccggagaagaaggcagcaagaaacctgcagcacttcttcaactacattgctgtcagggttgtgctcacacagcttgaggtacctactcttcattccatctattttatcttctcattgcttccttccaaagtttcatcctaaaattcaaccggcataaaaaggaataacaaatgttgttaagttgtatctaatgttactccctccgttctaaaataaacaaactagcacagaatatgacacaactacggttctgagcatcttattatactatatttgtttgttttgggatggagagaatagctctaaactttgtacataatgctttgtgacactctgatacacaagttatcttcgttccttttttttctttagagagagatattatgtcttgctggagatctgattagatagctctttgtttatcgtgtttgtatcatcaataaagagttacaaccgggaagcatatggtgagctgatggatttcgtgaaccgaaactccctcaacgacgctgatactttctgcaagaagttgatccgcgagtctccaaggcacaagcagctaggtaatgatgataaaacacttatttgaactcctgaaatagttttgaacttaatttgcatcctgccatgtttcgttcctgagtttttctaatcttatcaattcccaccttacgtgaatgatcaactctgccataaagattactgacgtcttaatatcttgttttcaccctggggacagcaatgaggatcttggaggtgggcactgtcaccaactaccaatgtcatcttctgaacttaaaccttttgattacctttctcccgccggattaactaatacaattgcaggtccgatctgcttatgtcaagcatgatttcgagtgggataatctgaaaaggttatctttcaaggtcagattaatattccattttagttatctgtattttgcagacagaaaaaaaactaccatatatttcttccctttctggttaacttaactaatatcctatttgattgatttatttttttgaacgaattagcgagccaccaattttatttaatagaggagtaaactgtacagtataaatggaaaaacaggaccaaaggtcctaacaaactatgttataagccaatttcccagatgttatgctcctgctaagatccattctctggcctcctctttgattttcgtcagcaagccattcgacgagagttccttttgctgaaaggttctacggtttctttcattccaaatctcccagatgaccaaaagtgtcaacgaacggagggccttcttgggggcttctttggtgcttgtgattatttcccaccattctaggattgacgaagcttgctgcctcgggttagggtgcaagttactacatgccacccagttcgccatagcctcccaaattcaccttgtgtagcggcaattcaccaagaggtggagggccgtttcctgggcctagcgacacagaggacagacggagccattcgaccaccccctagtagttagtctttctgaagtccaaactatgttctgaatgaccagccagacgaaggttttacattttcgtggggcccaaggtttccaaattagggtgttgaagttggtggccgttgtgccgagaagttgcgcattgtatgccgacgctgtcgtgtattcatcgtgattgttgagtttccatgttattttgtcctcctcatgctcggacaactcaactgtctaggtagtgctccatatcactacaagttggtcgatcagttccgttgtctatcctgtatccgttggaagggtcacgtcgagtagccactgatttgaccgcagtgcttgttggagcgataggttctttttctttgaggctgagtagactagcggcgccacgtctttcaacctcccttcccaccaggccaactcccataagctagtagttgccccgtctccaatttttatggtggttgttgcagcaaagaggagcttgtcgatgtcgtcatatggtgtactagatcccacccatgctttatcagacaacttccaatcatgccatggccatatgaggcgcaaggcacttatgaatattattaagtggattattgtgtggattatctacttgattataaggaataaattagatatttaagaaaataaatttaataaatagcttaaaattgtggtctaatcaatataagtagaagaaagtttttttttgagaaaacatatttcaaagcgtgaagcaaataatctgtttcaataactcggtgaatgagctgaaaagaacaggacctcgtgaagtctcctaagtaggaagttgagaacagtcctgcctaatgcacctagctgctagtgtttattccattgtttacctaatttttgttcttccattgtctgcagatggttgatgaggccaacacaaagctcatgagggactatgtcttggagaccagccacatcgaagacgataactgatgaattttgcagagtcccatcaggagatctatccattcatgacactaaatcaatgcccttccacggatacacagctacacgcgcgcatatctgacaatgttctgtcaatcttacatagtttgcatacaaggtgtatataaataacacaagctcaagccgaagctgaggaatctacaaagctctgtactgaaagtctgaagcatgatcccttagaacaccacaaagtgcagacagctgctacagatctgaaagatggcatgtacatggaacatggtatatgtagatagtcaaacataacttcaataaaaaccctggagataattctgcgtgcatgtgcagatggttgaaaacttgaacagtccataatagtgctgatcattagccttcagtaataatttgcatcatgttatcttctcccaatcatacatggacccttcatacaaacataccacatgtgaggaaccactgcaccattaggcagctgacgatttgctgaaacttcatgagcatttctcagtggcatcttgatcagtttcagaaagacttgctatgatctgtcatgtcttttactttgaccttagaattagtaggttcaatgtttcagaagtagcgcttgtggccttggaaatgcactgtagaatatcctgttgagttaaagccttgactgcaaagtactcccttcgtttctaaatatttgacgccgttgactatttagcacatatttgaccgttcgtcttattcaaaaatttttgtgaaatatgtaaaactatatgtatacatataagtatatttaacaatgaatcaaatgataggaaaatagttaataattacttaaattttttaaataagacgaacggtcaaacagatttaaaaaggtcaacggcgtcaaatatttagaaatggagggagtaagtagttcagaatttgaagaaaaattgcagggtgctcagtttcagaaaagaaaaatggccaatggctgtcattcacttgaggagacgggccaaaaccacagttattaagaccggtccggtccagtcaaaagatcggccatgcattcaaaccggaggaaatccggttgaaccgccggttttaggtatgatacggagaaaaaccggacattagacgggagaataaaccggtaacatgcagctggaacgtgggatgggagagaggagaaaattaagggaaaaagagacgcgcggtgtactcgaactaccgacctgtgctttcagcaatcttcaaccactgagctatgcactcgttgacgattttaataaatatgtgaatctatttgacccgtgttgagccggtggtccaaccggtcggaccatgcaaaccgtgaaccgacggcttcaccggtttaacgtccggtccggtcctgaaaaccgtccggttcacccggtccaaaacggttcaaatgcacgtccagatccggttttgttttgttttagtcgatctgggtttttatccaactatgcatgcagatgcaggctgcagcatgttaggactcaaatccggagagacagagatttttttttcttttctttcatgaacatgttttgtggtctatgtttaaataggcagcagatttccagattgatacatcggaattttgtgagtatgtatgtctctgctttcggaattcagataccatatgcatggtcagttatgacgagcaattggaagattctaaaatttttctcttccataacggaactgccatttttatatgttttgagttttgaagcatacaaatcccttgaaaacccctttttcttttgtaacaaaaacttcatctatttcaacatgcaattacatacacactactactaaatgcaaaaaatagctacacatgcaaacttacagtgccggcctattcagccatgcaacaatgccacaaacctacacatccctaatcaaaattctaacactccaaattaaaccttaacccaaaaaccaaccaaaacccctcctaataatcaactaaaattcttggtgttcaatccactcgtttaatcatcgatcgatcggcattattattagcagtcctcgccgccatcttctgggcgtgcaggtgcgcgaagacgccgaccatgggcgcggtgttgtacgtgcacgcctccgtctgcatgtagttgtcgcggctgtccctgaacctgtcgcggtcgtccggcccgccgacgatggctccggcgaccacgttcgggttcgcgccgccgcgccggaaccagcggtcgtacccctgcacgcaccccacgaaccgcccgtccgcgcggtgcgacaccatggacgccccgcggtggtgcacccgccgcgggaaccgccgcccgtacccgaccatgtagctcacccccgccgggttgtcgcccagcacgtagtccgcctgcgccctcgccatcgccgccaactcgtcgccggttgccatagccccaccggagcaccggatggtgtcgccgccggagtcgcggaggtagcgggagtagacggtgaggaggaaggcggcgttggtgacgtactgcatgttgttccagcggcggacgaacagcatgccgccggcggtgcggttgacgttgtcgccggcggcggcgttcttgccgaggcaggcgcagaggtagtgctccgccttggacctgtactgctccagcgttgccgcgtgcgccgccgggtggtcgccgccgtccatgagcaccttggcggcgaggatctggaggccggcgtacttgacgtcccagctgaactcggtgacggcccagccgacgccgccgagctcgtcggccatggcgacggcgtagtcgaggtagccgcggcggccggtggcgcggtgcagccacagcgccgcccacagcagctcgtcgccgtagccgctcaccgacgcgtagtacgccctcacctcgccgatgctgctgtcgtacttgcccctgtacctgtcgccgaagtcgaacagctgctcggcgtggcggaggaggaggcgggagtagcggggcttggagcggcggaacacgatggacgcggcggcgagcgcggcggcggtctcgccggcgacgtcggagccggggttgtgcgcggtccaccttgtaggcttgcctcgacgtcgtcatgtcctccggccgctgccagcagtagtggtcggtgtcgccgtcgccgacctcggcccacagctcgtcggcggcggtgtgcgccttcacgaggtagtcggtgccccacttgatggcctccagcacgtgccgccgctcgccggcggcggcgatctcgtcccagaactccgccgcggcccacgacagcatcgtcatcgtgaacgccatgggcaggccgaacttcacgttgtcgccggcgtcgtagtagccgccgacgaggtccaccccttgctgcagcccgtcggcgagccccgagtggccgcgccaccgcacccgctggttgtacggcaggtgccccgaccgctgcgcctcgaagtagagcagcccgctgtgcagcgccttcttgtagtcgaagccaccgccatcgccatcgccatcgccggcggcggccgccattgtcgacgtcagaacgaggagcaccgccaccgcggcgcacattgtcatcgccgccaccatggctagctagcgatctcgcgagctccttcttcctctttcttcttggctgtttgaattgcttcgtctcctcgtcgtcatctcgcgggtgctgccctttttatggtgttgcaaagcgccatggctgacctctcgtcgttgaccacacgttaacctggtcggaccacaacttagttaattacactgtcttagttaattacaggtgctaatcatttgattatagggtgtccaacagaaggatctaatgcagagcatgtaatggtggggccaaggtgtcagtgggtcatgaggctgcctcagcttgggggcagtttctgtcggtagtgatctagctggattaaatggagaatagcttaattaattaatttaatttgctagagtagaggaagaagactattatatggagattaagtagcttagcttgcaaattcaacagtttagcagctgtgtaatactggggttgacttgcatcaccaaccatgtggtttcattgcacatttatttatttagtaccccagatataatatgttgtagtcaaaccttcctatggaacaggggagcctatatgcagccggagaatattggaaatcaaatgtatccattgatcaacacgttgctatgtaatgagtattactttgccaaaaaatattcccaaattagtgttttaaaaaaataaaaggttgagcaggtctttatcaacttagaattgaattcaactgccaaatgaattccacttcataattaccactcattagttgtatcaattaattaactggatctgttccaaaaccaaattaatgttctaagtggaacaagagattttgtgtggtttcaatgatatacaacaggtaatgatcatgtttgagttaacaaagcatgtgcaaaagaaaactcaatttaaaatacaacttaagttaaaaaagttgatatacagcttaagttaaaaaagttgaaatttgaagatgcagatgttggttatatcaactatttatggtattactacctctacttttaaatgtgtaacactgataactttaatatatacatggtgattcatcattcaattcgtctcctctacccaaaatataagttttgggacgtaaatagtaccatctattttttttcctttttccatatttgcactaatcttgttttgagtacttatcttgggctatctttatttgctgaagtttcacaatggattagaagtaaaccaatcttttcatttaacatcacatatatttaccatctttaatttatactttggaccggggttagacagcttgagctgccatgttggctttggcccaagaacgacatgggttatgctgtaatttttgcattttgcttcttaagttatgagaatggattcgagggctggtgtccaccacaaccgaagtccttaccaccaaatacccaaaaaaaagttctttttttaacttactttgtatgaaataccaaagaaactttttttctcgcgtgatgaggatactcaattgctgccataccaatcctttatctcgcatgatgcaccatcagttgcggcttcatggcttggctaaaattaagtccctcaaaatgcaacaatggcaattatatatgtattatgtggaaggttaggcttgtcctagttcattgtgaaactttggttaataaaaataactttactcagctgtttttgggtctgtttgggggagttttagattctgagaagcagctgtttggtagccagcttctgagaatctaaaaaagctctgaaacctagcttcttcagcttcttgctttttagttcatttttcagaatctgtaactatggattctcagaagctgtggattgtttggggcggcttctagcagaagcagtttttgggaaaagctacagctgggacaagctcccctaaacaggccctttgtcaagtacccagagttctattccccttcgttttgtcctaaacatctgatgggatagcacctctactccaacgaatgatcgatcaacacctgcagttttgatatatttaacaacaatcaacttggtatctgctgatctatctgctgggggatctagagctgtacaagtgctgaattgaatccgacagtgcagggggttggatccaatgtaattaagcagtaattaaattaaactaagcaggggataagacagctaccgttagattcctttcccctactactagggtgaggaacaaaaaccgtttagttggttgctgatgcgtctttgtcgcatcgcattcagtcagtctacgcatgtcgcagcctacaggaacaatcgacgactaagctaggggctatagggattagggaagtggatgaccacaacacattacccatatagtagtatatgtaaactaaattaagcatagttgaccaagctatatacaaaagttaactgctactactaattaacttcgtttccccagcagtaatgagaatcttagctggattatatgttctgcagctgcaggggttgcagcatgcaatgcagcctgacaaaatatactagagatgaaaaattcatgtttattcgatccctagctagaccgtcagtattcgtcatatatagtatttgtaagcaaacaaatttaacgtaatatcccaatgcagtattaatatggagccactctatcaatcaggattttgagcacaagtgtcagccattttgtatcctaattttaattcgatgaaaagaacttctaaagaaatttaactatgaagcgtgcatgtgaattgaagtaggagtacttaatttggttttgttttgcatttgcagtcttggatctctctgtcaagcttcatgttatcgatcaaagctgacaagagttctgctatatgctagtaaacatttggttgtaataatgttattgtcagtccgccccttaaaaaacgataattgccagtatatgatctgtttaatttccttaacttgaattcttagttgcatagtgcaataattgtttcagtaattaaattaataaatagctagttgacaatagcacatctcgatcggtttcacaaagaaaaaaagcatttcttacctacatgtttctaaactaatatatattgtctgcaaaggccagttggcgcaatgcgatgcaccggccgtgtgggttcaattaagagaaaaacttttgattactgtctgtaaacatattttaatattctgaacttatgtatatcacatggaattctggacaagtcacctgatgaatggtcgatgtgcagagtgttgcagaccgtgtgtgcaacagaaaattaagctgtatgcaatcatatatcgtaccaagcctgttaattaattattttgatgcagagcagccggattaggagaaggtattttgcaggctaaaacgtccagcgtgatccctgatttaagttaaacatcatgtgacatggaatctaagcatgttgctcctgaaattctcagtaggttttttcagtatatttgatcgtgcgggttcattaaaaataatctccgggatcgagccatgatcaaattaatctctgatcagcatgatgacaagtacttttgttatttctctaatttacttttgtgcagagttgacaatgaactgtatgatgttttctttcttctttttgttttaattcataaattaaaattatcattgcttatgatatacgttatttcatgtttttggtgtactcgtaaacattaaaaatatgtgttcactgggagagtatgccttcctattcgttcatagtggaatacgcgtgtacttttggagacttagttatatatataactaattaatggttttatcagttccatttgtcggcgagagaagtcaaactcgagagttgagtttcttctacatgatcaggactggtttgatgtagttcatatatatatatgtcaacttccattgtacagaatttgcaaataacaaattccgacacttatggtgatcgatcgatcgatcgtcgtctgaacactgacgcagctatgctataagtactacttcctccgtttcataatgtaagtcattctagcattttccacattaataataatgttaatgaatctaaatagatatatatgtctagattcattaatatcaatatgaatgtggaaaatgctagaatgacttatattgtgaaacggagggagtactagtatacacaaatgtatttatttgacatgcataaaaatctaattaattgacatataggagtatgttgttatacacatatccgatcacagttagatacaactgacaacagtattggacaccaaggtatatttaggttgtgttcggtactctcttttcccaactctcctctcccgttttcgcgtgcacgcttttcaaactactaaacggtgtattttttgcaaaaaaaattttatatgaaagttgctaaaaaaatcatattgatcctttttgaaaaaaaaatagctaatacttaattaatcacgtcctaatagaccgttccgttttccatgcatgggagatgtgttcctaacacccacctccgaacacagccttaattggtatacacgagatatattgagagaacatatattccgaggccgtgtttttcttcctgaatagtagaatagttgagtaactaaatgattttgtgttcactattcgagggtataaatgaatgacctaactattataaagttgaaaaaagtatttgaaacaatttttaagaagttaatatatagaaattaagtatttttttaatgaaaaatacaccatttaaaagcccgagaaatgtgtcgcattaatccattcttccattccttcaaaaagaagatgcccatatggtatttaataaatttcagagacatcaaagataaaataaattattttttacttacctaaaattacacattgatgtctacacattgatgtctacaattatatatagtgctatgcaatatgcaattttttcattatatggttttagtatatttttaactatgttaatttgaacattgttacatgtcattttttttcttttttgtatgaactgtcaatttattttatgtttaggttattagaacaatttattgttcaaccatttatatctaggaaaagaggatctttgtttaaataagtaatagtaatataagtgatgaaccaccattgaatttctatccaataggtgaaaagtgactaatttagacattcccctattatattcataaagcaatagaaaaagaaagcccctacattcattttaaaggactacaaattaattaatacttgtggagaaaaatgtgggagagctgattgtaatgtcggttgaacaaaacatattagagttgttacaaagtttataggaatacacttgtattatccacaaagcaagcacacgagttgtattttaaatatgtcaaatgcatacgtgtattaagaataagaaaatttaaaacaacacactgttcatattaaactgcagtttccttacctaactttgataatatttatattccaaattaaatatgctcattggtgttccaaaagtaccctcctgtgcaccaaaccagaaaccatgtatttgggctcgaaaactcaagctcagccatgggctatgactcccactccttttttttaaaaaaaaaagaagaagaaaagagtgccttatttaataattaaagatagtttactatgcaaattcatggatataggtaaataatttcatcctccataatacgagtacacacaacatctctcgtccatttagctaaatctgcatttcgttatacctacaagcctaacttgatctctgtgcctactgcatgtagtacaaggctacaaatggaaaatgctaaaaaaaatcattagccttattcggataaggctagctaatgattttttttctcctaaactatttgactgatctgtgataataaatgtttacagtaaaagtttttatgagtatatttgatgagaggaatatgtatttttaattattaaaatttgatttttcatgtgtaagagtgaaatgtttcaaatagcgttttactatgtttgatattttctttcaaatactttaatgactaaaccttttgttttacaacgtataacttgatgcttcacctatgttcaactgaaatattttaaccgtttaatttttaagtgagcgatcagacttccgatccctaactttgtctttaaggaagcgtatatacttctttcgtcatcttttcgaagatcttcaaaaaaaaatttaatcacagatttcatatttttcttgttagcttaaatttcatgccatttttctgatttgaattcgcaattggtactggccggtttgcggttttctttcctgaaaaaatgagaatgcgcatgggagcaaaatgggagagaccgctgttttcttatttctttttgaaacagggagagcaccgttggttcatatgacgtgcagcgcgttgcggccggcccatgcatgagattcaccggagcagaatgggcctttacaagtttactctagctggggcgagcgctggacaggagacggcccagtgggccaggccagcacaactcgtgggcttccctcctccattttttttctttttcttataggccctcctccatacttgatccaacaaactgtggcatgcataaaatttggcatggcaactttgggagccaaccaaacagcccctaattcctcccccgtctatgaagaaaaagaagacaaaaaaataaatgctactgagaatattctcccttctaaaaaatgagaaaaagggagaaaattaatctacggttgagagattatcgtacagatcgataagtttatttccaagcacattcagattttagtactaaaatatagctatctttgagtaaattttgttttacatgctccctccaggctagaatataaggatttttatggttgaacatatgtattaattaagaaagtcaataaaatcaaatgagagaaggttatgattggttgagaagtgaatgtgggtgagaaaattgaatggtggagacttgtgattggtggagaaaagaatgttggtgaagaagttgttatattttgggacaaagcttaagggctactccctccggttctatagtaattgacgttttgaacaaggttgaggtcaaactttcataactttggctatcaataactttaaaatatttagtttaaaggaactataacaacatatatagatttctctttcaaagcactataatagaagtaaacatacatttatttattgaatatattataataaaaaaataaggtcaaagatatattttgtagaccgtgtcattgtccaaaacgtcatgaaaccggagggagtagaagttgttatattttaggatggagggagtagctaactatagaagtaaaagatgattttaccctcattacttctcatgctatctctggtgggtcccatcactcactaactcttggaacatgtacctcatccatactacctaggggtggcaatttccccgttggggccggggacctagcaggtacccgcccctacgggactagggacgggttgaaattctcacccgcgggtgagcggggacgggggtggggattcaaaactatctcgtggggccccagagtataagatactgctgtaaaagcagcccatttcaaaaatataggcccaactagcccacatataaattctaaccctaatctctccactctctcctcacccaacatactccctctagcctccaccccagccaccgccctatccctcccgtctcccgtgccatcagccgcctcatttctgcgcatgctcgccatctgccacgttgccgccgcgccccttctcgctgtcccccgcctcatccgcgccccccctctccatccgtctcatctcctagctagtcggtcattgccgagccactctctatccactcctcattagcgcacccctcctcgtcggtcgtcgccgagccactcgtcgtccgctgcctcgtctgcgtgcctctcctcgttggtcatcgccgcccccctcgccgtccaccgcctaatccgtcctccttgccatttgcctcatcctcgtgcccctcatcgcctcatcagttgtcaccgaggcactcgtcgttcaccgtgtgcctcgtcatccacctcatcctcgtgtccctcgtcgccgcaccaacgccgtctgcctcgtccccacgcccctctcttgtcgttggcctcctcatcgtcggggttacggggggccgttcgaggtgcgggtccccggaggggccgggggcggggagattttgccccgttcatcactccggggccaagggcggggatgttatagcccgccctgcccccgccccaccccgttgcaacccctaatactatcccttgctctccacaccaaaaaccaaaaaaaagtaagtagagccactcatctccacaatacactgtgtatttcagccctacctctgacgagacacccccaaaacaccagccacaaccatgacctaccagtattgccgtgccgatgaactcgttgtgccaccgccgctgctgcctatgatcccaccggccggttgtgccatcactgttgtcgcatccggtcaggggaagctagatttggctgcactggatgccaccatcaactagccttgaagctttccactgccacagctggtcgcgccgcctcgttgctcctgagagaagaacgaccacaccggccactaccatccttgaagctcgatcgctcggttttcggctagctgctctggcggtggcggagcagggaaatggagaggaatatggggctactgggg

SEQ ID NO: 20756 - DNA, 37520 bp, Oryza sativa
tgtatatatgtattaaaataatatatgcaactttatatctaatttatatagagataacaatgtagttatagtgtagttacactatagttacaatgtaattatagtgtaactacaatataactagcatgtaactagaatgtaacttgaacaaatctacaataaacatgtgatgatgggactagcttgtgaaaatagggtttagatccgatagcaaaatatctcagcacaaatcttaacacggaatcaatggtaaaaaaatttgacagttttcattaaaaaaaactgtcgacggttagctacatggggtttggttttggcagtgctaggttttttttctttttcagtgaatcagtgtcagtgctaagctttgctcttgcctcagaatagtcaaagactcacgtgttcaactggtgcggtgagtaaatatggctctggcggttatgtgggaatgtgaagtatggtcagggcctcttgctcctgagagatctgaaggcctggcccaaaattgtaagggcccattgacttcgtataccaaactgaaagctcttgtgggcctcaaaaaggtccgtcaaggcccacaaaaatcagcatctgctcctgcacgcgggcgagcagcttaaaattatcccgaactgattcagaacagtataaaaaactgttgtgatcgcaagggatttcccggagcgcaggtgaggcgactgctcaccgcgcgcgtctgtcatgtcaaaatccgtgtctccccgaccgccccacggcgcacataccgcaccacacgcgtttttgtccgtcaagtgaatggaatcctcatcgatctatcatcggtgtcaatgttgcacgtacgatgatgattgatcatcgcagggcagggcaggcaggccacgtaacatccttcctccaaaaacgcaatcttcactgcacctgcgtctcaacaagagtgaaagagacgacgccatgagagggatgcagctggtggcacaaattatactcaccatatacaaatgctgccactctacgacaacacacacctcgcatctgcatctgattccctgcactgcactgcactcctgctcccacttattgggtgggagggagataaaaatgatcacggaaatttgtgaccgagtatcgttttaatgtttctaactatttttattttagttatatataaaatttgattttttttttctaaatttcttttgacgtcgtattgtattgatatcgactctaaattgttaaattaataaaatatgattaattctagagagagaagagatatgttaccggttccaatcgatttcgcgagactcactctccttttacgtacggctaggtccaggcgaaatggaatgatctggaagctacaacagaagcaggtgagtgattaatgagagatggacccgatagatcgtgcactccatcgtgccgcccggtcaggtcccccaagctttttatgaaacgtcgtccctctttgtcgcatgcatccatccccatgctggtttggtttggaaccaatttttgctccattgaaattttaatactttaaaaccctggcaagcttttatgctaccaaatttgataatataaaatttaaattaactagctagctagcgtggataaaaattgatagcaaaccaagtatcgccgatctcggaggtccttcagtccatccgctcatagagccatctttggtcgttagctggcattgctaattttggggttttattgggagagtagtgggctctgccccttccagttggttggagtcgtactttccgagtctttttcctttggtcttttgttttcctcctcttttggcataagtcggtctggcttaatgcgttgtgtaacgaatattcttatcttctaatatattgacgtgcaatccttttgcgtgttcgagaaaaaagatagatccctttaacactgttaaacttatcaacactttagtaggacaaatatcaatcttggcttcaaaccaaacaaatccatacaccgtacatccaaagtatgaaccatatttcttttatcactaagattaagtaggaattaactcacccaccatatgatataaataaaaagctatatacatgaatataaccaatcaatactaaaatgacatcttaatatcttgtcagtaatttaatttagcacatagaaactataaatatgtttctctaatttgaaaattatgtaaaaaaaatagatatattatagcctcttggatgtagggaatgccagattttgcatgcagatctatgcagcatagactagtgcccggccctgatccatgcacagccgcacacgtgttacccagccaagtctccctcgtacgacctgggctccacgtcatcataatgcatatgcacccgatgtgccacgtgtgcatccacttctccaattgttgtacagtactgatcactaaggccagtcacaatgggggtttcactggtgtgtcatgcacatttaataggggtaagactgaataaaaaatgattatttgcatgaaatggggatgagagagaaggaaagagtttcatcctggtgaaactcgtcagcgtcgtttccaagtcctcggtaacagagtgaaacccccgttgaggccgattcgtttcattcaccggatctcttgcgtccgcctccgccgtgcgacctccgcattctcccgcgccgcgccggattttgggtacaaatgatcccagcaacttgtatcaattaaatgctttgcttagtcttggaaacgtcaaagtgaaacccctccactgtggggattgtttcataaaagatttcatttgagagaagatggtataatattttgggtagccgtgcaatgacactagccattgtgactggcctaagagctgaatagagtctgtttggtacagacccaactcctaaatttaattctagaagttgggtctggagtaaagttgtagagctgtctaaacccagcttcacaattctagtttattttgtgatagagttttacccagctctactcccagttttggtggagctgaaattatttggctgagctccagttctaggaggggtggaactggagctgtagctatctcaaacaggccttatattgctgatgaatgtagatttgccaactgagagtcgtcacacgtgtcagccgtcctccactctctgtctctggtcgccactgcgcatacacgagatttccaattcttggccagcaattgcttttgcttggggccggggtccaataatccaactgaaagccatccatagaccaaccatgatggacgatgcgatgcatatatacatatatagctagtggcaccactttggtgctgtcatagatggagaggtgacacgtggctaatactcaatcatgttccaccgaggttttatggagtagtaggtcatctccggtttcatcccaaagtgtgcctaagatgaaggtatgcggaaaacaagtaatttagtatatgattagttaaattttgattattataaacttttaaaataaatttatctgatattttaaaataacatctatataaaaagcttttttaaaaaaatattccatttaacagtttgaaaaacgtactaataaaaaccgaggctaatggccaaaatattgaccgaacataatttggttagttggatcttaatcaaatttctctatctcggtcttttttttctattggttttagtcttttttttccttcacccctattggcacgatggtaatgctctactgaccgattttgcaaaacaacacgtgagtatccacctagtaagaatggatcaagctgagtgtttattagattattttttggactgtgtactactgtattttactttctccgtcccaaaataaatacagttttacattattcatatccaacgattaaccgttcgtcttatttgaagtcttatttaaaaattttttatgattagtatttttattattattctactactaataatcgaaaaataagagacgtttctgtcgtccggtggaaaaaaaaggcgagaaaataaaagaaaaacaacttctatccaaaaaaaagtccgactacttaaaaaatccgactcctcggtggaaaaaaaagagaagaaaaaaaaacttctatcgtaaaaagaaaccgtccgactaaaaaaaaagtctgactcccggtggagaaaaaaaggcgagaaaaaaataaggaaaaaacttctactgtaaaaaaaaggaaaaaaaagactgctgactacttttttaaaaatatatatataaaaaatgaaaatgtttttgccggtagttttggtacatcattcgtatatgggtcggtttttaaattcgttcgcttttgaaaatacaaattcgtatttgagtcgggttttaaattcgtccgcttttggaaatacaaaaggaatcgtataaaaaatctctttaaaaaactcgcatgctaatttgagacgatcggactcctaattgcagctcatgattttctaacaaaaatatatatccaagcgaatttaacacggtaaatttcatcttaactaaaccatataacaataataagattaaaatagccttcacccgtggcaacgcacgggtgttttttctagtagatgataaaacatgaatagtatttaatatgtgactaatttttttaaaattgttttttataaattttttaaataagataaacggtaaaacattcgacacggatacacagtataatctaagtgagaatctaaacttttaagagctacaaattttgaaggcactctcactgcatgcaggacagtcatctacgtcacctacaactgtatactggcccaaattattctaatacatatattaataattatatacgtaaataaatactccataaatcatcctcacactaaatctcaaatatcatgtaactactaggtctcaataaaaccctataattcctttcttaatttcttcattaaatgcattacaatgttaaatactgcgtagcaccttattaatttaattatataaaaaaatatacaacatgaaacactaaaattattatggctatgtttagttcagcgcaaaacttgaattttggttgaaattagagatgatgtgactgaaaagttgtgtatgacaggttgatgtgatgaaaaaggattgaagtttggatccaaactttagatcaaaacacagcctatatgagaattgagaagtcacagcggtcggaagcatctcagatactatcatggtcacgaacttatacagtagctctggaaatacatgtcggatgaaagttgatacagaacttatgtgtaaggactgagcttgtacgcttgaaatttacgtggttgtatacaccccattaatgtagaagttaggttttataaattctaattatctaaaaattagtgctggatgcctgtgttatcagttgacacacaaaaatatgcttatttaatttgtgtgccctactagaacaaaaatagctaaccccacttaaaatatctttcacagattgatagcccctgtatatcaataatatattttttcaaggttgctgatggttatttatttacattctcaaacatagtgatgtgccattaggcggatgatactgaaaccgcgctgttaattaattagcctgccatagctactacttatcccatcaattatctctcatataattcttttttctaattatcttggcacatacttcctccattttacgacataagactttctaacattgcccacatacatataaatgcatgtgtttagattcattaccatctaaatgaatgtggacaatgatagaaagtcttacattgtgaaacggatggagtatataactatcagggttatggataccacatacctaatagtagttgactaaatatcggcaagatccaccacataccatgtcttatacggaaactgacctcgagggagttccggataagaaaagacaaccagagttctacatagaaacgacaagaactactcggattgtatccatattggtttccctaattctacttgaacaaggggacacctatatgtataaatacaagcctccctaggaggacagggggacacccaccacgagacaatcaactccgaacacaatcaacatagaagccaacatacgtcaagacaagccgccggatatcgacatcagagatacgcctggatcgaccctatccggtaccttcagaggccggccgtagggatctagcactgtctctgattccgtcgggcgcgagctcgaggaggaaggctaccctgttgtcgactacgagtcagaccttcagaccgccatgtcgacaacagttagataggctaccccacatattgtattagtgtgattatggtgaataaaaaacaacatcggctccggccaacaggatgtagggctattacttgatagctcaggggcccgaacctgtataaaaatcctcgtccccatctcttttacctcagtctcgcatatatcctagcaccgacgatccccatactatgcaaatactagaattgcgacatcaaacgtcgacagtggcgcgccaggtagggggactttggtgcttcaggatctcgatgagatgggttcaagagatggattctccaacaacaagctactcgacgacttcggctgtgaggagatctaacccgactgaagtacatcttccgactagatcgaaaccatcatcgtcatcgacaacttggtctatcgagatcatccaagcctcaagatatgcggcgtaccaaaagatgtcagatcatatgatgtcgaacgagtacgcaataaggtaattggtagattggtttttcaaattaatctactaatttcgtagatacatccggcatgtatctacaaagatacgcaatattttctatgcaatttatcgtaccttttcagatcatacagcattatcagatctataatttattatgtttacctagagcatgttttttatacaatatctattgcgcggatgtttccgacattaaaccaactacggtctaacgctgggggctcgctctgttatcttctgtataaatcatgcttgtttacggtttacataatgtctgatatttacatctgctcgtcatatcctgataatactagaagatccatgcagtttttgagtacatactcgatattatctgctatatatcttgccttctagaaaatatttttcaagaacaattgagcactcgagtaggttatggtcgagtacactccattatcgagaacattctcgacaaatgtggagttatcgcacccaacctatcaacgaagaccgacgacctttctcataacgctggccatcgttggactactcgagaaaaggttgttaacagataattcctcgcaaacgtcgtcggtttgatcacccgacatgattgcgagcggacatctggatatgctataagttgggtacgtgagtcatgctggccacatgatatgcacatgtaatgaaccaactctagcgcccctataggtgattaagagactcctactcctggttctcgaaccagtaaaacgtagtgatctctctcgcctcactttaagtggtcgagttacgactactgcctggtcctcgaccagcgatgtagcgtctctcccactacttccactttaagtggtcgagttacgactactgtctggttcttgaccagcgatgtagcgtctctcccactacttccacttcaagtggtcgagttacgactactgcttgatcctcgaccagcgatgtagcgtttctcccactattttcacttcaagtggtcgagttacgactactgcctggtcctcgaccagcgatgtatcgtttctcccactatttccacttcaagtggtcgagttacgactactccctggtcctcgaccagcagtgtagcgattctcccactatttccacttcaagtggtcgagttacgactactacctggtcctcaaccagcggtgtagcgatttctcctactacctctacttcaacaaagttgatagcaggtacacaatatcgccaagtgttttacccagagatcccttaccacgacgacacctagcgttgaaacctatcctactgtccctttacgccgtcttgacaaggcctctgaggaacctaagggatcttcggctggggacgcccagagccggtaaggccttgccggatcctgtagagacgaaagaccatgtaagatctggtcgtgtaagagttcttgccgtgcatattaaccaagctgtgtaatcggaaattaactttccaacttcatggctgggggctaggatcagtgcttgttcaaccaaggcaggtcaagggtctaagagccttttcctccaagaacgattctccgatgacaaggctgggggctagggagagtgtatgactctacaaactgattgatcgaagtcggtaagagagaagacgctcatacacaaaacattagtcggtaaaattaattcatttttagttttccatacatattataacatgtcaccctttgagcgttcgctcgggggctatttctatttgatattcttttctgagtattgatttcaggaaaattctattcgacattgatgaagactccatgtctctatggttctacaccaagatcgactaaggcgagtacgactaatgttgacaaggctccgtcgcagactctacgcctcctcgatcgctcgagaacggttgctggatctcgacaaggaatacggaatgaagaaatggtgtacccgccgagataaaatttcttgacttcaatccaaattctcgattacagccagacgggagacttagtcgtacgctctgtactttctcggtcgacatcagagattgacttagataaaccctttcggtgcccgcacgaagctaataaaggaagtctaacgttatctctagactcaccgagaacggtcacgtgagctcgataacagttcctccgaagtctgcggttgagaatatgaactcgttcatttgcattgaagtcgggggctatcgtcagggttatggataccacatacctaatagtagttgactaaatattggcatgatccaccacataccatgtcttatgcggaaactgacctcgagggagttccggataaggaaagacaaccagagttctacatggaaacgacaaggactactcggattgtatccatattggtttccctagttctacttggacaaggggacacctatatgtataaatacaagcccccctaggaggacagggggacacccaccacgagacaatcaactcccaacacaatcaacatagaagccaacatacgtcaagacaagccgtcggatatcgacatcagagatacgcctggatcgaccctatccagtaccttcagaggccggccgtagggatctagcactgtctctgatttcgtcgggcgcgagctcgaggaggaaggctaccctgttgtcgactacgagtcagaccttcagacctccatgtcgacaacagttagataggctaccccacatattgtattagtgtgattatggtgaataaaaagcaacatcggctccggccaacaggatgtagggctattacctgatagctcagggtccgaacctgtataaaaatcctcgtccccatctcttttatctcagtctcgcgtatatcctagcaccgacgatccccatactatacaaataccagaattgcgacatcaaacgtcgacaataaccatagacacatcacacatagactagctaacgtctattgtcaatgactagttaaacgtcgccttcaatatatgcatttaccggttttgtgtacacgtttctatcttgtgttttgcaccacgaattagatttgcacaatctgatatttttctagccagttataagacgtgaatgcacgtacgtacacactacacactcgcgagtacatcttccagcgccctctcaaaaaagacagattatctcggtaattaacttagtagtaattagttaattatttcctccgtttcaggttataagacgttttgactttgattaaagttgaactactcaaagtttaactaattccgtagaaaaaaaataatatttacaacatcagcatagttttattaaatttataattgattacattttcataatatatttgttttcataacatcagcataatatttacaaaaaatagttctataaagctagttaagcttagagtaaaaagtcagagcgtctcccaaccaagtaggagtaacaaaaaaaaaatgtacggcactctttcacactttgagatatcacagaagcgggacatgtccaaagctagctatgccggcggcggagtgctcgacgccgacgccgcctccggcgagctcgcagacggcgtcgaacaacgccctcaccggccggtggtcggagatccggtagccgccgcagcgctcgtagctcgcctgcctcatccccttccctcgccacagtatcctgtcacacctgcaacatcgatcgaacactactcgtcagcttcaattcatgcatggcgtcgattggtcggagaaaatatacggacgacggactgaccatgccggcgcgcgctgctgctgtttgtcgccgccgccggcggcggcgtcgatggaccagtagaacatgtcggagttgaggtggtacttgtaggtcggggagaaggtgacgaggccctcgcgccagccgtcgaagctcccgccctcggcgagctcgaggaggagctcgtcgttctccagcagcatgctccacttccccgcccgcaccagcagccgcgcctccgcgtcgtccatggcgatccggtagttgaggtcgccgagcaacaccacccggctgcaaaaattgacaacgacgatggcgacgtgagctgcggcggcggcggcggcgcgcgtaataatggcgtcgacgggaagggcagtggcagtgccacctactcgtggtcgaggatcttcctcggcaacggcaactcctccggcgccggcgacgcggcggcggtggtgcggcggcggaaggtggtcctggagaggatgtccgccgcgtcggcgttgcggagctgcgcgtcgccgtccttgccgccggaggcgaggtggcagcagacgaagcagaagcttgtgccgtgcagcaagaaccggaccgacaccgcaccctgcaacgccgccattccacggtcaagccgagctgccctcgccgccgcgcgccattgctggctaagctaagctctacgtaccttgttgccgaggcggccgaggacgccggcgccgacgcaggaggcggcggcgtggcggacgtggcggcggagcccactcctcgcccacacggagacgaagatgcccaccatctgctcgctcaccacgcacctgaacggctgctgctgctgaccatgccgctgcgccccctcgtcgtcgtcgtcgtctcgtcttcttcttccggtagtgaacctgttcagcgcgtcgccgatgagcgagttccatttcatggcggccgagctcctcgtcgggccaagcacgttcctcgtgttcagcggcacgatctcctgcaacctgagaaagcaagcaatcgatctcacgccaagaactcgacatcgccattgccgatgtgattgcgatcaagaaaccgtcaggtttacccaagaacgtagatgtcgtaggagtcggccttggcgtccagccagtcaccgaggtccaggtcgtccggcggcgccacgccggcgacgttccacgtgccggcgaacaccctgcgtcacatcagcatcagcttcatatcaatccgccattttttctctctctcaaactcagctcaatgcaaattctgcaagaaacacacacgaacctgtacttgaccgtgtcgctctcgtgcaacgcgtcctcccgccctacgtcggcgaactcggagacgagccgccgccgccggtgcagcagctttcctggccggagaatctgaaccagaggtaggagaatttcaattcgaagctcatgtcactgatgaacaactgaacaattacagacatgaaaggcagcaaatcgatcgatgctgacctctgaaagcttcgagctaggatgcttctcgtcccccataatgcagcacctgcaagataattctcactgaacttttgaactctgaatttttcttcttcttttacagctctgaattttcgtctgaatttagtgagaaggtaaggagcaaatatgaacagcctggtgcgagatatatagcgagaggaggcagattgaagcgacaaagagaaaggcactggctgcgatgttgacaagaacacgagatactactactactacatgtcaagcatccaaccacacattcggtgagggagttgtcgagtcgcctgcatctgcaggtttataatttcactaagtgtgtgtgaccttggacctcacaaaaaaaaaaaaaccagccgcttctctttcatgaaacatgaccaaacaaagccatcgaaccagcttatggtttactcgatctccctgtcattttctcacatcattacggatttacattgtaaacggcaaagacttgaggagaagcattgtttgtgtggtggtgaagacatacgacaggagtataaatccacctacccggatttaagttctggtacacataaatatgactgcacgcatcgttagttagtgcagagatcggaagttatattttctttgtcagaaaaacaacaaaggttgtgtttagataggggtaaaaagttttggcgtgtcatattggatatactgacacacatttgaagtattaaacgtagactaataacaaaacaaattacatattccgcctataaattgcgacatgaatttattaagcctaattaatatgtgacggagctcgtggctcctcaccgggagaccgcgcaggcccccctttgccagttcggccgggggcttagggtgaaatctcaagctctcgctctccctctgtatctggaaagatcgtctgcccacaagacacacgagacacggcgatgtatacaggttcgggccgctgcgaagcgtaataccctactcctgtgtttttgtggatttgtgtatgaatgagctacaaagtgtgagccaacttcttccccgttctaagctctaaatctggaaaagaatctccctctaaatgggcaaggtcctccttttatatctcaaggggataccacatgcacctttctctttccaaactggactgttctttttctctttaatgggcggagatcggtacggtttccatccgggagcccttctgatgggacagcccacacctacccccacctcccccgaagacagagatgacgcgggaccgtggctgtctgtcgatgacgcgaccagtgccagaccggtcattcttgtccaccacgcgtcagcttaacaacgtgcatgtttgcccttcttcgtgtaacaccttgcctgtaatggttaggatgaagcctggtataaatctgaccagggctaacgtgccatctctaagagataacacgctagctccggcttgagacgagtgcctagaggctttcgtcttgacgggatggggcaaggcgtgcgtcagaccgccagtcgccacctaacccgtgatctgaccggtctgtgactggtcacagaccggataaaggaacgcgctgtactgcgttgcatgcagcgtgacacgcttgaccagactgcaataaatgctgttaggtgagcacagctgtgctcacttatcccatatatgtggcgcagacttccttaaggggtcggggtgcctcggccctcggggccggggcaagcgcaacccgaccccccccctcgggggaaatcaggaggagggcggacacctcaccctcgggcccgacgtccccgaaggtgccaggccacgtgggcgattgcgtctgcctcaagcctctggtcatgatactcccggtcccatatcaccgacaatatgtcattagtaaatgtttactgtagcaccaaattaggcttaaaagattcgcctcgtaatttacacgtaatctgtataattagtttttttctatatttaatattctatgtatgtgtccaaacattcgatgtgacaggatgaaaaattttgccaggggatttaaacaggcctaaagactttagtataggcatcatcggtgtgatagtgaagatgttgatgtatgactccaccagttgggttcaaattctgatgttcagaaatatgattgtgcgtattcttagctggtgtaggtatcgaaagttatactttctttgtcaaaaaaacaacgaagactccaaaaacatacaactgttgattggccattggtgtaatcttcagcgttagataggttcagagtttgagcaggtaagctagtaaagtgggtccaagagcaatgaattccagatagttctgatagggaatgtcatactgtcatgtgcaacatgttttcgtgatttgtttggggaagtagtaaacataggccatctttaaagatctttctgagtgatggctgggtaaggatgggcaaaagattgtcagtttgtgcaacttgggcacttggctgcataatgtgtatagtttttgttatctgtttggtgtgctacctctggttgtggcaatgctaccaacaaaccatgcaactgtgcctgaattttgcctcttgtgactgtttccatatgtgcctactatttcatatcttagctagagatatctgaaggctttagcagcttctttgctggagatgacagttctgtagacatgtagatagatagattttcagatgctcaaattcttatcaatcattcaaccatctgcaactttggcactaccatgttatgcttttttttttggtcttttgagaatgctcgaaatctttgcgcaccatctcattaaagagatagatatatggaaaattgctgtacttcctcttccagataaaagcagaaccattatgcagggaatgtgcagtcaaagtggtaattggtcacattattgcttcatttcagaagcatgagaaaatcattctgattcggcgttggaagagacttttgcatcgattctgaaccacaagtagggaataacgttaggcaagcttctctgaataattcagctgtacgtcagttgcaaattttgactgccttccggcggcactacgtcaatgctttactttttgtgatgaaacttcggctgtgtttagttcgtgtgccaaattttttttaaagtatacatacacacatttaaagtattaaacgtagattagtaacaaaacaaaattacagattccgcctgtaaactacaagacgaatctattaagcctaattaatccgtcattagcaaatgtttactgtagcatcacattgtcaaatcatggcgtaattaggttcagaagattcgtctcgtgatttacatgcaaactgttcaattggttttttttatccgtatttaatgctctatgcatgtgtccaaaatatttgatgtgacggaaaagttggaagcttgaagaaaaatttttgaatctagacaaggacttcctatgattgaaatgaatcccccaattcattttgacttgacatttttttaattatgtagtttattccattcactttagtgtacttgtctccaatacatatttgatccatatcaccatatagtctacacatgtttgataattattttttctctttaaaaatacaactaaccgggagcattcttgtaacaaatttattgatggcctagagtttcttccattatctaaaaaagtctctctcccatcttgactgtagtgaactccaaatatgttaataaaattttggacagaccttcatatcactcatacaaatatcttgtatatttttttagtttctcacaactgctttaaagtgtcgggtatagcaccacaaaccatgaagagtctttccaaaagttaatgtgtttcaaaattattgtttagcaatcctctcaacaaaggagaaaaatccccaaaaggaaaatcccacttgaatctgcaaatggaacacaaaatctccaactattgtgggatatacagggacttcacatcaaaattattgaaacattttcatgattaaaaagctgtgaataaagagataagattagatatattttctatcatttccccccactaacagcacacacaagcacaaaacaacaagagctttaactgcaattattcatcagatcagcatgaatgctatgatctgtgacagcaactgtagtggcaggttaattaacttacctaaaaccagtaagagacaagcacaaggcagcaacttgttttgggagacagatagcagatggccaatagtatcatgaaaccagccaatcagaccatggattcagaattaatagcttatcacctcttaattcccttatctattctacattatctttgtgcctcaggaatggccatgttgttgatttaaaactagacactgcgcagaatgagccgcaatagattgagctgatgttttcctgcttccttgtcttatctccaagactccaagtgtgaagtgccgaaaagaaaattagattaagagaaaactgaggctagccagtagtcttagagacacgaaaaagagtattggattcaggagagaagcacgcaagattggatttcgagaataacgttactacctccgatttcataattcttaatattttatacaataacacggtctccaaaacatattttttattataaatatctattaatattcttttataaaacgagcaagaatttaaatttattaaagtatttttagactaatctatatatacatcgtattttagtgtcttcaaactaaatattttaaaagttttaattatttgaccttaaaatatcacgaattatgggtctgttcactttgatttaattttcaatcttaccaaattttggtaaagttgaaaaaaaaaatagatatatttagtttgttgacaaattttggtaactatataagaaaccctgctaaaattttagtaagtttttttaacatcaaagtgaacaggccctatgaaaaaaaaaagaggaacatgcatggtagcatgcattaattaagtggtagcttgcgcaaactggcaggtaactcttcaaaaggagtagctcgatattagtcacagatctatacgtgtattaattgggtttgacagatgatatatatccctctttaattattttattgtatgcatgcttgtgtctggctaaccgtgaagtagagaaaaagaaaattaaggaccccctactaataacttggttgtggtataaaaggagtcacgatttatgcagacagatgtgacgtcgacacctgtataatgtgttttttttcagccttttcagaaaatgcgtatcaaggatatggtgaaaaatccacagtacctaatcaatccgcaagataatgggtagaagtctgacctatatatatccacaaaatggatatgcacaatcaatctaccgactacctaactgatttgatgatagttgaattaaaagccctattttttttaggtaaacaaaatattattgtatttattctgttcattcatagacttttaaaggcaaaatgaaatatttaggttaccgtgatacttcctccgttttagatcattggttgttttggatttggtcaaaatcaaactatttcaagtttgattaagtttataaccaaatatagtaatatttacaatactaaattagtttcattaaatcaataatgaaatatatttttataatatatttgtcttgagttgaaaatattatattttttttctataaacactggtcaaacttaaagtaatttaactttaaccaaaagtcaaaacgacttaaaatctgaaatggagggagtatgtccgtgcatcccgatgatgtttttcctatggatgaaaaggggaaacacgaggagtagctaaactgttaatcatcgaaactgacttttttttaaaagaaaaaagaaaaagacattgcagaaaccgcagactatgttgaacaccgaaaaggaaggaattttttctgtactttccccttaaaaaaagaaaaagaaaagaagaaaaggaagcaaagtgaacctaactaaggacatgcatgattccagggtgaataaagaaatcagttcgaaatttcgaatgtatatcgagtacaacatgctgatgaatttgacaccggcccctgccaaggccagctgcaaaacaaaccaacaaattcattcaaaccagagcgatttgttgctcacgaagacttcaagcagaataaacgatcttgcgtgcttgcagcagcagcacgcaggctttgcgtggataacgatggcccattattaattcattgtacgattgggccggaacggtttcgacggttgtgcggcccatcttcgatacggagaggcgaatctgtgggccggacggctcctcctcctggtttggcaccggcggctggaataagttcatcttaggtcccttacttgtcaacgaatccgattttcatccatcaacaaaaaaaaaaaaagatacaatgggtccctcaactgttaaaccagtgtaaaataagtcttaagacggtttggatgacggttttagctgatgtggcgcctacgtggctaatttgactcggtcttcatctgacgtggcacatcaagcaaaatttaacaatttaaaaaataaaacaaaatacgttggtccacatgtcagtaaaataataataataataagattaaaaaataggaggacccatatattagtggaccccacttgctccacctcatccaccctcttttctgtatcctatcctctcttactctcatgcgaagcggcgggacggcggcgggccacaacaggcggagcggcggcaatccgccgccggcaccgatctccataacagaggtgtgcgtcctcctcctcttcgaacccgtcgccatcttcgtggtcttcggcgaccgcgatggtggggaagcgggtggggaaatgggagctctcccgccactgctcatggtgacgacgccatcgaggtcggaggatggcgggaacgggggcgggggccacaatggtgaggtgcgcgtcatcctcctcctcgaacctgtcgccatcgttgtcgtcgtcatctttggcggtgacaggagaggaagcaaagggagaagttggtcggctgccgcaacacctcttgccgtcgaccttgcgggggcgggagaggagacgcgagtggcggccggtgggagaggagctacgggcagcagccagcgggagagaagcggcgcacagtggccggtggccggtggccggcgggagaagagcgacgcgcgggctccggccgacgggaggggaggagccgtgggaggcagccacttatccctctcctttccctcccagatcccacgagttctattttttttctggatcgaattgccatgtaaccaccatgttactgccacgtcagatgaagactgagtcaaattagtcacgtacgtgcaacgtcatctaaaccgtcttatgacttattttgcaccattttttctattgaaggacgaaaatcagattccttcacaagttaaggggccatagatgaacttattcccggcggctgcagccgcgtgtggcgcccgctccaaggaggagatgccgggagacgtcacgtgatgtcacgcgcggtccacgagcgaatcacccatgatggcgcccacacccgataaggaggaatccgaatccatacttgcccgccctgcccttttttcttctccctcgcgccgcgcgacaaacaccgccgtatttatgtgcgcgccgcgccgcgcgggaagcagcacagcacagcacacatctcgtccagtccatccatggcgagcctgagcgtgccgccggtgccgacggacccgcggcgcgacgcgatcgacctccacagggcgttcaaggggttcggctgcgacgccacggcggtgaccgccatcctcgcccaccgcgacgcctcccagcgcgccctaatccggcgccactacgcggcggtctaccaccaggacctcctccaccgcctcgccgccgagctctcgggccaccacaagcgcgccgtcctgctctgggtgctcgacccggcgtcccgcgacgccgccgtcctccaccaggcgctcaacggcgacgtcaccgacatgagggcggccaccgaggtggtgtgctccaggacgccgtcgcagctgctcgtggtgaggcaggcctacctcgccaggttcggcggcggcggcggcggcggcctcgagcacgacgtcgccgtcagggcgtccggcgaccaccagaggctgcttctggcgtacctgcgctcgccgcggtacgaggggcccgaggtggtcgacatggcggcggcggcgcgcgacgccagggagctgtacagggccggcgagaggcggctcggcaccgacgagaggacgttcatccgcgtcttctccgagcgcagcgccgcccacatggcggccgtcgccgccgcgtaccaccacatgtacgaccgctccctcgagaaggtgatctaccgatcatgcacagcagcatatgctttggctttggttttctctctctctgaatttaatggaggacgcgtacgtgcgcacatacaccactacacacggattcatttgacgcatggcgcttcatacaagacacgtatgtgcacgcacaccactacacaaggattgagaaacgcagaggggtcttccggccagctccacaagatggtgggttggctggattcaaaacctcactcctatttatttgatattaggtcattccttaatattcgcgtttttttactacacaagaactcatatgatgcacgtcgcattacatacacagtattgatctatgagtacgtccctttaacgtaaggccagatagatatagtttagaggcaaaattctaacctcgttaaaatactattgaaaatgcacgcgcatatataatatttatggaaaccaagatttggtttgtgttttaatttctttttggaacaaaatttttgtgtgcgtttaattgtcaggctgtgaagagtgaaacttcagggaactttgggtttggcctgctgacaatcctcaggtgcgccgagagcccggccaagtacttcgccaaggtatatatataacaacccggagccccgttttctgaattatgtttaaattaaactcatcagtacacgtttctgtaaaatcaaaggaactgttaaaattcatgtgaaatgaatctcgatcatcccgaattcatttgttaggtgctccacgaggcgatgaaggggctgggcaccaacgacacgacgctgatcagggtggtgacgacgagggcggaggtggacatgcagtacatcaaggcggagtaccaccggagctacaagcgctcgctcgccgacgccgtccactccgagacctccggcaactaccgcaccttcctcctctccctcatcggccgcgaccgctaacgtcgattggtttcggtctctttgagcgtgtgttaagggacgcatttgttccatagcgcacaaacatggcaattatttatgtgcgtgtgtagtggtgtgttcgaacgttcgtttttcgtgtaataaaaaaaattgagtttgctgtcttgtgatgctgctgctgttcttgcattgcctctgctctgcattccatttcagaaacattcatgtatatacgtgtgtattatttggtcatatgtgtgtctaagtaatttgatgatgataaactgataatcggcatcttgcgtgtgatgagatttccctgtaatatatggtgcatcgatgcttgtattatttgcccctagatgctagtattgttgatggctattcaatccatgtttgcaaaaactttcaagcagtcatggagaacgaacaagtgctttgcagcacagcttattccatataccaactacggtgccaaatcatacaaactagagaggtttcagagagtgcctcacactaaaaagtaccaatatacagagagatcatccatagctgtactctgctacaatgcatgttctatacactcccaaaaactagacaagccgtaattcacatagaggcatagacaacagcacataactcgtagacgatatggcagccacatagctcacaaccgaatcacagatcgcctcagtcgataggcttctgctttgcatggcgagaagcagagtatgactggatagccgaatttgtcacgccgatcgagtgcttcgtgaggtccatgctcttccttgcagcaaaccaaatcatccaaaagaatccaagccaacctgcagcagccaggacattagtacaggtgatgcagacagcttgttaattaagaggtaataatctattgccatgtcctggcaaagaatagatccgaaaagagcagcctcatgcagagaagctgctttgtcaaaaacaatagcccccttttagggaaggaatccaatatgtgttcacatttctagatctgcagcatcacaatcttcatagattttgaagcattcaaccattcaccatcaatagctagttttgctaaagtagtattgctaaagtagtacctaattgttatgtcactttattcccgcttatcgcaatccacccgtgttcgtgtctatgtttctcttattctccagaagcaaaaaggtgcaagatagtgccgtggtgattgatgtctaccattccaaaagttaagaaggagttggcaacatattctacaccaccggtcaaaaatacattgcttttggtaaagtgttgtatgggagttgattcttaaaaccaaacatgtaaatcattgctaagtggatgtaatttgatctcatgctacatattcactctaaaatatacgattcaacgttccatggttgtgggcataactttctagtacgtcacgtgtgctaatgcgcctgagatttactaaagcagaaattattacacagccccttcactagaactagttaacagacttttcacccatggaattcactctgtacacattataaggggatctaacatgaaacataatagaggttaagatgcctccagatggcactcctagctaattagagaacactatcaagtgcattaatgacccaccaaaattacgtagcattactataaacagttcacttattggcttgagtaagttaacgtgaaaaaaaaacttcaagttgaaaaacttgcttcacaattataatttactctaacaaattaagagaaccagtggatgtaaataacatgtggttcctcttaattgctgagcaatttattacaaataatttcgttggatgccaagggaagcccataggcaaaccagtggccactatcaaactcacacatgctaaattactgtgttgacattgtgttagtacaagattgtgcccagtcagacgtgtcttcctagtaccagttcccttctttcagcaaaaaatgcctctattgttacttatcatgctctacgtcaggagcacctaatgtttatttggaaaagaataggcaaacttggactgtctagtcactcttctctcccctaaagcagcagccactggctagctgttatcttggcggtgcttacccaataacatgttagtacattacaaaatgactaagtgaactgaagacagaatgttttaaatactttttctcactggacttattgggacaggatagttaataatgacatatttatatttatagtattaataaacatgaccaaccagatatgttaaagtggtatgggcaacaaaggataactgtgttaatgttgcaaaacatgatatattggtggctattaatgtgctaacagaagatgtatgattacagattagattaactaacacacctaaaaactagtttgtaaatatggacacctctaagggattttatggttttcatgacagaaagagagagtaagtttgtaccagtagcaatcatgacgccgacaattgctgagatgactgtggcggaaatgacaaaaacagcaactgatactactccaatatacactgcaaccaagcaagcaaagaacatagccaggaatcctccagcagctgccagcgacatcaggacggaaacaacaacagcattggtggttgcaaccagcaggaagaacatgaagattagaaggccagtcaatgcaataagtgtgatcgttccaacctgccacaccaggaacagatgaaatgagggtagcttaacttaaaatacatttcacatattcttaaactaaatggcaaaagtaaaagatgatccaatcaaataaggaaatggcaaattcagcaaatgagttcatgcccacatcccacagcaatacacttctgcagttactgaacacaaaaagaaagcatgatcatcaaattatcaaccattcaatgaacacactcaagtagagccatttgaaattacattgtttatccatacaagataaatcagattgattacgctgatgcatgctagccatgtgatccaatgaatttaactgtaaatagagatcacacatccttctctggatagtgaaaacataccctatcatacctgctaaccgaccagcggcagtaatctatgacgtgttttctgtaaaatatggtacaattcatcccatccttccttattacactacagattacagaattctgtaacacattgaaacttaaatgaagaaatgtaagaacattgtggccattagagcttgataatcgaatggtcacatgctcacacggcaacaaatcaagtccctaatgacagcatgtatcagttaaaactgtatttacttaataacaaaggagacaagccacaaattaaagacatggaaatcacttcgcgcgcatctctatggggattagtcaaaggaaatgcaaaagaaggatccagaaggcgtccaagccgagaggggaaagggaagtgggggcggcgcgcggccggtgaggtggggctcgctcaccgagatgacgaggatggcgcggaggccgctgccccttctggtccactcgagcaggtcccgcgccgagttcctcgacgcctcgcgcagccgcggggcggtctcgcaggacgccgccctgatcctccgcagcagcggctcccctccgccgccgccgccgccctgcgagcagacgccgtcgacgaagctgcggagcacgccggggagcgtgtcctccacctccaccggtcggccgccgccaccggaggcctcgccgttgggggccttggcgcttgcggccgccgcgtcggattcctccatacctgggctgcagccggcggcggggactcgtcggcggcgagggaaacggatgggggataggggcgaggaggtgctggcgactactactactactcctagatttaagaggggttcggtgacacgtgtcccttctgaccgggaccactgacacgtggcttcatgtgaatctggtggacccacctgtcagtggctatgcgtcggccgaaaaccgaaagccgacgtggacggatcaggatcacacgcctcaagttatgaatgttttttttcttttttttctttgaaagaatgattcgtttgacaaattttgatggaaacacgatagctgatttggtgtgtccacgttggagacagtgtgtttgtggatgaggaatttgtcgcagttccgtgctagaatttcgattatgtttatacttatctgcacggtatctacacgatagttagtgatttgaaataaaatattttagagcaactgttgtaaaattcattatgatgaaaaaacataaaattaactttaaaattaaattttaatatttaaatggtagcttataagcataagtgaaatgatgggttgtaaatatctagattatgacattttaccacacaaaatcgtggtggcaacttccgattgtttcaaactctagcgtctctatcacgtgatactgtgatataaagcgatgagcaaacgtgtttttgcaacgtagacatgatgcttgatcgaactaccacgtactagtctacaacgtagccacgtaaaactgcatgttgtgattttcctccctttttttttgcaaaatatagcgaattatatgtgcaaattagttggaagcacaaataatattgttgtgcatgttgcatgacaattctttgttgcgcatgttgcttccctaacattcgcgtctcctttttagtagtgcgagctaaacgaaaactaaaagacagatcatatgtgggcaattaagagcattgagtgtctttaagactacctcatattagtgttgccttaggctcagttcgtttgtctaggttcccaacctctctttctcgattttcgcgtgcacgtttttcaaactactatttcggtgtgttttttacaaaatttttctatacgaaagttgttttaaaaaaaacatattgttcctttttgaaaaaaaaattagctaatacttaattaattatgtactaatggatcgctctgttttccgtgtaagaggcaagcgttccaaacctgccctctagaatgcaacctaagatgtcttcctgtgtaaattgttatatttttcgcatgtggtcgttttaattagtaatttggaatcatgccattataattttgtaaagtttaagatatgccatcgatatctcaatgacatgtaggacctacatgagtcaatgatgtgggtcaggatggcatatctcaaattttgcaaaattataatggcatggttccaattttcccttttaattaagacatttcttatgctaatttgtttacacacgcaaccatcgacccctctctctctagcaaaattaatgtagatggttttctttcagcatcacatgtcactattagaaaaaatgatttcctacaatataacacataatttttttaggcagaccttattttcgactatgattgtttgcttgtatagttgtgtgaagagaggtctattggctggccgcctgggaacataagtcccaggcttccaactccctctcctctcctctttctctctcacatctcctcagttcggcgatgagggcggtggtggtggggaggggagcaatggcggcgttccatagccgtggcacaaagtttggtggcagcagtggcgggatccgaagatagcaacgcatgggggcggcggatccgtggaaggcgacgtgtcggaacggcggatccggcgacggcaagagtgggggcggcgccggatccggcgagggtgacacgcgggggtggataatccagtgatggcgaggtgagggcgcaccctcctcgcgctgctcgtggtcgtttttctcgtcgtcatggcggagaaagctgacttccggatcggctcctcgatggcgacggtggcatcctccctgcgatgatgaccaccaccacgacatccaactgatgtttcttttttttttttgggggggggacttccaactttctgtgaaaaatatggatgtggatttgaatgtgaacttccacttctttgtagaacttccaccacggatgtgtgtttcaatgtgaatttgcatgctatgaataacaaattgcttcttttttttgcaccgaattcttttgcggacagtcctcttaatgggtccatttgtgaaaattgacttttgcaggcatacctatgatcgccttgtgaaaatgaattttggcagttgcataaattgtttttatggtggtgtgtagattacaatttacatattaatgtttgaccaacgtctgacaattcgtcttatttaaaaaaaattatgtaattatcatttagtttattgtgacttgatttatcatcaaatattttttaagcatgacataaatatttttaatatttgcataaaaattttgaataagacaaatgatcaaacgttggtcaaaagtcaatggcgtcatacgttaaaatacggatggagtatatcataacctgcagctgtgagtaggaatacaaatcagcgtgtcattgaactaagcatttttttttacttgtgtacactacaagtacattcaagcaaagtgatgagaaaaaaagaacaaacatacaatgagcatcagttgcttcggcaacagataattatctcattataatgagaaacctagacctatttcttcatctttcaaaagcttggcatgatccacacgggcgccggccagttgaaccaccgttgaggagagactatctcatcggagctatcactgcccaaactatcccgacgagcacctttagagtcgtacatattagaaactattaagtgtggcggaaggggcggccgctgagctacgccacgtcggatagctacagtgcacaggatggatttttttcgaaaaagccctccggtttatttgtaattcggtgtaggtctctcggaacagtaccgctgagacgatattttacgttgtgactcttcgaaaagcaagatattccatgcaaaggagagaaaaaccgagaatcaggactgcgctctaaaatgttgaatccgaggggttttttcgaaaaaaatacgcccactaacccacccaccaccaaaaccctagccgccgccgcccaatccctctccctctgcccgctctctccctctccctctcccacgccgtcaccgggcgccgccgcctccgcctcccccttgcgccgtccccattgccgaccgccgcgcctccgcctccccctggcgccgccgcctcggcccccgccgccgtcgccgcctccccatcgccggccatctctgcctcccgccatccccatcgtcggccgcctcccccctcgcgccatcaccgtcaccgagtgcacccgtctcttcctccgccaccgctgtcgtcgtcgccgagcgccgtcggtgccacctccgcctcgctccgccgctgctgccgtcgccgagcactgccgcagcatcgtcgtccactgccgccgccatcgccgagcgtcgccgctgcgtccttcgccgccatcaccaacggccgctgctccgccctccgttgccgctgccatagaagaaacggcagtggtgacagaaccgacatcttcggcttctccagtttccttccacctcttcccctcacctcctcgccgccttcggaagccctagcgaagcgactgacgcgagcgctgaggcggcggcagaggaggaggaggagcgagcaccatggcggaggacgactacaacgacatggatatggggttcgcctctcccccaccctccctcgctcgcttccgccgttacaatttcgcaccaacctagggtttgctggtgtcaccgatcgcgttcgggggcgtgggcggagagggggggttagaagggagcccggtatcttcgtgggtgggttgcgggaacgttgattggtaggggcgattcgtggggggagctctcctttctcaagggagggctctgcctctacctgctgggttggtggcagtacggagtttttctttaggcgaatatttcgtctattgtgagatggatgggtctttgagcttgattgacacatcgttcttctctctctttctcaaatcatgtcccattctgatgtttggctgctgatcgggtgacttcattgattcttcggtaaatcccatgcttgattgcttgtgtgcttgttaaaaggtggattttttcttagtctttaatgggattgctaaatggtgcagctgttgccaggtttgtcagcaatcaggtttcatacagaatgtaagaaactatgccgatttctgggtgaccaggtgtccaggtgtccatgaattatgtggggtttgagcattcctagccattagatggactcttgagtttagctcacccagcatccttctggaatgagaatgcacattatgatatatgtttgttgggataagatgatgatgtttcttggcttaagtataatccacatcttttgtatcaattaaggattggtcccagctattttaattaatggctcaaaaaaaatggagttgttttcaaggtgctggttgctttttagagttagctttttcaacgtatatgatgaccaatatagaactgaggaagtatagttttaagttcatgtctagcttgatgaggcattgtagatatgttgcatgaaaaatgcctatctttgcttattgttatgttctttttttttggttatgcttagcataatttattatatatagctgcagaatcattttagtattttatggatttatttatgaactaaagatgcctttccttttcttataggtacgaggatgagcccccagaacctgagattgaggtacagagctgctgctttgttatttatttctggactttactttatcaggaagagctatgtggcttatttaccttttctgaactggaaggagctgaggaagagcctgagaataacaatgaggatgctgtggatgacgtggttggggctgaagatgacagggagcaagaaaagacggctcgcccatggaaaacatcaaagtatatgacaaaatacgagcgtgcacgcatccttagtacacgtgccttgcagataaggtatgcttttataaaatgtaatctgtatatcatcaattaagttaattaatcatatcaattaagtaaaattcgagcttatctattgttatgcagcatgaatgctcctgttatggtcgagcttgaaggggggacttatccacttgaggtaaactcctgatttcagttttcatagcagtgatggaggcggctttgataaggtttccgggatggactcctgtaaatatgtgcactacacgcctgagcaggtggaggcgcttgagcgggtgtataccgattgccccaagccaacctccgcgcgcaggcaacaactgctgtgtgagtgcccgatacttgctaacattgagccgaagcagatcaaggtctggttccagaatagagggaatgataatagaattgaatctttctccgtttgttctctgtgacaaaaacttgctatggcagttttccctgttctctgtgacaaaaacacttgttatggcagttttaggtacccaggtaaccctcaaggtactcctgcactgtcacgtctgtctccccccgacactctgcctgatcccccaactgtgagaaggtcagtcaacgttcacgccgctgagtctgcatctacatcattttgtggcatgtatagaaagcgtcagatgcgtctcaggaggtagattctcaggaaaatcatgaaactgtgatgagagcaaggttatcattctttctatatagtatctgttagattgccatatttacctttgtctgatgaactcatcatcctcacctttaatatcttataaattgagttgagttggtgttagcatgttgacacgtctaatagggtgcagctatgtgttcatgaaattactatgctttgggagataactaccatccttccaatggtttcaatgcatttttatcatagaatgattcacataagaggataaatcaatgttctacagagtttagtaacaatggtttatcgaaaagtacatgatttatgtcataattgtgcagagccttaagtttcttggtggcacttaaagcctcaaatttgttagcttcattttaggttttgggctagatgatctgaacccttaactgccttcttatcagagataccatatgcatacatacatacatacatcaagaacggatagtccccatgtatcgtagcgactggatgtttcatcaatgctatttataatttttttaccacaatttaccaggaacggttagtcataaagaacataaaaatgatcatcactgtggtaacgtatgctactatgctatactaatcctcagttcctcacttatgaatcgtaggaacttactgcacaactaggtagctcactgacataaagagatatttatattattttgttttttatgatgaatacaggtagctgcacatcataatggacatggcacgagccatgagaatcacacacaagaaagtgagtcatctgttgagcaggtataatttagcttcattattataaagtactaagaattctactgctacatatcaccttaagtatatatataggtagctgcacatcataattgggtttgtatgtcagcatgatcctgaaagccaagacgacatcagcataaaagccacacctgctgatgaatcaccaccggaggagacatctgcagcacctactaaagagcaggtgacttaatagctgcttgcatctgagtcatttttgggccctttcgatagatgttttccctgttctttagaggcaatagtagagataaacttgattatattaataataggcatatttcttccagggattggacctgttccaaaaaagtattgtgcatttctctctattataactcaaatactgatatcctgcataccctctttaaatatataactttgtactgtttggtaaccttccttgtaaacattcctccaatagtccaatctaacagccctcaaatccaattggctgttgtgagttgagctacatgatggaatatgagccactcatctgcatattaatgaaggggcaatttcgttcttgcccctacttcgatgtccaatattgattttgccccagttttttaggttttcgtttttgtccctacttttttttaaactaaacagtcgtttgcccctattctgttaattcttgttaacggtgttaaatgtgggggtaaaaaggacaagtataaccttatatattttccggtacttttgtacaccacattcaaatttgacccaaattttggcaaactttcacaaatttttgacaaattaaattactgctatagtatggcatcaatagatttgtattttgattatgtcaaaagtacgggaaaatatctaagggtatacttctctttttaccctccacatttaacaccgttagcaagaattaatggaacatgggcaaacagatgattcatttcaaaaaagtaggggtaaaaacgaaaatcctaaaaaacagtggcaaaatcaatattagcaccaaagtaagggcaagaacgaaattgtcccattaatatgatagttaccgaaatctaattttgtaatgtttttacctattctttggtatgtgactgttttggtgtcccatgaaccggtactaccgtagcaaatttgccatgttacagtgtttgaaacattcaagcaaaccgtgtgtgtagtatgttgcgcgctgaaaattaagtaagtataaaaaatattagtttcatactcgtcctcaatggcatcaataaacaaaaatgacaacgaattgttagagtttgtgtcgaatatgtatacatagtcggttacagtttaggacttggagttgtaataggtattaggagtagagtaagagtcggactctatcttaggatctctcataaatagagggacgtgcctgttgtaaccgcatgacgacaatggtgacttagcatagcgagagggagcggctgccggcggcgaccggttgtgagtcgttgtaactctgatacgctgtaatatgctggatcggggaggagcgcccataatcagtgccccggagatgtaggcctcggctgaactcttttatcaaatatcgtgcctcggtgtcgtcgtcgtgtttggatctcctatggcgtttcttccgtgtttggtttccgatgtgatttcggggctggttttctaacaagtggtatcagagcctgcgggagattcatggtagaggtgcgagggaggtgctccacgccgcgacgaccgcacagggtgtctagggacggacatggacgcaaggtggagcacggcggcgatcaacggaatttgatcgatggaatcggacacttcaggcggcggtttgaaccgttcgatggctgcaatcaacagggagatgaccagacgtggtgctcggtttgatggcggtagaaacgattggcgatctaatcggtgggtcggacacttcgggcgggtggctcgaactttccggtgagctactctcaacagggagacgtgtggccacacgctcggggttgattgaagctggaggagatcggcgttctcgatcagtggaatcgaacattctgggcggggtggcctgggcctttcgatgagctgcgttcgacagggagatggctagacgtagcactcgggtcgttcggtggctgagaagacggcatgtgatttgtcggcttcggctcgcggctagattgacgggttgttaatcggaagtcggagcgggtggatccgtggtgctgatggagttgtgttgatgacgaggtggtgcatgatgctacaatggtttgtacaagcgactggactattcacagttatagggatggttagaaatcggcggtgttagtcatcgacggagttggccggaatatcttgtgggcagtgcgggagatcgtagtgtgtacgtgaggctggtggtcaggagagaccattgcgggcctggatgtagcgggagcatgcaagagattgactgtgtgtgcgggcagagatggacagcgactcggaccattgagtccttccggaactcggtctagcaccgaagctaagtcagggaccaagtctgacacaaggaggtggtggatatggattcggtttgcagtcaaaatcggatacaatgccatagtgatacgtcagcaaggaggatatccacgggattgcaagattgcaaccgtgcaaattatcaaagcaaaaagagatcggaattggatttcttggtggcgatgatttgcggcgtcaggcaggcggcaggaacacgtggctttggtgcggtcggcgtggaggtgctagcggaacttgacgcaggctgtctccggcgagaggggatggcgagcttacggctgctacatggtggttcggtcagatggcttgcacgtgaagaagctgagtagggctgcatgcaacattattttcgagatgcattgatttggccaagacaagactcatgcatacgtggagatgttggatggctgttgatcgtagctatgcttgtatacgcattcagctgatcgtgctgatcttgtggagccgcggtaatatgcaaaggggatggatgcatgtagtatattacgggagcagaaacgtgttaaagtttaaagtgacttggcggagcagccatagctaaccagaaaatcccgggcaacagcgggtgaaaatcgttgagggcgtcaacgggctgtttgacagtacaagatatatccaggatctgcggggtgtgcatgatagggatatagggaatctgcgtaaggagaagagtaaacgctatggtggtaatttcttcgggtgatttatggcaacaatgtattttctcaaattatcgcatattcagtctacggatgtgggaaagcgaggatattggatttattagctcggttcataagacgataaggaagaaaaggttcagttcttcaagtctggtgagtttgatttatctatttggtgataacatcggttatctggccatggattagatcaagtcaaacttaagatggtagatgaagttgaacatggtcttcggggagtctatgatgggatagctaggaagaaattcaatttcgcttggcaagacgactgtggtgatatgagagaaggtggagcactgttgcaggtggagtcaagagggagaagttgcagggatagcgaagtctcttgtttatggtgagcctggtggaggcttatcggggcagctcggcgtgagcggcgaaatgatcaactcaagtccgggtgcatggagattcgcgcatggtacaaattcaggttggcgtgtcatattcgccaaggtggagtttgttagagtttgtgtcgaatatgtattcgtagtcggttacagtttaggacttggagttgtaataggtattaggagtagagtaagagtcggactctatcctaggatctctcgtaaatagagggacgtgcctgttgtaaccgcatgacgacaatggcgacttagcatagcgagagggagcggctgccggcggtgaccggctgtgagtcgttgtaactctgatacgctgtaatatgctggatcggggaggagcgcccgtaatcagtgccccggagatgtaggcctcggctgaactccgttatcaaatatcgtgcctcggtgtcgtcgtcgtgtttggatctcctatggcgtttcttccgcgtttggtttccgatgtgatttcggggccggttttctaacacgaatcaatctggcattggatcttaatacaatggaatttgaaattgaaattttgcaggtttagataattttatgtgcactgcattcctgtttgtttttggaaaaagaccaaatgaaatctcctttatgatacatgcaaattaattatatgtagcaactgtagagcaaatgattttaaatctaaccagaggtgtccagattaatttggtatgtcgttatatgccccttggacatgaaagatcgtattgatcaagtctgataattttcaaatccccaccatcttctgttagtaattctcacaaaaacaataactaagtgtacaggtttatctaaatcatataggtacaagaaagtgaatatttcaatttaggtggcatggattgattaagctaaaagcagtaaagcatgcaactaattcaaacttaacattattattagggacccttattattattccactcacagtaatgtatctaagagagcaatatatttagctggattcaacgatatgttatgaacatcagcaacagaaagcgattcaacgaaatgatagataaacatattactcactgaggcatgcatgcgttcattacttgtgtaaaagctcggtcatctccagctactcaatgctaagccgttgttgctgattcatcagctatgtgtactctctcaaccgctcaaggcagtagcaaaaggagcaagcgtggaagaccagcgattgccagattggcctcactatggaccagatccggtttcttctaagaggaactttctctgcgactgtagacaggtatttttggcctttatatacatgccacaaaattatgtttactttaatcatgaactcagtgccatgtatgattagttatattgttcaaattatgctttctagaagttaagcaaggtgctttgagaatatcttccgtcgaggaaattaaacttaggtgtacatattaaatgattgaactgttaatctataagtttccgttcctatagtttgttagttgctaccatttttcttggtttcttctattcctcaaattgtctatttcctataaatttcaattctcagcagtcaccatgtgactgcataccatttctatagtaacatagccaactatttaatttcaaatcagcatctagcaaccattcttgatacctagaatttatttgcgatcattctatctgttcactatatggtgggttacttcagtatcatttcttccatttcctttcctttttcgattcttttgagaacaataaacttgattagcggcctttttttattaaagatgggcatatatctatataccgttttgtgatttatcataagaaaactaatatggcaacatctcactatcaatctgatttttccttcatacatattataggatgaaaacttcacaggaagatctcgactgttttgctattatacctagaaaaaaattacatattatagtagtagcttgacttattgattgctttgaagaaaaaaacatgaaatttttcagcagggcatcgccgcattgccaatcatctatcctgattgttaggctaatgg

SEQ ID NO: 20757 - DNA, 9957 bp, Oryza sativa
tgccatataaatcgcagcttactgactcttactactgtcatcagggagctaaggtctgattttcttaagaaggaaaaaaaaaactctgggtctattatctcttatctgcactaatcttgaaagtagttgctgggttacctcattgcactcatgggttagtctcatttctaatgttatcagacaatagatcattggatcagatggattacatccttctctacaattttaatgctcttagctggtagatcattgaatggttagtatggtcaattatgggttgtatgctgatatggtgtatatttgtctgcaggattttttttctttcctttccctattatcattctctatggtgaggtatagctttttatttgtattttactcatttaggccttttgcgatagctatcttgatggaattattgtagtttccataattatattcagctatttgtcttttaaaactgaagctatgagcttagaatagcatagtatttgttgtcgaaaatagagatgatttcctatagcccactatggagtgatggcaggataggtgtggctctctgtttctaaccccagtcgtcatttatactattatgcggtctgtgtgccagcactgtagttagaaaggaccactcttgcaaggatatttctccactcttgcaaggaccactcttgaacgccaacggattaaattaaattttcatttactcgattttaatcgaacggtgatttacgggtttgctttggattggctagattgggaagaatgctctcgcaaactgtattatcaaattttctgggttacctacaggaaagcgaagtgtgggttgttcgtcacccatagggtcatgccaattgccaagattgatgttgggcgttcggtttaggctcatgttgttagtgtaaatgtgccacactgatagagatgcagaaagggttattttgtataaatgggagtatgggttggtcctgttggacagggttagtaccatcagaaaggattctggcagtatgtcaatgtaggtatcattaagttattttgcttttgaaagaggaaccacctgtcagggaaaaaagactggtgcatgacaaggggaaaaaagtagtcgcaaagaaaattcgcaaacgaagttaggtttagatgtaaaaccacaattatggtctctggttgactttactaaaaaagatgagtggttttgttgtaagaatgttaactgagatttttctatgtaatgcttgaagcaagcacatacacacgtgttggccgcttactgatatttgaagatgataattctggcattcgcgtggtggagttgtggtgaaattagagaaaatgttgattgctggaattgtgcagagaacagcttgtataaaccttcgggatatgcaagtgcattttcattttacaaacttatgtagccaatgtaacactggtgcaatgggtttattattattctttttcgcaaatctaaatacatagttatttaaggaaaaaaaactattggggcatgagtttcttttagtgtaaaaaagaaactctggttaaaaaacaacttttgaggttgagtaaatgtgatttaaataaaaattagcttggctgcattttcttgttagattgaagtgtttaatactgaagaaactgagcagccacaaggaggctccaatggtatgatgtttgtgttatgcacttatttttatccttcaatttgcatgtgttattttagagctgaactatttttcctgtcgtacaggtcaaataaatcatggcaaatactcaacaaggagtctctcatctaaagagtactcgcagctaactggatttaactaataatgataccactgttgttggcattgtatgtatatgttggctttgtatgtacatgtttttcaacaagacaagtacaaattagtgaatgatccttcatctctagccttgtataaatgtgtaatatatgaaatctgcatgtttctcgttactgtagcacaattgtgtacaggcggcgcgccaatggcgcgccccatcatctagtactcatcatcgtcggtaaaatagacgtgatttggcagcagggcagggtaatccttggtggaaagacaaagggtgccattatgcccaatgaacaatgcctcatcttccaaggaatcgataggcacgacatcttggctgtcgaagtcaaccttgtatacatggaatccaaccgtacgcagttcttcctcctcgtcttctggcaaatgcgtcaacctccagacctgcaatgaccaatattttaaatagcgacctaagtcatttaacagttagcttctcaaacagctatagcgggctaaatggagctataacggctaaattgcggattgggatttggtgacattgcgccggtgacattccccgtgacattgagtcactgacgtgtgggacccacatgggtccaggcatatgtgagtcctacatgtcagtgactcaatgtcaccgattatagcgagagatttaaaaccctgcctgcaacacgtcccccgacgacggcgtccaggccatgtacgcgtggtgcagcgtgtaccccagcgtgtcggtgagaaccaccgtgcgcgtggcgcgggaatggtggatgtcgtagcggtggatcccgcctaggaggttcatggcgtagaaggcgccgtcgcggtaggcgatgtcggagtagggagaccagtagtaggaggaggtggtgatccagtgccactgcttgtcgtccccgaccctcgcgaacgacggctgctggtagacatggtagatgagcagcacgatgcagccgccgcatccatcttctcctccttcgccgccgccgccgccgcggcggcgtgacgacgacgacgacgggtcgcacgacaggatggccttgatgttgagcaggtcgcagagctcgtcgggccggtagatgccgggagctcggtactccctcatgtcgccgtcgtagaaggagacttcgtacccgcggaggtcgccgccgtcgccggcggcttcgaggatgggcctcacctgctccagcgtggcgatgggcggcagctcgatctgctcgcgggtggccgggttcaggaggtgcagctccgagcgggcgtcggcggtgaccagccacccgtgcgacgaccccacgatgctgcgctccgcgatcggcgggtccgggagggtcaccgtgtagggcctctcgtcggcgaggcagtagagctcggcggagcgcgtgctgctgccgccattggcggcggcggcggcggggatgtacaggaggcagggggttcgagggaacgagtagacgccacggcggcggaggtcgagggcgggggcgcgccagcacgtgcagacggcggcggtgcggatgaaatcggggagctcgagcttgcagaggacggtgtctaccatgtcggccagcaggtcggaccagtcgcggccggctgccggcggcggcggcggcggcggcggtaactccattattacggaatttggattgtggccggcggcgatgtagcagatcgcgcggccgatccactgatctgtagtgatttctccagcaatggaattggaattggaattggtatatgaacaggagtacgagtcgacctactcggctgtttcgccggcgacgaaggcgtgcgcgagaaattcgtgggctttgttcggtacacgggtcaaaaggatccagggcctatacggcccagcaatgaacaggattcgtgggctttggggaattgaattgggccgaattgaagaggccggttgggcccaatatgccttgtagtatttattcattctgggccggtagtttcgtgctgttaattaatttcggaataagttaatttgaggtcccttaacttgtcaatgaatctgattttcatccctcaaccgaaaaaccagacacaacaggtccctcaactatcaaaaccggtgcagattaggtccctcagcggttttggctgacgtggcgcatgcgtggctaatttgactcggtcttcatctgatgtggcattgacgtggaacttacgtggcaattcgatctaagaaaaacaataaacaccatgggacccacatgtcagtttcacacgcattaataaaaatggtgggggccgcgtggaccccacatgtcactctatcactcttcttctcctctctgggactccaggcaacccggcagacgggtcacgccacgcacgatggcgtcgagcccgggggcggaccagggcgaaaggacaagctcaacctcggcgacggccacgcggtcgaccgtggctgggaagaaccccgtcacggcatcaccgagtgccacggcgtctagctccatcccgtgtgccgacgaacggcggggcgaaggcgtccctgacgcggtcggtgtcgccgaggcctaggttggtgctgatgcagccggccagcaactcggcgagggagaccgcctgcgtgatgtacgcgtccagggactccctcgccgcgggtgggatgtctgggaagtcggcggcattgttcttgtggcggtgctggacgaagtaggtggcctcccagtcccaatcgacctggtcggctagggcgttgtcgctgccgtcgacgaggacgtcgtcgtcgtcgtccttgtccagctggaggttgttggcgaggtcggaggcgtagaacttgttctcgagatgctcgtcgtagtggcgagccccttgagatcaatcaccggagtctccatcgctcccaaggctatctagctacttctagaagatttctactgatattttcatcctgaaatatactccctccgtttcccaccggccagaggtgaggaggccggcagtgaaggcacgcgaaagagggaggaggcggggaggccgacgcgagcacacggggagagggaggaggtggcgcgggagcaggccgaggcaccgagcctaccgagtccacctccgcgccgccgagcccgccgagtccaccgctgccatgtagcctcttctcccatgtcgccgcgctgccgcgtcgccccttctcacgcgtcgccgtgtcgcctatcgacggccgccggccaccggactgcattctctcccctctcctctctctccgacgcgacagagagggagcggtgtgtggcggcgctggtgggagaggatgccgtcgaggtcggagggccgcccgaaggacggtggaaacgggggcagggaccgcgatggtgaggtcacgctggcctcgggttaccacgcctctgccggcgcggcgctgccgacgtcgccgtcgcaccctggcacggcgttgtcggcctggtactgccgtcgcaccaacatcaaccctcgctgctgctcgtgcaagctccgccggcgggagatgaagcgagggaagatggggagaggagaggggagagagatgaagagagggagatgggggtgtgaatgacatgtggggccccggccccaccattttttattaatgcgtgtgaaactgacatgtgggtcccatggggtttattatttttcttagatcgaattgccacataagcgccacatcaataccacgtcagatgaagatcgagtcaaatcagccacgtaggcgccacatcagccaaaaccgccctcaaaaccgtcaagggacctaatctgcaccagttttaatagttgagggacccgttgtgtctggtttttcgattgagggacaaaaattggattcgttgacaagttaagggacctctgatgaacttattccattaatttcaatcgctcctgtcttcatgtcactgtgtgttattgtctgaatactgaagaatcatcaaatacgtaagcattcaaggggcctcaacgatgtggctttacaatatttttaaggcatactccctctaatatatgttgtaactattttttttcgacggattataatataaaatcggcgtattcatacatgcaattaattttcctgttccaaattattttgtttaaatataactcttaaccattaagattttaaattttattgggtacatgcattatacttattgggtttggtccaaacataatatgaaatgtgacaaaatcgtactataaatttggataggacttccatctggattcgtacgtagtactgaagatatgttacatcttatgctataatgatttattttaggatcaagaaagaatatatacactgtggtccatctatatataatccgatggaacctctcactcaattcaattcgccatttccatcaccatcaacacggagtaagggtcctctgcagtactcctggtgcatcattttgttattagtttatgtttaatactttaaatgtgcgtccgtatacatcaaaaaaaaattagaggaggaactaaacacgaccattcatgctaacgcggtctaacatatttaatgatttattgttccatttttagaaggtttcgatcttcctcctttattattgatttggttagaataggattcttgtgttcaaatgtgttcgatatgataatcacggccacttcatagaactacgcggcttatgatgatgatgatgttgtgaaagtgtattccaggtattaagggttttattatttttttagtaaattgcatcaatagtacaagaacttggcagatgggtacgatttagtacaataagttgaaaaatatgcagaccgatacataaacctggcaatcaagtgcattttggtcaaaactctgttacatacaaatgattcaacctattttgtttgatctattataagcataactactagattattagtcatgagtacaattgaatatgtttgactaataaaatcgcttggaaattatgttacaataatttttatgcacttagttttaacaatcattatatttttcggtttcaaatcgacattttattttttattgtaagcaagcaaatacaatacatgtagaccattattatttgacaatcattatgcttattagattattggcaacggcgactgctttttttactacgtggtttaaaaggtgtggtgtctaatattgatttttaaaccaaaatgcacgtactagccaagttgttgcatctaaatgatcatttttcaagttgttacactagatcgcacctacctaccaagtttatgtactgtggacgtaatttactctattttttctacttaagaaaaaacctacatgtgcatgtaacatgcatgcaaaggtggatctaggctttaggccacccgggccacatatcccaaggcctgcgaatgaaattattagttttttcaacatgttgtttggaatgtgtcctatttcatggtgggccgggctcaggtgtatgacccaaacatagatctgctcatgcaaatacgcatagttgaaatttatctcaaaacaaaactatttcttctcacctatttccttaattcgcgtgaaaaacatcaaaaatccttacagtatgaggaggaatatgaagcctatcctaatgttcacatacaatgaggtttgactaagatttcacactgcaacttggtgcaaatttgctcaaatttatttttctataccctagctagtgtcatataaaagtagtatgcgctaaatttggtgcagatgagactaatttatgttaatgatgataaatcatccatccatagtactacctctgtttccaaatgaatgacattgaataatgcaattttgaactaaccggcgtcaaacaaaaagaaacagagagatacttattagcgctaactctaaaatatttctagacataatatatgacatcataacgtgcataaaaaatatttctagacaagctctaaaaatgcatttttcatgaggctcacatgtcacaccaaacatcacaattcctgaagagagttcccccgtacacacacacacagtagtatataaaaaaattaatgatgaaaagcacagctagaaaaatattaaaccacatcttttgtcggctgatctgaccgtacatccgatgataaggataactcatatcaaaatcacgtgtatgtaagcataaaagaaaagtatgtttccatgatcgatcgatccaggaggagagctagcactgaacaaagataggaagagagagagagagagagagagagaaagagaccaagaggtggttgcatgcacagtgaactggtccctgggtcccaacccctctgtactgtgccctctgtcctttgtaaaagagaaatgagagttgtgcccatgcagcagtgcccatatcatgaggccatcatcatggccgatcttttgcgtcagtggcataggcacacatgcaaaaaaatgaatggtgacagtagagagagagagagagctaaaggggggcagggaggggtataagatgtagtcagcgggtatggaccgacatcactcgtcgtgtatcatgtatcctggtgaccagactagctaattttgtagagacccttcctcctaaaataaaattatttttatcctctttcgtttatttagagtttgtgtaggtagatgatgataaacacattggaaatagataaggtatgagacagttgtattaaggtttgataaagtgaggatatcgtaatctttttgtttctgtattagtatgtactggataggagaaaaattaatttattttggaatggaggaaatgaaaggttatacatatatatgttaaccgtaaggcactaatgcatgttatttacagtgtgttgtgggcttgtagccattgatgaccatcaaactatgattttaacagtctttaaacatgtgtatcctttgaactaatttgttgtagtttcttggaggcaaaggctaaaatgaattctattatataaaagaatcgattagcctaggcgattgctctttggttgggttttgggtccactcataatgttgtatcctgtcctgcatatattcctctgtgttgggattggacatgtgaatacccatttgctttcgtattgcattggaagttttgggagtaatcataaggatgtagggctacgttgtaagatggtgaataaactgcactccataatacatgtttacttgctcatgaaggcaatatgtcaacttattttttcacctcttcctcatgttgccaatatttaagcacatataagttaaaccacaatcattttctatacatgtcacatttttcactaaggtggaatcaaaatcagatatagaaactactgaacaagtatgcctccattattttttaacaaaagctacaacaattattacatagctcttggcttgaaataagatacaacaatatctaaccatggatgaaagaaaacacattaaagagctgccaacaataagaaagagatacaaattattcagagagcaaatttaatctacctctattaaagggcatctcgagtggaggccacacctatagcaatgctctcacgtgggccatatggactaagattattcataagacacccatctttcaatggagggcactctctaagacaacaagataaagagggcacggtctacgcccaacgcatggccagcaagccgtggcttggcgaaaagcggccaagaacactaaagccgcacatacgtaccttgcctgggcgtcacgtttctttgcaggggcacagttccaacttggaaaatggtagctaaacaccatgagcagagctctgatctgaaggtacgcattgaagatggcctaatttgctccatgcaactttgatcgttcaaactatatagatccaccccaatttgtatccctatatgtgtgggagcggtgacaaggggcctaggggacagcagtgaagtgaggaggggaaaagctcatcaatcataaagcaatggattacagaatcatttcatgtcctttgctggtcctttcatccctatgttaacatctgagatcttgccctttactcctgcctcaaggcagcaggcaagcagcagtctgtggcctctgtgtatctatctgtgacaagtccacaggagtccacacacatatgcatctgcatcaatgcattcatgattcactatcacaat

SEQ ID NO: 20758 - DNA, 31140 bp, Oryza sativa
  unsure (1)..(31140): unsure at all n locations
cggcatggggcatggtcgcatggacggcggaggatcctgcatggtgacagagacggcgccggcgacgagcttcggcgtggggcgtgcacggcggaggatcctgcgtggtgatggcggcggcaccggcgacgagctccggcgtggaggatgcagccaccgactgaggcgtggacgatggacgtgaccgcaagtgacgaggtcccggcggaggacgcggtcgctggcaacgagctccgatgtggaccatgggcgggggaggatgcggctgccggcgatgaggttcgggttcagtgtggagcgtggacgggggaggacgcggccgtcggcgacgatacctcgacgcctcgacgcccagctcctgtatttagttagtatcatatgataccttccaagtattaccctgatacttgtagaaatcgcgcgatacctgataggtatcacatgatacctcgcgagtatcgtctgatacgtgataggaatcgtctgatacctgatacgtggtagaatcacatgatacctggtaggtatcactcgataccagctaggtatcaggacctgatacctcgcaagtatcacgctctacgtggtaagaatcgcatgatacatgataggtatcatctgatatctcgcaagtaatcacctgatacgtggtaagaatcatatgatacctgatagatatcatctgatacctcacaagtatcacctgatacgtggtaggaatcgcctgatacttgatggttatacctgatgcatgttaggatacttgcgaggtatcaggtatctataaggtattaggcgattcctatcacgtatacatgtgatacttgtaaagtatcaggtgatacctgtaaggtatcatacgattcttaccacatagaaggtgatacttacgaggtatcaagtgatacctatgaggcatcatgtgatacttgagtaggatcatgttaaacctaggaggcatcgtgatcccccttagtatcatgttcggtttcaccaggtttcataagtgatactttgggaggatcatgtgatacctggaaggtatcatgatcctcatctgtatcatgtctgctatcatcaggtttcacagatgataccctaggaggatctgcatgaccctacttaggtatcatgtctggtaacataatcctataaatttcacagatgatactttagtaggatcgtatgatacctgtgaagtatcacatgatcctacccaggtatcatgatacatgatcctcaaaagtatatatcattatgtgtgatacttgtgaagtatcacatgatcctatctagtatcatgtctagtacagtggtttcatgcgggtttcacaaatgatacttgagtaggattatgtgaaacctgggaggtataaggaggtaggatcaattggagtataaggagtacatcatcctcctgaggccgcggccggatgccgccaccgtcggcatggacgacgacggcgcgcagcgagctagtacttacccttcctccccggcaacaccaccgccggcggcaagctgcggctggtctgctcgtacaatcacgccattgacggcttcaccgccgtcgccgtgtccaaggagctggcccagctccgacgctgcttccaggacggcatcgcttgcttgtattactggtttaagcaggaaggaggatggcaaccttgccggatccggccatggcgacgatgcgctgcgcgtggcggcgagagcacccgaggcggagttgctgcggatgcaccggggcagcggcgacggcgacgcgccgcctgcgcggtggaggtcaatgaggtgggaggacgcgagggacgacggcgccgccattctctctccaagccaatcccttcgtctcgtgctgcagcggtggatgacgcggtggacgaaaggggatcctgtcccgtcccgacgggatcctgttatttagcatttccctttacttttctatatgtaccaagtaaatttgtgtcaactttttaaactaaattaatggatgtactcttctgtttgtgaagtacgtacgaactaatggtactatacgtgtaaaggaggcagagatataattttttggtgtttttggtacatcttattagtacaaatctacaaacatctttactgggataatgaagtagttgcggtgtcagttaatttgtcaccctaactactttgattgtaaattttataaatttctttatactttttaataaaaaaataaaatctagctaagtggatagcaaatccgctgctggtcaagtttttaaaaatataaattaaattaacatgaatatttcctatggtaaaaacataacacatttcttgcaaaatatattgtttatgacgtgtatatatattcttctatttgtaacaaatgaaacaccgctggagaaaggggtatcactcccagttggtaacacccctatagtcccagttttgtaaccgagaccacgaatccgggactaaaaatgctcacctctagtctcggttaaaataaccgggagcaaagacagatctttattctcggttggtgttaccaacctggagtaaagagggaaatctttattcccggttggagttaccaaccagaacaaaagagggtagtgctaggctctctaatgcctattcttctctttttctttttcattgttctttgcctattgatttcacaccaaaatcacatagatcaacatcacaaaattgaacattgacatcacaaatttacatataactgacatcacaaatctacacatacatcacaaatccacatattattggcacaacaatttcacaaaaaaaaatcaaacaaattctcaaaaaatattcacactgctggggagggcatcaccgccttccgccgccgcctgtcgtcgcccctcccaccggatccgatggaggggagggcgaccttcgctgcccgccgcctcccacttcgcgcgctgccaccgcctgctgcctgccgccgccacctcctgcccgccaccgccgccgctgcccgccaccaccgcctcctacccgtcaccgccgccgtcacatcgagaggggaagggcggaggggaggaggagtttaggagttagaggaggagtggaggagttagagctgcgagaggagatcgaggctagataaggacgagcgatatgatcgaggtgtgtgtggctctggtatttagtcccggtgggtataaacaaccggggtctaaagataggtattttttcccggttgtttatactaaccgagactaaaggtaatgggcctgacatctttttcaaccgggactaaaaatgatctttagattcttattgaaatcgggactattgtggttttcgcccaacccatcaaagatgcattctccattagtgagagcacgtacgggtattcaatgagaagcttaaaaattcaaaaagaagtgtacataagtagaattataactgatttccataaacacaaagtccctaccggtcccttccttaattgatgccgggtaatattacaatttggtacattcaatactactagttactctacctcttagtctcggtacctctaggaccctagaggtactctttgttttaattctactagttaatttaatttcatgccccagcaaattctatcgatcatgcatcaaccacaaaaaatgaaccaagaaaataagcagtaagtcgatcatgcatggttcgcttgaatttgaatttttatatatacatggcgcggtggatacactcatattgtcaatctgttgattaattaactattttaagagtgtgttaagcatatcatgcatgacatggtactacgatacttcctccgtttcataatataagactttctaacattgctcatattcatataaaagttaatgtgtctagctaaaaagttttacaatatgaaacagaggtagtactccttagccctaaagcataataaatatcaggatttctggagttttacatggagaataaaaaagcatacaaaattaaaggaacggttgtgattgattaaaaaggataaatgatagaaaaattaaattagatattattacgattggatgatattgaagcgtataggttttagggtttagtacatgaaaaagttgctatatatttggtgacaaattactattacacaaatatttttttaagcacccttttttttccaacgactaaaagaacataagtatgtaaaattgtttggattgtgctaaggccccgtttagttcacaccaaacttcccccaaactcccaactttccatcacatcacatcacatccaaaacttttctacacacataaactcccaactttttttcaaactaccaacttttcccaaacttctccctaatttcaggaattaaacatagcctaagtaaggaactttatgcgaaaatccattttcatagacagaccacttaagtagtatagttttcgaagtcaggcctgctatgaggcacgtctacaaaaccttctaattttgacgtgaactaattaaacacaccctaaatttactaaggcattgtttagttccaaactttttcttcaaacttctaacttttccaacacatcaaaactttcctatacacatgaacttccaacttttccatcacatcgttccaatttcaaccaaacttccaattttgacgtgaactaattaaacacaccctaagtcttctctcatccagcctctcccatagatctacgcctctacctcattcttcacctcccttccctctcaccccctcagctccacagcggagtcgcactccgtggacgtgggtcggcagcggtgcagtgagatccaacgacaacttcggcagcggtgcctgcccttgctcacgcagcgttgtgacgcaattcgatggtggcctcagctgtagctccctgcgttgcttgcatggcggtgcggtgcgatctgacgatgacgatggcggtctcaaaggcggtggatttggcaccgctatcctggaaggggcggtccgccgtaggactttccctttcctttgcgcatggatccatcggtggcggcggcgggaggggagaaacaggtggcctctcccccttttgtgcgcagatccgccgacaatctctccctctcccatgctcagagacctgcctgcagcgatgataggaggggctgagctagcgaccgctccccctatgatgatacggctaaataggtggatccagctccggggaggccggtgatggatggattcctatcttgggttttgatttttctttttgaaattttaaattttttgaccgaaaattatttttgcagtcaggtggccggcatagcgctccgtgcgaaaatcatgattttaggtgcggttaaactgcccgcttagaaaaatcactatttctgcatacaggcaggggcaagcggatgctacacccatctgcgaaatgtattttagccgttaacaaaaattatgtctgtagcagtgaattttaaacgactaccgatcgagtaccggtggcacccaagctcactaacagtgtagcagtagcgacagacatgcattcatccacgtacatacgtacatgtacttgtcaaccacacacagtatatatatattgtccataaaggcaacagtttatctgaatgagtgaatcaatcaaaagaaggcacagagagctagctagctactccatctgtcccacataaaaaaccaacctaggccttccaaactttttcttcaaacttttaactttttcatcacatcaaaactttcgtacacacataaactttcaacttttccgtcacatcgttccaatttcaaccaaactttcaattttgacgtgaactaaacacacccctagtatcgaatgtaacacatcctattaattactagtacgaatttaaacatacatctgtctagatttgtagtactaaaatatgtcacatccggtattagatttgatttttatgggacatgagtacatgtataggccggccatgagagaacgctcgttccatatatgcacagttgcacactttatctctatacatccaaaccctcatgttcatatgcaatgaatggtatagtagtagcagcagcgtgcctctcagctctgcttccctttttcagctctgctggtagctacttcacccgtctcttaaaatatactccctctgtttcatattgtaagattttatagcattggacaatactagaaagacttatattatgaaacggaggaagtagatacttatccgcctgcttgtttaaaccactcacaaccatcttaaacaatcatgataaaaactatcatcatctattttgacatctctccgtctttaatctccgtataaaaaaaattagctccagcaataattatattttagaacaaagaaaacaaatatacctcgctctccttaacctccattaaaaatctcttgaaactactttctccgtttcaaaatatttgataccgttgactttttagtatatatttgaccgttcgtcttatttaaaaaaaattgtgaaatatgtaaaactatgtgtacatgaaagtatatttaacaatgaatcaaatgatatgaaaagaataaataattacttaaattttttgaataagatgaatggtcaaatatgtactaaaaaatcaacggtgtcaaatattttgaaacggagggagtattatatttgggacagtgaagccagctgatctgcaagagcctgcacgtacaggcaactgccgagcagagcctataaggttaccttgactccctgactagcttatcaccgcgatgcatgcatgggcacatctgatctgcatggatcgatggccagggcggaagagcaaagtgaatggagctaagagcaggtacaataggagctgtaaacatattttaaaaaaataaataagaagaaaaaagagcagcgggctacagatttatagccagctgtagcacggacttcaaaacgcagtgtgtgtatgacagtatgacaggtgagactaggtattgatagtgtagtatataactattgtatagatgagatattagattgactatatatgaattagagttaatagttggttatactattaaacttgctctaacagtacactctctggatgcaaatgccgtgccattattattccatgatggcatcaataatttgcacccatcgtcatgtatgtgccgcagttaaggtttgtgactgccacccacagcctgccgcatttatgctacacactgcatgtggatccttttctgcttcccccctccgccacctctgaaggtttcctagctttcaagtttcatccaactaacccaagttataaataaaccatatagagtaaaaccaactaacctgagtttaattctttttcctcgaatacgactaacccgatttataaataaaccatatagagtaaatttcacaaaactacagactatcgtaaaactacaaatataagattatgttttatataaaactacaaatttaggtctaaatttatcacaaaactataaacttaaagtagagtatcgtaaaatacaaatttagtacttactccgttttacaatgtaagtcattctagcatatcccacattcatattgatgctaatgaatctagacatatatctatctagatttattagcatcaatatgaatgtgggaaatgttagaatgacttacattgtgaaacggaggaagtaacaaaataaccacaaagctacaaatttagtgtcaatttaatcagaaaatttgagcgtttataactcaaccatgacattagtgccaaagatttaaactctgaagtttatagttttgtgataaatttatttttaaatctatagttttgtgataatttggttaaagtatatatagttttgtgaaatttactcaatcatatatatgttccaaaatttacttatatttacgtttcttctctattctacttgcaggcctccgatcccatcctcttacctcttctctctactacatttctttcttctctcctctctaaaagtttttggggaacttttcatgttcagtttagtaagataatagcaattttgtatcaaaactctgatttgatattctttggctagttaaaaactaatgaaaaggttaattaaaatcttattgctctcgtgaataagctccaaaagtgtccctacgtacaggccctcaaacagcttccataatttctatacctattggtttgtaattgtttttttttgctttttcgtattttcaaactcctagtttattgtgttatatgtggctttgcttggcatggctccaactcatctcaaattcttgcagaaatagagtttacaaattaaactagagttatgcgcttaatcctacaattttagtctaaaatatgaataaattgtcttacccaaatgacttaatctatcaagagctccaacaccaagataaatttctgaacctagaaagaaaacctgctgctaaaaaaatactccctgcgtcccataatataagggattttggttctatatataatttgtcctacaatatacaatattttttatcccatttatcaactcttgtattagtttgttttcccatttatcaactcttgtattagtttgttcttccacctatcaactcttgttctaatttattcttcatctatcaaatattgtactattttattctcccatttatcacaatttgtactacatgttcttttgctacttccttaattcatgttaaaaatgacataatataatctcttatactgtgggacggagagagtagagttggagctatgttgataaatagtacagtatatatatgttcatgatttgaacttcgcactttcacttctcttcggctaaattaattatacccaacactcacagccattcatgataaaccccttatttatgcatagggcccactgcgccgccaactagggagcaccgccgcgcgtcgccttgccggcctcgccgggcgcctgcccagccacccgccgctctgcggccctcccggccgccgccgccaggcccccgccctcccagcctctgttgacggtcattatcgatcagtttcgaccgtcaatattaccaaaaaagaggagaactagtgattcttgcaatgcataaatatgttagaataataatatttaactagtattcggtatactaaccttttgcagagaataacaataaagtgaaggaggatcgacatcaactcaaacaataaatcaatcggacgatgtcgagaatcagacttatgcatgaatgggccaagaacttagaattgacacgatgaattgggccaaaattcacaagtctacaaagtgaagcaatagaggaggtcgccagctgaagatgggctggtttgggccagcccatggttcggccgaacccccatctccaccgttgaggccagggttcggcatggacgtccaagattgcaccccaatgacagttggagagtacttcggacaattccttccaaccgtcaaacacctctatataaaggcttcactctcttacttcaacacacacctcaagcaagagctctctcatttctctcaagtttagtttagtagtatctagctggtggaataggaatagagtagaaatcaggagtccggaagccttcagaagagttcgggtatggctctagtagcttttctttcctcttttgtaagctttgtacttttattagaatactcttctatgtacatttatggtattgaaatatgttctgagtatatgagtacctactttacattatgttcatgttatactgaatatacagctaacttatctgggagatgctttggtgcgggtataatgtttgcttatgcaattactctatgtcatgacgatgatattagagtagtatctagtagtttaagcgtggtgtctagattacgggatattattatttggggttatatgctgcggatgagaggtgggccgctgatggtgacagctcaatacgggtattcctccgcgcctgtatataatcctaagttaattccctggggagggtattcctccgtatttagcccgattttatggtcatgacgggttgtcgtaaggaacttggcagtcaggggtggtgtcgacgtttgatgttacgactacggtatttgcatagtatggggatcgttggtactaggatatatgtgagattgaggtaaaagagatggggacgaggatttttatacaggttcgggcccctgaattgtcaggtaataaccctactcctgttggctgaagcctgtcgttgctcttattcatcataatcacaccaatacaatatttggggtggcctatctatctgttgtcgacttggcggccataaaaccatcccgtagtcgacaacagagtagtcttcctcctagaatccgtgtccggcgagatcagagacagcgctagatccctcctgacggtagtcgtaggaaccgtatggggactaactaggcttatctccgatgtcgatatccagcggcttgtcttggcgtatgttggcttgtatgttgatcttgtgtcttaatctattgttccgtccccctctcctcctagggggtcttgtatttatacccataggtgttccattttccaagtagaactagggaaaccaatacggatacaatcagagtaatccttgtcgtttccatgtagaactctatttatctttccttatccggaactccttctatacccgaaggttgtttccgtataaaacatggtatgtggtaggtcctgccgagtttagtcaactactactaggtatgtggtatccataaccctgacaggtggcttctcgaagtaccatgagggcatcggatagagggtattagctagtatatcggttaactagaatgcatgtatactatgtatattagaagtatatgaatagattttctttctcttttctttccacctatcttagataatatattatgagaatgagtagctaatgcttgtgtgtcactctacccttggattatcttaacccctgcttagaatataattatcacaagtaatatataaactattagttaagttctctctacatgatcttcccacgggataaaataaatacgatacccttggaatactctcgggtgaaatgctacaatggtatatccatgcgcttgtggatgaactctgtaaccataatataccagaattatttttgcgccattgctgagaattgtatttctattaatgacgttaagaaatatcaacagcctcacgtggtaggaggtggaggaagagaggagaagagggaggaacgggagagaagggataagaggctatttaatgagaggggaggagagaggaagggggagggaccaagatgagaacttgagaagtactggcgcgtggcttgggtgatttttttttattttggtcccggttggtataaacagccgggactaaaaatagatctttagtcccggttgtttataccaactgggactaaaaataattggggtctaactcgatcggacaacttcttgaaccagaactaaaaatgatataaagcttaaaaagtttttaaccaggacttaaaaataaattttagtcctggttcctattcgaaccaggaatattgtggtttttgagcaaaccagcaaacatgcattctccagtagtgagaattagagattttaaggctggaggattttaaaagtaataatttaatagagaaaatgtcctagttatctgcatacatacatgcatgccttatattatgaaatatctaaagaagtagttgtgtcttatattatggaatagagagagtacttttatattatggaatggagagagtactttgaacgttttgttataaagaatttgttaatatatgctatttcttatgtataatatatatatttaaaaatagttaattatgatcgaagttatagcttatattgacagtacgtacggattgtaaaacaatattcttttgtgattgaagtcgatcaataatatcgccaaaagctttttgttagaggcggtcggtcgaaccatctttgcgaatgtatttagtcgtcttcaaattaaattattttctgtagccgcagtgaatgtatttcgtatgtcactacagtacatggtagtactgtattaaactaggcggtcagagcacagtacgtgacacttattttttctcagataaaactttaaacggatttgaatcgaaaaatcactgcacggaactataaagtctgggaatatatatatcttccgaacagtagcgatgttgtcagtacatatggtggccctcatccgctagaattcaataatatagtgttaatgtccacggttacgtacaaaatgtaacattttcagcgctaattaacttggtaattagggttcatcacggatatatcaacggcatccacttattaagcttgcgtgttaaattaaaatgcatcgatcgtgtgagtgtataattatgtgtatatgtgtgatatcttccaacgatgtattatggacctttcatcccaaatcccaatccttaatcctcaaaactctattttataattactcatatttttggacgacaaaaagtatatattacaattctctctatctttaaacacaagtggttgttgactttaagacatgacagcaatttacacaaaaaggtaattaatatagagagatttctggctgctcgatcatcatcacagatcccaaaattaatatagagagatttttccataaggtacatatattgtacatactccctccgatccgtgatgcttttaacttttcttaaagtcatatatataagtaatataataatatctacaacaccaatttcatttcattgaatctaacctttaatatattttctagatatatgttttattacatcactgctacgaaaactatttttcgtggcggtcattttgggttttcgctggcggtatttgaggccgccacaaagcaaaggccaatgaagatcaagcatcttcgctggcggtgaaaaaccgctagagaagttcagttttcactggcggatccacataaggcagccgccantgaaaataatgttcaccagtggctgccttatggaccgctagcgaaaatatattttcactggcggtggacagcgggcagccgccagcaaaaagccggtttctctggcggcaagtaagaagacctgccagcgaaaataatttcggagaaaaaaaaaataaaaatcacattccccaattcacatcccaaatccacaattcacatcccaaatcacatttcaaacttcatgttctcatttctaaatctactccacaattcatactcctgcaaaaaaaacccaaaaatccccagtcccaaatccatggaggactcgacgtagtgtcaacttcggcaccctcctccaatcgctgcatctgcaccacctcctcggccaccactcgccacaccttgtggcagtacaccggcgtgccggcgagcaagaagggtcgccaggaagctgtagtcgtcgtcgtcgttacgggagccgtagccgtcgtcatcgttcgccgccggatccacctccttcactgccgtgaaggaccgcccgagcaccgacgccggcgaatccgagcccaccctccccgtcagcctcccccgtcgtcgcggcggcggatccggcctccaccatcatcacggcggcggatccggcctccaccgtcggcgtcggcggcggatccggcctccccggtcgtcgtggcggtagatccgaccactcttgtcggcgtcggtggcagatcctacctccccagtcgttgtggcagcggatccggcgcgcggcgtgccgccaccgcgagtccccgtcgcgccgccgccgcgcgccacccatgattgtgggagaggagagacggccggtggatctgggagaggtgagaggagtggttggagggagaagtgggatggaagggagaggagtggttggagggagaagtgcagaagtgcgtgaacgtgtcacgattaatttatgcctatcccatgattttttatggcggtggctattacaccccgctactgaaaatctatttttactagcgggtcctagaagcaccgcttgtaaaaatagaggtgtttttgcaagcggtactcttaagtaaccgctagcgaaaactgattttcgctggcggttctaaatttaccgccagcgaaaatattttcgctggcggttctaaaccctctatccctcgttagaatttcacaagcggatttctcatataaccgccagcaaaaaaaaataggataccgtcatgaaaaatcatttttctagtagtgcatgttggaaatactacgttttactttgtcaaacttatttatttgttttttttaaaaaaagacaaaacctcaaacaaaaggaaacttggaaagtcattagcttaattaaataattataagcaacatttttcaccggttgggtaatactagtagcacacgtacgtacatagtactacatggttacgtgtttggccgtgagctagctagctatacgtgttcggcttgagctcgtgacatggacgcaatgccagaattctataaaactatagctgattgctgatgcatacccctccgtaattaaaaaaaaaaatctgggcgcacgtactccctccgtatcagagaaaaagcattcatagcattacaagttaaaattaatgtgaaataaaaacgatcaaaatatcccacattattaaagaaagtgatgatggtgatagatcggtaaatggtatttaagggataaaattagcttctcattttacgtgttgagggtaggtacgatggtataagttttgtttttcatattttaaaccaaaagttaagtttttttaattgacggaggaatatctgataggattagttttttgacggagttgtacgtgagtgcgcacaagaccttggtgtcacggctcagcagtcagcacacatgttcatcgacatcatccactagcttaatcaactcttctacttaattacgtacctagttatagttaatctcttgtacccaaggcaagcgattggtcagtgcatgtgtgtacgtactaagccagtactataagtacctaattatttatcctaagatatcccgtagacttattttggtgatatgcgaaagagagaagtgaggagagagtgcattggaggtattaagatttgagtgttaaagcctaaaaattgtacatattacctcttaatttacgatatataagataaataaaattagagagagaggatgtttggtttctagctatactttatcacaccacacttttaaatatcacagtttgtcataattgcggcttgcgacgatttttaatagcatatgtcccgtatatcatagactaaggttttttctcaacttgccacactttcgtggaagcgacgagaaaaaaacttgaagttagtattagaatcatttttttattgtttatttttatctcagttatgagattttgcactgcattcactggtgtaatcgttggttgtgtatgtccacttatgaatatatagaagaagttagatttctattcaatatttttttgaaaaaagatattttataaggttcattcaagcctccagctcgctttttaaacagtcatgcatgtgttagatgattcccccacctagtttatatggtttaagttatgattctacatttatgccacacacacacacacacacacacacacagatatatatatatatatatatatatatatatatatatatatatatatatatatatatatatatatatatatatatatatatgtccttcaccaaaaaatatgtaaaatccatggattatttatacttaaatgataattgcccctgtatatgtgagcatatatatgtgtgtgtgttgaagaggcgttctcgtgctgtgcctggagagtggagagttatatgtttggctggtgggaaaaagtcgaaatttctagttagaaatatatgtgatttatgactattttgataaaactaggcacaattattgtcacccatttgtaaaatttcaagctaattaaagtaaaattaactaaatttcaagttaatgtaaatttagattaaagtttgaagaacctagttacattttccttggaatttactcccacatatatcaagtaatacttctaagtaaaaaatataaatcactagcctggctggcttttttgcgatagattaaaaaaaatcaagaataaatgtctcaactatttggtataagtagttaagtacttgtgacattttatatcgatgttttccacagtcagacgtacataaatgtacatgaaacagatcaattacaaacgagcaaaaagggacatgcatgcacttgcgtattggcattcataggcagcaatacagattgccaattggctcaaactgaatacgatcaggcaataactggcctagtacccacaaactaatcatcttcagctgctctgccaataatactggtggtccagtctcagagtcagtcttacataaaggccctttgatttgattgttttttctatgtgcacacatacgtgtatttttttcaataatggattttattaaaaattaaagcagatagcgctgtgcgaactcatcactagaaatgcgcacgcacacaccctatcaattatccatatgaatatatttgaaagattggaccagtatatcttgggattgactaaatcatcacgagcttatcactattataattgaaagaatgttaaatctataacttgaatccgaatggactagttccaccaagagtgatctaactagttaaaccacgtatgctcacttcgcttttaataatggatttagattaaacctggtcaccacattcaatttgatatacatagccaacacgtatatgaacatagtttaatatgtgattttaacttttacgatatttgagaaagtagtgtattaaaaattttggaatctgttaatatctgcacacgaaaactagagatcagatgctagagggctccacaaattggcgctaagaacaagagaaaacaatatgatatctattcaacgaccctaaaatcacttgtgagtagcatgaattaacaccctaatcaccagggtgtaccatggattttcagctatcgtcatcagcactaaagtgtttaagcctcctttagaatttagtaattaaattgatccaacggaaaatgcgagaaaaaaattctacgtcccaaaaagaaattaagcgcaggaattatgtaacttgacaaaaatgatacacataatttgttgggttaatttgatttatgccattgcaaattacatgatttgaaaatatactactattatgcacctattcgtatcaatgccattacaatacatctaaaattaaattcatggtatttttttccaaattacagaataggtgaatcctattatgtactccctcctaaacgactttctttacgagtacggagggagtaaaaatgatggcataatttgttgggttaatttaaattttggtcatgggtcaccggattgaagaagttcataaaccaccaaaactccaaaacatgagtttttgtcatattgaagtggattgggtgcgttcgtttcgaaaaatctctacgtgattagcgcggtgaacttttgttaatcaatacccataatgacttgtattagcacacgcgggtgctatgtcactggaacaaataaattcaaaaagcaccaaaacatgagttttggccctattggagtggattgggtgcattcgtttcaaaaaaatctctccgtgactcgagcgacaaacttttttcaattaatgcccatattattctatattggcacacgtagatgcgatgtttttcaccggaacaaaaaaaatcaaaaagcacaaaaacatgtgtttttctcatattatagtggattgggtgtgttcgtttcggaaaaatttctctgtgaatcacactgcgaacttttgtcaattatctccagcgtcgacgtgctcgcctcgccatgccacacaactatcgcagttcgtacacacgcggctaagaaattagaacacatctatatatatcacacacatgtgaaacaaaaacattaagctagcaatggattccaccctgcgaatcatacccaccgaggcattgttcggtttggaggggattaaagaggattggaggggattaaaggggaataattccacactacaataggtgtggaataaatcccaccaattcctccctcatggggattaaccgaacaaggcccgagggtggagatgatgtccatggactcctcccgtggctcgacgatggtgaaggcaccgctggctgagaaggtgcgaggcacggaggcattgccgctagagtggccggtgcagtcggggacgtgaagctcagctggggacttcatattcctgtggccttcgcttcaccgctttgacccagatgtgatgtgaccattgttactatagatacaaccgtcgctcacatcaagatcaaatgttgtggaatccaattcggtcacctgctatactgttgacttcaattggccgtcaaagttgcatacgagctccgttttttggtccatgagtacttgatggaaagctcttggaatcctctttccaatagatacagcctcattactaaattccatcccagtcatccacaatcacaaaaacaaggtgttgcgttacttatattgggccaatgggtttgtaaattcatttggaaccccggcccaagtgggacccatgtggggtgcaccccaaacaggtggagcactaccctagggacccctaggtcgtcctcccacttccataaatagctaggtaccccttcagagtttctcggattttgtttagataaagtttagcttcgctactttgctgagtaatctcgtgatcgattagaacgccggtttgcttgttatggaaccccaacttatcattggtattcaattcctattcgcaattcagattgcttttatcttgttcttgcttgtttcttcgatttgcatgcacgaataaggttggactgcatcggtaagatcaacaacccacggagatgtcccagcaaaaaaaaaaacaacccatgaagaggtgtatcgatcgctaaggtgcaacacaacaatgtctcgtacggttgtagtgtggtcgtcaacgtttatcccaaatcgtagttatcatcaactcatcgaaagatcaggccaatcaaagccatgagtgtctcgagtggaattcaggctttatcaagacggcggctaccggcgcttccagtcaccttgtcctctattggacgctactgccgcccccaccgctcggtgtgcccctgtgaagcatctaggccctcgttgttaattttggtaattaatgacaagcactaattatggactaaccattgtctttaagctatatattttaagttaggaccaagtcatatgtgggcatggatgattatcgatggattaaaattgacggcgcaaagcaaagagaaagaagacggtaaaactagtgcttttatttagaattgatcgaggtgtagggcgatcaaatttgctagtttatttgttagtttcgcggtactatcaaggagggtaatgacctagcaaagagttgattttaattgccacattaggtcattatgcatttagacttgtgctcacactatcacaacacacacttgctatatatattggtctctgtttcactgggttcggcctgactaggggcggccagaccggccacactggcggtctgaccggcgtgccctggccggtctgaccggcgccacaatggcagtctgaccggcgcataaggccggtctaacaggcggcacatgcgcggtcagaccggccccctggaggccgggatggtgctgctcggggtggccgatacagagccgacggagccgtattcgttcagaccgagccgacggcggtctgaccgagccgaggccggtctgaccgcccactcaacgccggtctgaccggccaggccgatggggccctctgacagcactacaacggctagttttctagccgttgcagagtagcacggtctaaccggccacatacctccggtcagaccggcagagtacaaagttgggggattttgccctcaacggctagttttggttggtgggagtataaatactccccctttagcagcaagggggctctcttggcacccaatttaattgcatacaccccttgcacctctctcacacccacttgagctttgtgttcatccatctagtgtattagagggttgattagccaagagtcaagtgcattgcttccatttgtagagctagtgtggcacttgattgatcatctccacgccaggtcattgcttgttactcttggaggttgccacctcttagacggcttgtggaggagttgcccggtgaccactccgagaagattgtggaggaggcccggcgccggtttgtgagtggtttggagttcaccaccttcggagtgaaggaagaactaccctagtgatcgaggcttgggtagtcctctccatgggccggctcccaccttgcccaccccttgacgaaggaggtgtgcggtggcttcgtggttgagtggtggagttgggctcgcctcaacggggagtaggaaaccggcgagtttccgaacctcggtgaaaaatctcttgtctccttgtctcatttgattgtcgaatttacatttgtgaaatttacatttctagagacgtacttgagatcatatcaccctaggattgctaaactttgacataggagtgtgatttactttcctagagatataattgagccactatcaccctaggtttgcaaaacataacttagttgcttagttagagttgaccctcaccaagcctagcaacttaggttagttttgattaggtgtcatttagttttaaatcgcctattcaccccccctctagtcgacatctcgatcctacaagtggtatcagagcttggtctctcttgattgggcttcaccgcctagagagaagatgtcggacgaggtgaaccatgtagagaaggctcccatgtttaatggcacaaaccactccacttggaaaattaaaatgtctactcacctcaaagctgtgagcttccatatttggagtattgtggatgtaggctttgctatcaccagcacgcccttgacgtagattgatcaccgtaatctccaactcaatgcccatgctatgaatgctttgttcaactctttgagccaagaggagttcgatagagtgagcaaccttgagaccgcatatgagatttggaacaagttggcggagatccatgagggcacaagcgagtacaaggatgtcaagcttcatttcctcaagatccaatatgagacattctccatgttgcctcatgagagtgtgaatgacatgtatgggaggctcaatgtcattgtgaatgatctcaaggggcttggggcaaactacaccaatcttgaggttgcccaaaagatgcttagggctctaccggagaagtatgagacccttgttaccatgctcatcaactccgacatgtcaagaatgacacccgcaagcctcttgggaaagatcaacaccaatgacatgtataagttgaagaagaaggagatggaggaagcctcaccttccaagaagtgcattgctctccaagtcgaagttgaagacaagggcaagggcaaggtgaatgaagccaatgaggacttagaggaagagattgcccttcttgctagaaggttcaatgatctcttggaaaggagaaaggagagaggtagggactccaactccaataggagaagaaatagaagacccaacaagactctctctaacttgaggtgctttgagtgtggtgagaagggacactttgcttccaaatgaccttccaaggatgatgatggagacaagtcatccaagaaaaagagtggaggctacaagctcatgaagaagctcaagaaggaaggcaagaagattgaggcattcatcagggaatgggattcaaatgaggagagctccgcctcatccgggtccgaggaagaaggtggtgatgatgcaagctccaagaagaagaagatggccgttgttgccatcaaggaggctccatcactcttcgctccactttgtctgatggcaaaggctcctctaaggtaacatctcttagtgatagtgagagtgatgatgagtgtgatgatgtttcctatgatgagcttgtgagtatgtttgaggagctccatgcttatagtgaaaaggagattgaggagctccatgcttctttggaggtcttgtatgaggagctaaagacctctcatgagagactcaccatttctcatgagaagcttaaggaagctcatgacaacctcctttccactactcaacatggagctctcattgatgttggcatatcttgtgatttgcttgatgatagtgctacttgtcatattgctcatgttgcatcatttagcatttctacctcttgtgatgatcttgtggatgtgcctagctctagctctagctcttgtgtttctatttgtgatgcctcacttgttgttgagaacaatgagcttaaggagcaagtggccaagctcaacaagagtttggagaggtgcttcaagggtaagaacactcttgacaagattttgagtgagcaacggtgcatccttaacaaggagggacttggattcattccaaagaagggtaagaaaccttctcaccgtgccactcattttgtcaagagtaatggtaagtattgctccaagtgccgtgaggttgagcatttggtgaatgattgccccagtggtaagccttctaagacatgcatgtttgattctcattatatgcttaggaaggctcatgatggtagcattgttgctagatatgtgggttcccctatactcggtggtaaaaagaatgtcatttgggtgcccaaagctttggtctctaacctccaaggacccaaacaagtttgggtacctaaaagagcttgatcttcttttgtaggtgaactaccgtaccggtggaagccattgggtgcttgatagtggatgcactcaacacatgaccggtgatagggcaatgttcaccacatttgaaggagggaatgaacaagacaaagtgacttttggagacaatagcaaacaaaaggtaattgggttaggtaaaactgctatctccaatgatttgtcaattgataatgtctctcttgttaaatctctaaatttcaatttgctttcggttgctcaaatttgtgatcttggcttgtcatgtgctttcttcccgcaagaggttattgtttctagccttcttgacaagtcttgtgtgttcaagggttttagatatggaaatctttatttggttgatttcaattctagtgaagcaaatttgaaaacttgtttagttgcaaaaacttcattgggttggctttggcataggaggctagcctatgttggcatgaatcaattgagtaaactttcaaaacgtgatttagttgtgggcttgaaagatgtaaagtttgagaaagataagctttgtagtgcttgtcaagccggcaagcaagttgcatcttctcatcctactaagagtatcatgtccacatctagaccattggagctcttgcatatggatttgtttggcccaacaacctataagagtattggtggtaatagtcattgtcttgtgattgttgatgattattctcgctatacttgggtgttctttttgcatgacaagtctattgttgccgagcttttcaaaaagtttgcaaaaagggcccaaaatgaatttaattgcacccttgtgaaaattagaagtgccaatggttccaagtttaagaatacaaatatcgaggactattgtgatgatcttggtattaaacatgaactttccgctacctactcacctcaacaaaatggtgtagtggagaggaaaaatcgtacattaattgagatggcaaggactatgcttgatgaatatggtgtttccgattccttttgggcggaagccataaacaccgcttgccatgcaaccaataggctttatttgcatcatctcttgaaaaagacttcctatgagctaattgttgggatgaagcctaatgttgtctattttcgagtttttggttgcaagtgttatatttactgaaagggtgttagactaaccaaatttgaaagtcagtgtgatgaagggtttcttctaggttatgcctcaaatagcaaggcataccgggtctacaataagaacaaaggtattgtggaagaaaccgccgatgttcaatttgatgaaactaatggctcccaagaggggcacaagaatttggatgatgtaggtgatgaaggcttgatgagagctatgaagaacatgtctattggagatgtcaagcctattgaagtggaagacaagccatccacctccactcaagatgagccatctacttccgctacgccaagtcaagctcaagttgaagtggaggaggagaagagacaagatccacctatgccaccaaggatacacattgctctttccaaggatcacccaattgaccaagtgttgggtgacattagtaagggtgttcaaactcgatctcgtgtcgcttcgatttgtaaacattactcgtttgtttcttgtcttgagccaaaacatgtagatgaagctttttgtgatccggattggatgaatgctatgcatgaagagctcaacaactttgcaagaaacaaggtgtggactttggttgaaagacctagagaccacaatgtcatagggacaaagtgggtctttaggaacaaacaagatgagaacgggttggtagtgagaaacaaggcaaggttggtgacacaaggtttcacacaagttgaaggtttggactttgggaaacttttgcccccgcggcaagacttgaggctattcgcatccttcttgcatttgcatcatgctttgatataaaactatttcaaatagatgtgaaaagtgcttttctaaatggtgaaattgccgaacttgtcttttattgaacaacctcccggttttgaagatcctaaaaatcctaaccatgattttctattgtcaaaggattttaaaaattggaaaagttgacaccactcttttcacaaaaatcattggtgatgatttctttgtgtgtcaaatttatgttgatgacatcatattcggtctactaatgaggtattttgcaaggaatttggtgatatgatgtctagggaatttgagatgtccatgattggagagttgagcttcttccttggacttcaaatcaagcaactcaaggatgggacgttcgtgagccaaaccaagtacatcaaggatctactcaagaggtttggcttggaggatgcaaagcccatcaagacacctatggcaaccaacgggcatttcgaccttgatgagggaggtaaactggtagatttaaagctttatcgtactatgattggtagcttgctttaccttaccgcatctaggccggatatcatgtttagtgtttgcatgtgtgcacggtttcaagccgctcctaaggagtgtcacttagtggccgtgaaaaggattctaagatatttaaagcattcctcaactattggcttgtggtacccaaaaggtgctaaatttaagcttgttggctattccaactcggattatgccgttgcaaagtggatagaaagagcacatccggtagttgccaaatgcttggtagatcccttgtgtcatggttatccaagaaacaaaactccgtagctctctctaccgccgagacggaatatgtttcggcgggtagttgttgtgcccaattgctttggatgaaacaaacattgttggactatggcatatccttcaccaaaaccccactcctatgtgacaatgatagtgccataaagatagccaataacccggtccaacattctagaaccaagcatattgacatacgccatcacttcctaagagaccatgttgccgagtgtgacatagtcattagccacataagaaccgaggatcaactagccaacatctttaccaagcctcttgatgaaacccgcttttacaaattgagaaatgagttaaatgtcatagatttctctaatgtggcttgagatggtgcaccatggttgtttcttttgtattatgtatttttgctctcatttgctcttatgctttggatttgttgccatttggttcttcattgtgaaaatggagcatgtcacattaagggggtgttttgcactcttgcatgtgctctacttccctttatatgtgagcaaatcaactagttatgctagtagtattttcaaaatgcccaagttaacataagtcaaaacttttgcaaaatcaatgtaatttgaaaactatatcttggaaaatgtttcaaaaggttccctttatgttttccaagcctcacattgcaagaaaaatgatttttgaatgaaaatggcattttggccctcttttgaagaatctagattcttagttttggccaaaatgagatttatctccaaaataagattaagaaggaattagagaaaagtttcaaaataaagttggtagagaagaagatttgaaatgtttttggtattcaaacctatttcaaaaaccaaatcattcaaaagttatttgaaaatcaaattcgccccaaaacccctatagaccataaaaggtcacctcctagcactcaagtgagttttgttgcaaattttcataattttcaaatgttatgaatggttagcaatatttcaactcacacatttcaaaattgctccaaaaatcaaatttttttgttgatttttattgagtaggggtagccgaactgtgcaagggctgtgcacagtcggctgggggcctagcggtctgaccggccaggtgcggcggtctgacaggccacatagggccggtctgaccgactggtaggtgggcctaggacttttgtcctttttcttctcccttcttcccctacccaacccaatctcctcccattcagccatcttcttccccaactcgaaaaaactcctcctctctcctctcccaaaccctagccacctccctccatcaaatccattcggtttgaccgcggatttctctccggttacaccgtaagtgactctcctctgcttcctctctctattccatggattagtttgtgtttttgttgagtttttgatccatggcatagaaccctaggtgaagcacgaggtgttcttcgatttgcaccaatagagggtagtttcttggtgtgattcaactcctccaaccggtaaatcactctccctcttgtgcattctctcaaatcgatctatttcaccctagggctatgggtagttgttccaatcttgatgaaataggttcaaccctttgatgttcatgttccaatcttgtgccatattgttctagcaaattttagactcaaatgtgtagatgtgaaaatttttggatgcttgaacttgtgggaggaggtctgcccggagccacaggcggtctgaccgtgggtcaaccgccggtttgaccggcgtgtgcgcccggtctgaccggccggcagccgtcggtctgaccggcctgatgccgtcggtctgaccgccctactggctgtggtctaaccacccctccacaggatataggcaaattttcacctctccaaattgtttctataattattgctaatatctatcatcctttgctctttgacagtgatgcctccccgcactcgccatggtcgtcgtgtacccactccggatcccgtgagtgagcctaaggaatcgagcggagatgagtacgctcaaagtgatgaagaggttgaggcccatgttgaaggggctagtgagaaggcaagtggagatgatgttagtggaagtggagaggatgaggacgaaggaagtgatgatatgcacattgatccctccatccagtttgttgtgaacatgaggaatccatcgtagtataccatcttgaggcaccatgttcagtttttgaggcctcgggacaccccggatccccgttttcacaccactttccagaagagtgtgtatgagcaggtttatgtagggaaagcttttacagagcataagtggatttcttagagagatatcaatgagacttcagagtttgagggcttacaggatctcttcaagactgttggcattgaccggattgtgactctcaaacaagactacaatgaagatttgatccggcagttctatgctacagagtgggtggctagagactatagtgagatgaagtggatgtccgacacccttcagtgttctatctccaggaggcaattccggcggctcctcaatattcgcttggactttggagatgacttgcatgaggagcacacccataatccgctctccatagactatctctctcagttttatgaagatggagtgcggtacacacacgggaaggttgccggcctgaggactatccgcagtgtggttaataggattgtgagagctactatcctccctcgccttggtaacaatgatgatattagggggtggcttggtatgtcatcgatgcaaccattcagggctgtcagttcgacattgtgtctctcatgatgcaagagattgccatctccaaggggaccttcactcagggaatctattatgccccttacatcatgaggttgattcaagacaagcttggggctgttgggcaaaatttgaagaagcacaagcagtacaagccccaccttcagcttggagctccccgtgctcctagggcggtgccctcctctcatcctggagctagctcaagctcagcacctcctcctcctcctgggtatgatccaaatgctttcttccatccacaatatgcttattttggaatgcaacccaacgagtacttcaacccggtacttggggatattaataccctaagtgaaagcattcaacgcttgtctaccgggcatgaaactttgcatgacgatattcgtggcttgcgcacggatgttggagacttgaatgcttccatgggccgattgcacactagagtgggtacattggattcttgagtccaaatgttggagagctcccaagcatttgtgtatcatcgtcgtcatgatgctcctcatccttccacttcggcgcgtcctccttctcctccacaagagtgaagatctttttggtgcttgatgccaaaagggggagaaaagtgtgctatatgttttgtgggttgggactagtagtagtaaggatagtgccctcatatctaataggctaaggtactttacgctatattttgtatgggtatgggatatttctctatattgtgtgttctttgtcgttttgttaaactctatgtcatttggacccttcgtggtcttgtaatagcctatgtttatttgtgagcccttttaggatgatttgtgacttttgtgatttgaatggttaagtgatgtgaacttgtgcgatgatggatggtgtatgcgatattgatatatatgtgactatcttatgcttatggatgaatatttcttgaagttcacattgagttattgcttatgtgtttgtgcttgttggaatatgaaattgaaatgtgcatcggctccatatttgtgtctatgattgatatgcacatgtttaggggaagcttttgatttccattgcaatatatatccatgtgttctatgtttgatcatacatatatttgtggtgtttgtcatcaattaccaaaaagggggagattgaagcatctaggcccccgttgttaattttggtaattaatgacaagcactaattatggactaaccattgtctttgagctatatattttaagttaggaccaagtcatatgtgtgcatggatgattattgatggattaaaattgacggcgcaaaagctagtgcttttatttagaattgatcgaggtgtagggcgatcaaatttgctagtttatttgttagtttcgccgtactatcaggggggtaatgacctagcaaagagatgattttaatttccacattaggtcattatgcatttaaatttgtgctcacactatcacaacacacacttgctatatatattggtctctgtttcactgggttcggcctgaacaggggcagccagaccggccacactggcagtctgaccggcgtgccctggccggtcgcaccggcgccacaacggcggtctgaccggcgcataaggccggtctgactggcggcacatgcgcggtcagaccggccccctggaggctgggatggtgctactcggggtggccgatacaaagccgacggagctgtattcattcagaccgagccgacggcggtctgatcgagccgaggccggtctgaccgcccactcaacgccggtctgaccggccaggccgatggggccctctgacagcactacaacgcctagttttctagccgttgcagagtagcacggtctgaccggccacatacctccggtcagaccggcagagcacaaagttgggggatttcgcccccaacggctagttttggttggtgggagtataaatactccccctccagcagcaagggggctctcttggcacctaattcaattgcatacaccccttgcacctctctcacacccacttgagctttgtgttcatccatctagtgtgttagagggttgattagccaagagtcaagtgcattgcttccatttgtagagctagtgtggcacttgattgatcatctccacgccgggtcattgcttgttactcttggaggttgctagctcctagacagcttgtggaggagttgcccggtgatctctccgagaagattgtggaggaggcccggcgccggtttgtaagtgatttggagttcaccaccttcggagtgaaggaagaactaccctagtgatcgaggcttgggtagtcctctccgtgggctggctcccgctttgcccaccccttgacgaagggggcgtgcggtggcttcgtggttgagcggtagagtttggctcgcctcaacggggagtaggaaaccggcgagtttccgaacctcggtgaaaaatctctcgtctccttgtctcatttgattgtcgcatttatatttgtgaaatttacatttctagagacatacttgagatcatatcaccctaggattgctaaactttgacataggagtgtgatttactttcctagaggtataattgagtcactatcaccctaggtttgcaaaacataacttagttgcttagttagagttgaccctcaccaagcctagcaacttaggttagttttgattaggtgtcatt

SEQ ID NO: 20759 - DNA, 4959 bp, Oryza sativa
taaccttaaaatcttaatcattcagcttcaaattgagtgcaatttgcattattcttacttgtattcttcgttgattcacatgtagggattagccttctcggcgaggtcaatcgggtttcggcacgattgataaccaaaagagacatggtgattgcagggttcgaattgcaagtttctgccaaatcgatagttattaatacatataggaagatttggacctagttcttcatcagagatcaaaacaaaactcaagaatatataaggatcaagctagcgaatatcggagacgttaatgaaattttagagggcacgtagggaattttctgaaaaataaacatcttcctccacttgatcctcattgatacatatacatcatgaaaatgatgttaaaaaatttacaacatttgcatgggggaagaaaagataaaccccaaaaaaaaaaggtgtaaatctttcactaacaaacatacgatgggttttcaattgattggcaataacctcattttattaacctgtacaactgaatttctcagggtatgtcaaaatcatctctgcttttttaagcaaatgaaaagatgaaatttgtcctctgcatcgtacgcacaagactgcaatgcacacgtctcgcgtatgaccattttgtgttgtgtttcaaagaaaatatataaagggatttgaaagaagataccagtcacactcgcaagggtgacatatatgatatatccgctatttgtgaatcagaataattaggccctgctttgattcaggttatttaaaaaaatattatcatggattttctactataaattaattattttaataattaaattcaataaatagcttgaaacaagttttctttaaattcaataaatagcttgaaacaagttttcttaatgatattgtggaaggatgtgtttcaagaaaatatatttttctaaacatatagtaaataatccgtttcaataattcggtgattaataatccatttcaaatagtgaaaatatatagtgcaaaccacgtatgtaatgtaaacctggaaactatagttggatctaacaatggacgcctgagatttatccatatcactttgagtataaattttatttgcagattcaatcatgaatagaaattttgttaggaataaaaagtttactcttaatggcgtggataaatcttaggcgttcatttttagatccaacgatagcttttaggttccattatatatgtggtttgcactctatatttttccaaagaaaaaagctaaggagagagaagacaaagcatagccagtaacttgggcagtttacagaattactacacatttgaacacatgtggacgacaggcatatatatagggagtcaaactagatttttattttattttttgagaaatttgccatgtgcaagttgacatgataattactatttgagacaagctaaggcccctgctggaatatctggggaactacaaccaactgtgttctggaagcaaaggtacatgccagccctaatatattaattaatgctaatccctggttaactttgttgtttttttgaaagatctggttaactgtaggttattaagccccagttgacaatttggtcctaaatggcaattctagctccagcaaccttgacagcacagcatgcacatgcatatatatttacatataaaatatatgttgttgtcactgaattaatggttgaaatgatcagacattcatacctttgccaagctaaggaagagaaaattaagaaataagaaacgcgtgatagaacgtacagtacgagtcactgtcttcagatgagatgacaccagtgggccgctaaaaatggtgaagatgctgataaaagccattgctttaattaggaccttgacctgccaaaaaaaagagagagaaagaaatcagtagtattttctttgatcactggtgatattttatttttgatattgtaaatccatttcaattttgtcatgtgtataaactatatatgcagaaagcactgaacaggtaaattcgtgagtgaattaatagatagtatatattaagatggatgaattaattatttagtttttcgtatatatatagagcataacctacaagatgtgtaagcctgcttgatgcaaactttaggttaaaacacaatgacatgtttttttttcatctcggtctaataagcatcaatatatatataatttagagcacatatatatcgtcttcttcatgtgaccatctgaaattggcagtgtgtctcacctctgttcagttttctgtacggctattttggattgctaccaaaacgtgccctactgattctttagcaacttaaataatagtgtatatggaccattttggtttgatgtcttactaaaattttgatagtgctaaaacttgaacaaagtttggtaggataggatacgttagatgtttatttgaatataagccaaagagcatacctataagaaacacctgtataagagacaagtttcagggaaattctataatgttggtaaggtaatatttggagagatatctatactgtgctctctaatagactattattctactactagcattattcatgatatctaccgatgatttactatatgtagaaaaaaaactattctacaattaattttggtttccttgtataagtagatatgattcattggattaaaagaaataaatggtctagatttgttttgctgtcaataaagagcactgcaaaacacctctaattggagatattttggtttgctaccctaccaaaaaaaaaattgatttcgaatgaagccaaatcattagtaatgacatgcatgctccattggcaacaatctaggattgtctttcattacatcaagtttactgatagcaaaccaaacatacacctctacctttgaagaattggcagtatcaaattttacctagattttaacattattgaagaattagtagtgcctagagaaccaacacgaccctacattgctagctgcaggtacaacatcaaacagtagggcaaaaaacagagcaacggacatcacaaacctccaggtgggccaatgcaaaacacacacagagagagagagagagattgactgatgtgtttatagaggggagcacacctgctatctacttggattttttccccataacttaatagatgtgaacttttaaattcagacaaatgttgcttcttcttcttctaatcatttttaaattttgaccaggctggttctttactcaaggcatagattttaccatattattaccatgttacagatgtggaagatgcagtgtttaccagtggccagtgcttggataatttaatataggtgcatgcatggaactgtcaaaattttggtacaggtaaatgcatggtgtttgggtaaaatggatcttactgaaattcatacttttacataagggccgtattgaaggcaatgaaccagatttgcctattcttgcagaaatattagctcatatttggaactggacagagcatatattgcatgcatgtagtactgtacatgtataaccagttgcattttgctgatatctacagctagccaaattcctccccccacaaaaaaaagggtcgctgtgcctctacactcctgcactacagttgacagaggcaggtcaggatgaaagagaaagaaagggatttttggagagagaaagcacagcctaaattctttcttagggcatatgggatgaaaaaaggtgagaggagatgtagcatcctaagcacacgagctcaatcccacagcttttactactccgacattttcctccacaatatacaatatatatcatctaatatattatatatatgtatgttgtattttcttcgtagtgtagatgcaaaaggcattaagtgtttgcttttgactcatttttggtccttttatgtatgtcgttttcgcgtggctgccctcaaccaactttggcctctcatcttatccggaaatcagaaccctaaccgaataaatcccctttatatgtatttacacttaccaccttttttttccgaaataattctctcgctttctccgcgtatgtgtacagatactagctatacctactagttctactactaccctcctcccccttcttcttctctctcatcaatcaccaaggccctttaagaccagtacctaaccccagacaacacatgaaaccggttccattccttccaattcatccatccctccctaatgtctcccttcttctcttgagatagagagagaaactagagagagaaagtgtagagagagagtatacaaaggttagtagtagtaccctagtacaagtactcaaaagattgtggatgtggttgtagaagcttgtacacacaaaagagaggaatttgagggagagagagtgagagagaagcctagctagctagcaagcacacaccacacacatctccaaattaagcacaagaggaaacaacacacaagccacctcgatctctctccttcctctcgatcccaagaagcccaaggaagcttcctatacgtttagtggttagcgcgctcgctcgccgccgcgccgcggcgaaggagggacgacgacggacatggcgtcggcgacgtcgacgacgcccgacctgtcgctgcacatcagcctgccgagcggtggcgcggcggtggggacgacggcgccgccggggctggggaacggcggtgcggttggtggtgccggcggcggcaaggcggcgggtggtggtgacccgtggcggaggctggatggctccacagcgtcgacggagctgtcgctgtcgacgccgcagcagcagcaggagggcagtacatcggcggccgatgtgctgccgtggcggctgcggcagccgacggcggcggcggcgtccgtgccggtgacactgccgacgataccgatggatggttcggcggcggcggcgcgcgcgccgatccgtggggtgcctgtgtatagc

SEQ ID NO: 20760 - DNA, 641 bp, Oryza sativa
cctcctcccccaccagcagctctggaccagacgacgtcgtcgctgcctgtcgccgtccgcgtaccaccggatgctctccagcacggggcgcctccacggcgtgctcgccgacaccctccgcggctacgccggcgccgctgcggtggcgggctccatcggctacggctccgcggccgccgccgccgccgccatgggcggctacggcggcgccggcgccggcggcgggttcgcctcctcccgcttcatgccgcgcctcctcccggcgtcccgccgcagcatgcgcgccccgcggatgcggtggacgagctccctccacgcccgcttcgtccacgccgtcgagcttctcggcggccacgagcgtgaggccccatctaaacatggatcatttcatgcgaaaatcagctcaaaaaatctcatctcgcgctctaatttgatgcaggagcgacgcccaaatcggtgctagagctgatggacgtcaaggatctgaccctagctcatgtgaagagccatctgcaggtgatgatgatgatgatgagatcgatgccctacctatcaacaacaccaacaacttctcctcctccttggaaatttccatatcatatcaccacatcgccatggccatgatcgagctaagctactac

SEQ ID NO: 20761 - DNA, 2486 bp, Oryza sativa
gctccatgtgatgaagcgtcaacgacggtatatggacccatcaatttgctttgaagttttccatgtccgaaaagcttcacccgtgagttgaacagcaacaccttctcccttgctttgaactccttgtgcttgattcgtttatcatgccatcttttggttttgtccttatatatcttggcattgtggtaggccttgtccctccattcctccagctcagagagctgcatcttcctgtgctgtccgaatccctttatgtccatgttccaagtccggatagcctagtgcgccctgtgttccaactctactgaaaggtggacaagtcttcccgtagacaagttggtacggtgacatgccgatgggcgtcttataagcagtcctatatgcccaaagtgcatcaggtagtttgttcttccatgccttccccatctcattgacagttttctgcagaatattcttgatttgtttattgcttgtttctgcctgtccacttgtctgaggatgatacggagtggcaatgttgtgctgatccccaagttcttgcaaaaagtttcggaaggtcttatcgatgaaatgagaccctccgtcacttatcaccattcgcggagttccaaaacgagggaagataatctcggggaacatccggtgggcttgcttggcattgcctcaacccacttggacacatagtcaacggccaccaggatatacttgcagtcataggactctgggaaaggtcccatgaagtcgatgccccatacatcaaatagctcgacttgaaggttgtatgtcagtggcatcgcatctcgagcagtgatccctccatgcttctggcaacttgtgcatctccgaacaaattcctttgtgtcatcatacattgatggccaaaagaatccactctactagatctttgcgtgtgtcctgaatgctccatagtgacctccatatggggcaggatgacacttctcaatgatcttcatgccttcatctaccggaacacatcttcgtagtagaccgtctgaacagactctgtataggtaaggtgcatcccacaagtgcctgcggctctcgtagatcaacctcttcttattttctcccattggcacatgccccgcaaccatgaagttgacaatggttgcatgctacgggtcagagctatgactttcagcagcatgtcgtcacgcagataatcatttattggtagctccttcatgttagtgatttgcatatacgacaaatgatctgcaatagaattctctactcccttttatctttaatttctatgtcaaattcttggagtagaagaatccacctaattagtcgaggttttgcatcttttttagtgagcaggtattttagtgcagcatgatcagtataaactattaccttagctcccactaaataagacttgaatttatcaatggcaaacaccacggccaggagctctttttcagttgtggcataattaagctgagctccagtcaaagttttactagcatatgcgatagcttggtgttttctatccttagtttgcccaaggacagctcccatagcaaaatcactagcatcgcacatgatttcaattggcagcgatcaatcagggggttgaataattggtgctgagatgagcgattccttaaggattttaaaggactttaaacactcatcatcaaagtcaaatggaacatccttatctagcaaggcaattagggatctagcgatttttgagaaatcctttacgaagcgcctgtagaaccccgcatgacccacgaagctttggactcccttgatatattgacaggaggtggaagctgtcgaattacttcgatttttgctctgtccacctcaactccccgttcggagatttgatgtcccagacatttttcttcactattccttcacgaaccatgaatgtggcatttttcccaattaagtatcagtccttttcttgacatctttctaagaccctatcaaagttctccaaacaatgatcgaaagatttaccatagactgaaaaatcgtccatgaagacttccatgatatcctcgatcgtgtcagagaaaatagatgtaatgcatctttgaaatgacgcgggtgcattacacagcccaaacgacattcttcggtatgcatacgttccgcatgggcacgtgaacgtggtcttactttgatttggtgataaccagaatacccatcaaggaaacaaaagaaggaatggtttgctagccgctcaagcatttcatcaatgaaaggcagcggaaagtgatccttcattgtagccttgttgagtttcctatagtcaatgcacattctccatcccgtgacggttcattatgggatcaactcgttgttcgagttttcaacaaccgtcatgcctcccttcttaggcactacttgaacagggctaacccactcactatatggcatgggatagataatcccgacatgtaggagtttcaagacttcctttttgacgacctccttcatcacat

SEQ ID NO: 20762 - DNA, 2050 bp, Oryza sativa
agagtttgtggaaattcagaaggttttgactgttggttccaacggtctgtcccctaagcaatcgaatgcaaaggttgtagacataatattggcaccaacagagggattatacagagcacggactaaattacctccaatgagacaagtaatggttgaggcagggcatcggatctgaatcgattcagatgagagctctccttcccttaaccattcgttactcatgatgatggtcaacttcttcaccgtctctttaagcatagctttatcgagaggatcattagagttgaccttggtcggtggtctcttctcacaggaataattcgaggtgttcccataatcttcgaaaagatcttcctcaaattggaatggaatttccagagaatgaatttcttcttcctccgactccacatgcagagattcctcatggataatcttgacctctgggacagcttcacttcggccgaagaaatcgttcactaagattagatctaagagttctcttccttcggcggttgtcttgtgtgcgaacgatcctctagtggaaatatcgagattttcggcagactccttgtctaacccataccgaaaattttgcaacaacacataatcaatgttgcaacaacacataatcaggtaaagacaagtcccggaaaactcatgattttgcggaacgaacgcacccaatccactttaatatgttgaaaactcatgttttagtgctatttgaactttttcgttccgacgaaaacatcgcacccacgtgtgccaatattgacattatatgacaaaatgtcgctgagcgggtcacagagatatttttcaaaaagaatgcgcccaatccattctaatatgtcaaaaactcatgtttttatgctttttgaactttttcattctgttaacagtgaaatttgataagccccgaagtcatcatcggcttagagttagtattggtttcagagtcctggaatcggccgatgggcattatcagtcgccatttgtcagattcttgatgggttcagttaaggaaattaatctattcaaagaagcttatctagaagagaccaagtttaagaaggatgcggcatggctagttatctattaattagcaatagtctcttagtttccttttatctttaggaaagtttgtttagtgtccaataaggactttatgtttccgttttatctataggaaagttctttcgtatcctacaaggactagtatctacccatgggtataaatatgtacacccggggtcattgtaaactatctccacgatcaatacaaattcgacgcatcgtcaccctttttaattttctactttttcgacgagtttatacttgtcatggctgtttgcattggcggggcttagggcttccacactctgatcttgtcaatgtaaacacctatctatgatatatcttagttaatctactttggtagttcaatttacttgtatcggctgagattcattttagggtttttgtcggtatctactacattgctttaccagattagattagctatggtatccaccatcctgaaaatcagttaaaggcttcattgtctacatattatgtttcttttcatactttacgctgcatcagccctagtcatgcttagaaccataacctctagcctactttttgattgccaataagggtttcatcggggtttcggccgatgagttatctagacgttacatcggcttataaggattatatacaagttggatttagcctatcacaacaaaggtttcactgtttatcaaatattgtggatttaatgacatcggacctccagccgatgtatgctttaaccttcagataagtgctaactctatcatatagttagccgattggtttctacttgattatattgttgttttgttacattaccatcaaccaacgttatttacatcaagtatcagaatctacattggacatatagctgataggtcaaaaccctatcgacatcggctggaactactccatcggtttgtcaaccgatcggctctttgatctgctatttgtatatcttgtccgtagcagg

SEQ ID NO: 20763 - DNA, 2900 bp, Oryza sativa
aaaagcaaaaaaaaaaaaagcatccatgacctgccatatttgtgccattgcattgttctttttagtttttgcgttgttgaattttgtgttgcatcgtcacgtcgtgttgttggtcttagcgtctagttcgtttagagtttcgagttctggtctcgtttgtacaacagtcgtcgccacccccgtgtctcagttgtcgtcgagacctacgaaaacagaatcagctcgctgccacggttctattttcgtactttgaagaagtttctatcggttagtttttgagttcttgagttgtatagcttctgtttggtggctgtgccgtgatggagtgtgccatgatggtgggcctgtgatgttgcgcgtgaggaagaagagtgaaaggggatagtagatcggtttttggatgaagtgctacaatttgtagattggtttctatttggagggccacgcagaactactaaaaagttactgccgagtctgtttcagtttattacgtggtgcctttccaaaccgaggccgagtgggatctcttcccttccaatctcgtgaccgggacttgtgagtccgactccctcccttccctcacgactccgtttctgtctaggtgtgtcaaacactggtaaaattttcttttggtgtcggattcaatgtccatttgcaaaaaaagggaacctgtaggacgagagcattccatttttgtacaattttaattttgagtttgcacttttgcatttgtgtccctgtaatttttatatttacatttgagtccctgtaaccttacattgaggtccttgagtctgtttttgctaaaaaaatataaaaaaaagaaaagaaaaaaagccgcaccaaaaaataaagaaaagaaaaggagggaaaaaaaagagaagaaagaagaaggaaagaaaagagaaatactgttgtgtttgagctgaacttcatatatcagagttgtgcatgagttgttcctagtgctatcttgtggtatcgtttgtgtctaggctcatgtctctagtactttctagcctaggaccagcacggtactggactttgaacgatcattcaactttgcattatctgatttgagcatttgctatccctttgctacatatttaagcctgccaagagctccacagatctgattgcaaccgtacagcaagcgtttggccaaggcatcgatacatccaacctccattggggtgcttgattgagtcagtgtatgtcaccattccgcttgctttggtaagaacttgtaagagcttggttaaaagcttgagtgtgtgtgatatttgagctgccactacctagtagttgataggagcgtgcatattcctgtgtgtgtttcttgtttgctactatccatggcaggattgtgcaagggaatacgagaacattggcttcttcaccgtctacaagatatgacaacgtctccatgtgatgcatatgaggtacatgactataattttgcgcgagttgaacctaagttaccattttaggatggtaagtatgattctgttgcatatattgattgggaactagcagtagataatgaatttgacaaatatgatttttctgaagctcaaatgattaaggctgctagtaataagtttacctcttttgcattattttggtggagttatgttagtaatcaacctgaaacttgggatgaattcaaaaccatgatgagaaaacgctttgtgacatcttattacaaatgtactcttcgggagaaattagaacatctgaaacaaggtgatagaactgttagagagtacattcatgaatttaaggtctgtatcatctagggtctcaaagagtgcaatgaaaatacaacgcgtagatttttcaatgggcttaattctgaaattcaggttttgcttgataatgtgacatataatcatattgcgtacctattcatgcttgctcgtagcattgagagtcagatcatatcaaatgcgaggaagcatgaacaatgtgatttatctcccatttctgaatctcctatatccttatgcaatgatgatgtgcaaaaattggaggagcaatattttgtctctcctgttactaacgttttgcagggagttcagaacattcaacaaaaggaggagaatggtgtacttgagaagaaaggggatgaagcacctgcggtttcagaagaaagtttgcaaggtaaattaaatggtactgagataaatgaatgtgagtattctcaagctgagctacacatgtccacttttcatgctatagtagagcaaccattagtggaaccaattgctgagatgcctttgtcacaagttgattaacttgctgttccttgtgataaagaagagttgtgtgataatgcttcacttatatccatgccacaactagtgaatgaacatgctatttctagtgtttatttgtgtgctgattttaagcatgttgttcacattgcaaatgaagtagaggaacatgaattgctatcttcattaaatactttgggctatgtttggtttgatgatttttgtgagctcgaaaatttgaaggagaaattatttgctaaatctgatttgccatgtccaactaatgctatttctcatatctttggcgaatataatgatagaggaatatatttggggcatagagtttacatatgttcgtatttagaaccttctgtacatgtggataaaacaagcaaactagagagaaatgttactgctaacaaaattatctcgagtttggcttgttttgattggaagaaacaggttgttttaaatggactacgtgaaaagcaccatatggaaaaaccggggacggttttccataaagatggggaggatgatgtgaccatggctactacggatacaaccattactcacatcatggatgaacaagcagatatgaagatcaagtcctccaagtgctgg

SEQ ID NO: 20764 - DNA, 4194 bp, Oryza sativa
  unsure (1)..(4194): unsure at all n locations
ttcataatcctgataaattcattttagagagaacagcaaattggtcctgtgagtttcccccctgggggtcactttgttttttagcattcaaattggcataaagcgccaaatgggcaaagccaacgaagaaaatggctactattggtgaaaaaatacaacacaatgaaagaaaaagggaagagaattgattggatcatcccattatgcccttgtatctttgtgggccattgcagtgggcgcccgatatgatattatattagtgtcataaggtttgccatctgttgagttggttttacacgcatggtgttttacctctcaaggatcattttgaactaatggacaaatgggcaaactttgagggctctgatgaaatcaattatcaaaggctagttattctggagtcatacttgagggaccaaattggatattatgtttcctttanggagaaagaagttagattggcaaaatgatcatttctgttctttcaaacacaaaaaaagaaaagatattcatgaacacttcaatcttcctctcagtaggaactgattttttattttcttaaggtcacatggcaaatggttacagaatggcaaccttctatgccaaaagttggcattggtagtgtgaaagaggatgaaatttttgccttttaaattattgcaaatcattgagggtggaacactgaggcagcctcttattaagtatttgagctaactcattctgtggatatggcttttattagtttatataaaacttacagtaagacatgtactagtagagaatcagtatgacgcatatctgttgttccttttttctttagatagtccttcactttcagttattgagaaaagcaaagctagttctgttatgatttgacagtttgtgctggcaaaattaataagtggccctgatgttagttagtagtattgaagctttcatttgttttgctattatgttagcagatattaataccggcaaggtgcaactgtaaagttatcatacaatggaaatatatttttgtccttccattgctgcagctatcatttctttaggattaaatttcagaaaactgcaattatttggtcgagactatcactttgctacaactttaaccggctattttataaattgcaactttagcagtggattttatcaaataactgcaattttcccatatgtgtatgacatgtgggcccaacttattactacatgaatatttcatttgtgtatggaagacatataaagttgtagctttctgataaaattatacactattgttgcaattctctgaaatgcgcagttaaagttgtagcaaatgatatgtgctttgctgtaatttactttcttttaggaagttttgtttttgcatttacatgaatatgtttcttgcctttttattgcaggagttgattgagaaacttagcaagggtgagctaccaaaagatgagtatcactatttgaatgaccctagtcctagtttccggggaattccaagtgcatctacccaaacaagcccagctcaccagccagctcaatccatgagatctaaaggacaggtggcacatgggccaggcctcgagactctgatgatgggtattcaaggtttgtgacctcatacccccatttctactattataaaaattgaagatgtttttgtcggtattttggtacgtcatccgtgtatgagtctgtttttaaattcgtttgcttttggaaatacatatccgtatttgagtcggtttttaagatcgttcacttttgctaatacagaaggaatcatataagaaatctgtttaaaaaaactcacatgctaacttgagacgatcggactcctaactgccgctcataattttctaaaaaaatatatatccaagcgaactcccacagtaaatttcatcttaaccatataacagtaataagattaaaatagatttcacccgttgcaacgcacggacatttttctagtctatttaaaaatttgagttcataaaatattgcccaagctgccgcacaattaccactggtcactatcaatttcggatttagttttatatgtcaaatatcaatgcaattaatgcaattactgcttagttgtcttattgagtagttctttacctttaagaaagctgtattttggccatgaaactgtcacatttgctgcaaattcctttcgcttttgtatgaactttttatgaaccttttgtgtggatcgtgaaagctcctccatttagaccacgtgcattttacaataagctatcgcatattatagtcatggaagtgcatttgcaataatgggttatgataataatgataataccacttttctcatgactaataagccttttgcagtgactcggtactgaagcacacatcaagtaatagcagaaagttgggtcagcgattatttgtttttgttattggtggtgctactcgatctgaggtatcttctcaagcatctgaatttcctttcttctttcacctgtaatgctttctgattcgaatatggtgtaaaactaagaaaggatctaattctcacattctcaatctgtaccattatatgccaatggctattacagttatgtgctgctcacaagctatcatcaaaactgaagagagaaattatccttggctcctctagtcttgatgatccaccccagttcatcactgtaagtttcttgttcatgtctcctctccaatatgcttgttgtaccaagaacttgttaacatgttattatttgcagaaattaaaaatgttatcaaccgatgatttgacacttgacgatctacagatataacaatatacaaaggcctctttcttgactttctcttttataatcatttgctgatcttttttctattatagaactctatgagtgcgcatataacgttgtgtcgaaaagtttacacaggttcccattaaactacaggcttacagcctagtgtgcctataatatagcagtgtgccagaaactgtattatgagattggtggacaatatgttcgttatcgtgtacttcactaatttctttcttcttttggacgcgaataattattctgaattggttttactagtaaaagttgtgatgaagtggtgagcaaaggttgctacttcctttgtttcacatggatctatgtatttgttccatacatatgtccaaatttatattgatgttagtgaatctggatgagtaatgaaggggctaggagtctatggaaaagacgagcgaggaagagctcgtagtccccgactccatggacgcggccggtgaggaagtgctcgtggtcaccaactccatggatgatgaggtccgcgaggaggtgcacgtgaccgttgactatatagacgatgaggccagcgaggaagggcatgtggttgtcgtggccggcgaggtggccggcgaggaagtgcacgtggttgccgactctatggacgtcgcggccggcaaggaagtgcacggagttgctgaccccatggacgacgaggccggagaggaagtgctcgtggtcgccggctccatggacgaaaatgaggagtgtcctggcaccggcgacaccaacattgaggtggttgaagttgaacaaaaaaagttgcattctgatcactaattgatgagattaaaacagaagagattctaccttttttattttgcaaaagaggagtgtgtcgccgctggtgctggtgacaacaacgatgaggagattgaagaacaggacttgcataagcaaaaggtgcattgttgaagcttcttctacctacttattttccaaaagaaaagaaatgaatcgacttacatattcatgcatgtcatagattctaattgctctattgttctgaatttttgaaaaactaattttacaaatagatccctagaaaaacttatcctagaaatagtcctttttggggcgtcagagtctctggcgccgtcccctgcatcatagagtatattgcatcttgagccaccttttcttaccaatgttgcaacttagacagggtaaattaatcttttcactttgggccgggtatatttacaaaatgtttcaatttgagctctcttcttcctccagctccatttctcccatctctgctgcgtacggctcaaaatctcttctcaatcaggagcagcgcacgcagaagattagtgcaagccatcccagcgcagccgcccatcaaagctgagctcaagctcaagtgtag

SEQ ID NO: 20765 - DNA, 1992 bp, Oryza sativa
agaaacaagacccaaagtgaaaagtttggtttacacctagtcaagttgtaactacggtaataaagacaggcccaagatgcaatttactctaatatctctgtattcctataaaccctttagttttttaaactagtactgcttagttagggtttgttgagttttttttttttggttacattcgagtgtcattccttaatataggcagaactttcttatacggacttggaatcaggtaaattatatatccatggacatctacagaaaaagctacatccaattctccccatcttcgcttggttcagtgaatttagaatctccaaattccgtttgcaagattatgttttagagacaagaagcttttcaatatagctttgaaaaattctacgtcacatattttgtccgtttgagcttaaattttatattgttggttcttgtgtgctctttaagtgtgaaaaaatataaaaaaacaaaaataaaaaagttacacatctctcctctatactagagaggaaggaagaaagtggtgtgtgggaagaggggctggcaccaacatcattggcatgctccctttgccacgtcagcgttggcccgccatgatggcaaggggatggtgccagagatgctggcgccgtcccattagaccacggcgccagcgactttggcgtctcaaaaaagaccatttctgaaataagtttacctcttgcttgtgaatcatattccataggaccaaataaaataactttacatgctcctcactgatgttcctttcctatcaaagccatatgtcgagcttaaagataaaaccttatacatatgctccttgctatcattttgagttttctcaaatggttgtgacccttgttagattcttttcatattctcattatccaaatcttgtgcacttaaataccaaatatattgctctccctctgcactagaggattagtaaaatattccacccacccaccatatggtatgcttctatgctggaagtcagcatccaccctatccatccaccaaataaagactccatacatatagtctctgatgaaccctgagttccactcaagaaactcaaggctaggattggtctgatctttcgatgagttgtagatattttattacgcctacaaagatgtttccaatcagaaaaatcatttttaattagaactctagtagcacacataaccatatgtttctcagacaagtcatgcttttgaaattctctatcaaccgctagctcccaaataatgtaagcatgaggatcataatttccctcgaaataaggcagtgcggatttgatcttacctagaacatcgccacttacctcataatggtcatgttgatcactcctcatgtctcgacgaagatgtcgatgttgagcacagttatccccaattatcttgcgtatctctgccattgttagtagaaaacaagaaacatacacaaaatatgcatgttcctattaactactaggtagtggaggctccaatgtgacacgcactcaagcctttaaccaagctcttacaagttcttaccaatgcaagctggatggtgacgtacaccgactcaaccaaacaccccaattgaggttggatatatcgatgccttggcaaacacttgctgtacggctgcaatcaaatccgtggagttttgggtaggcttaaatatttagcatagggatagcaaatgcttaaatcagagaatgcaaagttgaatgatcgttcaaagtcaagtaccgtgctggtcctaggctagaacgtactagagacgcgagcctagatacaaatgataccacaagatagcaccagaaacaactcaaacacactctaatatatggaagcaaactcaaagatacaactgattttgctcttttccttctttcttttctttttctttcttttttttgggtgcggcttttcttttcttctcttttatgcacctttttgcctttctttctctcttttttttgatttttttaccaaaaacaaa

SEQ ID NO: 20766 - DNA, 1251 bp, Oryza sativa
ccaaaactaaccgacataaacttctggaaactagaaaaatggaaccctggcagaaagacgattctgttttcgtaagttccgatgacgacaaagacacggcggcgacgatgacatggtagtagacgtcacaagaactcaaaactctaaacggactaaacgctaagaccagcaacacgactcaacaatgcaacagaatactcaacaacaaaaattgaaaagaacaatacaatggcacaaatatggctaggtgatgggtgcaacttttttatgcctttttttgtggatataggtagataaaaactcaccgagcaacgaaacctctgataccacttgaaaaacgctgagttccactcgacactcaaggctgttattggcccgatgtttcggtgagttgaaatagctacgattcgggagaaacgttgacgatcagactacaatcacacaagatgttgcgttgcgccttagcgatcgacacacctctcagtaggttgttgatcttgccgatgcaaatcaaccttattcctacaagcaaatcaaagaaacaagcaagaacaagataaaagcaatcagaattgcaaataggaattgaatataattgataagtttgggttccgaagaacaagcagactggcggtctagccgacatgcgcgctgtaaggaagtagcaatagctaaactttaatctaacaaaactcaagaaaccctgaaggggtacctagctatttataggagtgcaaggatgaccaagggtgctctagggtcgttctccaccaggttggggcgcaccccacatgggccccacttgggccggggtgccaaacgaagttctaagcccaaaggcccacgataggtgacgctgcaccttgtttcttcatctgcggatgactgggatggaatttggcgatgaggctagatccattggaaagaggactccgagagctttcatcagtactcatgggtcaataacggaggttgtatgcagattcggcggccgttagaagtcaactgtgtagagatggccgaataggattccagcacttggaggacttgatcttgaatcttgttcatccatgatgtgattaacggttgtatccgtagtagccgtggtcacatcagtctctcctccaatggttcataacaaatgacacatgagcttaaaaaagattgagaaaaatgaaaacaatgctcaaaagggaatgagataaagcattcttgagcatgaaaaaaatgagaaaaatatatagaaaaaag

SEQ ID NO: 20767 - DNA, 3560 bp, Oryza sativa
catacggagtcagatcaagacaaactttgtatcaaaattatagagctcgatgagatctacaactttcttgttgactattttttatatgagatcatttaagggtctaaatattcattataaaaaaccatatctatttttacaaaatcttatatctacaattcaaacgacatctgatggagatgtgttccatatcaaagttgtagagctcaatgagatctaccattttgtagtttataacagttgtatttgaaaatgtttaaagtataaaacagacactacgagttttgaagatgtgaaataaaataaataacatgtccaatttatacagcaagaacttgataagtgacatggtaagtaagctctacatgtagtaaaaggtcttaggattagaaaatgaataatcatatttacatgtgggtcccttaggggaacggccatgaaaatcgattttcacatacggttgtgggaccgcctataaaattgacgatataaatgttggagacgttgacctaaattaacaagcgatatctcttccttgattaaggaaactcaatttgaggggatttttatataccagcaaatcttcattgccatattcgttcagtttcgtattccttctgtatctgtattcgataatattcgatttcatttccgtatccgggttttcgattccaattctgattccgaaaaaaacaatgaaaacgaatatgataaagctcatttccgccgttttcatccctatgtgggggtgttgttggtggtcgttaagtacaaattttaactgttaactcctgcataagaaatacaaaatatggtatcaaaccttagtggtaggagtttacaactaaccatttccactagttttggtaaatctatgtattcaggtcaattaaggagaaaatacacctgccatgcgacgaaaacacaactccggataatcggacacatttacacgtattagagggcccacgtgtcaatcaaaaccacctagaatttgtcaggaaaccccttatcaatcagcttgtgaacactggatgaactcacacgaaagtggaagaacacaagaacacgtagaacacaatactgtagacgaacagacaacagaaacagagtttttggtgctgcctgaattgcttgcagctttttggggtttttctctccttttattgtgcagaactgaaacatgcaaagcgacgccaaaaactcggatcgctacccacgactcacggcttgatcgcgtccatccccgcgtccgctcatcgcgcgcatacgcccgaaggcttaggcacaccgcgagctattctcgcttgactcctacacgcacggcttccacacgttggggctcatgcgctgacaatacacaaaacagaatccaaagcttaactaactagctaaaaacaagcatgcaagatttatcctctaacaattctccccctaaaccttgcatggctgtaaaacctcaacaaggccgatcttggaccgaagttccatgaatcgatctcgcccaagggcctttgttaaaatgtctgcaagctgctcctcagtattgatgtattcgatcttcgccctaccttcctcgacacactcccgaatgaaatgatacctagtgtcaatatgtttgctacgattgtgaaacacaagttcttgctaagcaaaattgcagactggttgtcaaccttcagtgtgatggcgctcccttcttctcccctgagctcagcaaggagaagcgccagccacacaccttggcacgcaacagtcgtcgccgcaatgtactccgcttcataggacgatagagcgacgaccttttgcttctgagactgccaggtgatcaaattatccccgagaaagaagagaactcctgttgtgctcttacggctatcaacatcgcctgcaagatcactgtcgctgtagccaacgaggcacacggcatccttcttccttcggtattgacagccatagttggtagtgccagcaatgtacctcaacacacgcttcacagctgccatgtgctcggtggtgggcttctccataaaccggctgacatatcccaccaagaacgccaaatctgaccgcgaatttaccaagtatcgcagtgatcccacgatccgcctataatcagttgcatcaacagctggtgcggcactcgacttactgagcttgaggcgtgattccatgggggtgaggctgggattggtgctgctcatcccagccatctccaatatcttctcagcgtatgcccgttggcacacagtgatgccatcttcagtctgattcacctccaatccgaggtaatatttcaacaacccgagatcgctcatctggaacgtgcccttcatctcgtccttgaactgctcgagctcggcggagtcaccaccggtgatgacgagatcatcgacgtacacgccgacgaccagccggcgtgcgcccgtggctcggaagtacacggcgtgctctgacgagctttgatggaagcctagagccagcagggacgcgtcgagcttagcataccacgcgcgcggggcctgacgaagaccgtacaacactttgttgagtcgcaacaccatgtgctccttgccggcgaccacgaacccggccggctatgtgacatagacttcctcctggagctggccgttgaggaaggcggacttgacgtccatatgatgaacggcccagctctcactcaccgcgtgtgccaacagcagtcgaacagactcgagccgcgccaccagcgcgaacacctcgtcgaagtcaatcccctgccgctgcacgtagcctttcgccacgagatacgccttgtacctggtgatgttgccagcaacgtctttcttcgtcttgaagacccatttgagtccaatcgggcactgacgcgacggcccgtcggcgagacgccaagtgttgttggcttcaatggacttgatctcctcgatcattgcatgtcgccagcactgatgttgctctgcttcatcgaatgacgccggctcttccgcagagaccatcaggagatcctcatcgaactcccgtaccgcctgtccttgtggtgttgctgggccaagcacgttgtcgatggtgcggaacctgagtggcgcatcgtcgtggtcgacgtcgaggttgtcctctagacctgatggtagagacacgaactccaccgccggtgttccagcgtgcagaggagtgcttggcgacgcctagcttggtgacgacacgaacggcgagcctggcgatggtggtgccgcagctggggaaggtggcgccgcatctgactgctgcacggtggtgtactcgatgacgaagtcggtgtcgacgcccgtttcagcctggccgtcccacctccactgagcctcctcgtcgaacacgatattgcgggagatgtgcacctgtcgcgtcacggggttgtaggcgcagtacgcctttgatcctggctcgtagcccacgaaaatcatgggtttactcctgtcatcgagttcttcacatggcccacacacccaaatgtacgaagatgatgaaccgccggcgaaccgccgttccatagctcgtatggagtttttcgccgattctcttcg

SEQ ID NO: 20768 - DNA, 3702 bp, Oryza sativa
ttgatccacatgaagcggctgtagtcatcgatgaggagaaggaagtagcggttcccactcggcgtcactggtgagatcgggccgcagagatcgccgtggaggagttgcaggggcttgctagagcgagacagcgcccgtcgtgggaacggcgcccgtcgatgcttcccggcgagacacgcctcgcaaacctgatcgacctgcgtcaacaatggcaatccacgtaccagggtctccctactcattttcttcagcacagtaaagttgatgtgcccgaaccgagcgtgccaatgccacgcgtcttcgccggcgcgcgctgtcaggcaaactggccgcgcaaggatgatgtcgagcacgtacaagcgccctgggctccgagggattcgggcgagtaggcgccgctgcttgtcgcggacgcgcatgatgccatcctcaaccaatacttggaagctggtttcgtcgagttggccgatgctgacaatgttggcggcgagccgcggcagaaagtacgtgttggcgagggtgcggtgttctccattcttgcaggcgaacaacaccatgccgcacccctcgatagggatgatcgagccatccccaagccaaacgttgccggtgatgccagtgtcgaggtcggagaaggccgctcggcaacccgccatatggtttgacacaccggagtccatgatccagctgcgctggtcgcggtctgcttcatgatctaacccagcgaacaccttcttctcgacgagctcaacgcagacgcgctgaggcgccggcgtcgcgcgtggcggtggtggcggcaacatggagcctgcggtttcgacgtagcccccagtcaggagcatgagcgtgggcttgtcgtcttgggccacatgggcctggtcttcgtgcttaggcttgctccggcactccttagcccaatggctgagcttgccgcagttacgacatttgtcatccctgcgtgccggcgaggaggtggacccatccgagccaccgccgatgcacccctttccgccgcggcgcttgttacgtccgctggaaccggcgccagagcgtttcgcctcctgctcctttttgtggtgctccagccattcttcttcggttaggtagagcttgccatcggtgttttgggaggatggcggggtctggtaatcctcggccgcctagagtctcccggtgatttcctccaacgacaaggtagatatatcgagaagagtttcaattgaaagaaccagttggctaaacctcggtcgggcgacgtgcagatacttctcgacaaccttgtcatcgggctcgggatcaccgtgggtggcgagttggttgacgacactagtaagccacatggcgaactcctccaccgactcgccgtcccggaatgcgatcctctcgtactccgtacgcacccgttgtgcgctggccttgcggatgcggttgtcaccgacgcgcattgtcttgatgcagtcccatgcctccttcgccgatgccttcgtcgccaagatcgagatcatctcgggtggaaccgcactatagatcgcatcaagcgccatctgatcctcgtgcagctcaacggcagcgcggccacgttcgacagcgtcccacaggcaacgtgcctgcaacttgatcttcatgagcaatgcccagtcattgtaattcgtcttcgtgagaaccggatagttcgcagacgatcctgactccttgaccacgcggtgtataaccagcccgctgtccttcccgccgctgcccgaagcgcggccgccggaacctccaggagtgcgctcgctcggcgacaccgaccaacagcgcggggagctcgtgcgacgccttggcataagtgcttcttctagtgcacgatcacgtgtccaagccctaaaccttgctctgataccaattgtcaggaaacccttgatcaatcagcttgtgaacactggatgaactcacgcgaaagtggaagaacacaagaacatgtagaacacaatactgtagacgaacggacaacagaaatagagtttttggtgctgcctgaattgcttgcagcttttcggggtttttctctccttttattgtgcagaactgaaacatgcaaagcgacgccaaaaactcggatcgctacccacgactcgcggcttgatcgcgtccatccccgcgtccgctcatcgtgcgcatacgcccgcaggcttaggcacgccgcgagctattctcgcttgactcctacacgcacggcttccacatgttggggctcatgcgctgacaatgcacaaaacaaaatccaaagcttaactaactagctaaaaacaagcatgcaagatttatcctctaacaaaattaagcccagccatagtataagatgttagggggggcatcaagcagcctcccaatcgaaggagtggttgggaggtgggctaaaggggtcggccgaaccaccattgtgtcctctcgccatctgctgacacgtgtaggtccctaatgaagtcccgatggtggttgtgcggggttcacggcttggataaatgtcaaaaccgccataggatggctatataaggaggtgctcatctcacactcaagacacacaactcaagtggagtacaactcactttgatatctaggctactctctcgtagagttagaatatgggaagagggtgagggaaagctccaaaaggagtgccccaaagttcggagttctttataaggagttccggaggagtgttggagttgtgagcactctttccatggcagtcccagaggaatgccagagtgtcggcgctctctccgatcttgtaccttggtggatgcttcttttataaagtaagtatttgagatttctttatgttatttaattggtttacttaagtgatatatattctcatttgcgggtttgtcgcttaggggctgttcagattgatgccaaaatgaaccttaccaaaatttagcaatgtcaaaattttggcaaattgacaacattgccaaaattttgataggattggcttaataatgttgctaaaattatatacgcattgccaatatttggtaacaaactaaacgtagccatataattgtcaattttaccaaataatggtatggttgaaaatgtcatcaatctgaacaggccctttgtgtgcaattgagtgctctagtacaaagactctggataaagaaggaagttcttggccgaggctataatagtaatcgataacgtagacgtagtgtctacgttagaggttaccttcgtttgttgtgtgctccaaggaaagtgaggtaggcggcaggtggtgacaaccttgtccatcctttgcattcctccacgttcgggtacatcatagagctcaaggttagactcagtctggatgaccaaaggagggccggtgtacgaaacatttgatagagttttacctttaacttaagttagctagttgaatccatagaaatcctctctatcctaagcctaccatttagttgttgtctttggttgaatcctgttcttagactaggtgataccccacgctttcctacgggattcatggatgagtatatgttaaatattgtcaaaatgatgaaagttgatatgttgagaaaataatgagaggaagatgatttgacacatacttgttgatctctataatataatattgtagatgatatgtcatgcttgcacgggatttaaaataggctagaatagtaattgctagtgagtgaagatgtggcatgc

SEQ ID NO: 20769 - DNA, 3887 bp, Oryza sativa
cagatttatttgtgtgcgtaacaaataccaacatcggggatttcttccacctttagtcggcccctctctctctccggtcgggaagcccttgcggcttgctgcctccactcgcccacttgccatcttcccaaattgattgacaggaatcaatccccacctcatcctctcctattccccataatttcccactcaatcccattttattcatgttggattttgatagcacccatcaatgttgagctccaccatggcgcggtcgatctctctcctaggtgaccctctctcccctcttcggcctataaaagggagcccttggcctcctcccttctccccaactaccgcccgcacctctctccctccccggccaccacgccgctctccttttgcgctgccaccatcacacagctccagttgcccctcgctggcggtcgagaccccctcggacactggtaacaccaccgacgacttcgcctcctccacctctcccccgtccacccctccgtcgagcatgaggaccacaagaataacaatgatgccgatgacccgaagctccccgtcgcttctccctcaccgccggccaacaccaaggacatctcgccccatgcattcgcacggttagaactgtcgtttccttctctctctctctctgtttctcccatttgcgcattcgtcgcatcgccgccgcggcatcaactaccgccggcgagccacttggctcgagcgctagtgaggaaatgcatggctagtctccatacttcccactggccactgtgcacatcatttcacacaagcattggaaattaaaaaaaaaaacactatagtgcagaaaatctccgaagcaaatgagcaatgagaatcaacacctggtgtcaatcgatgtcttgattaattatcacgggatgtggttctggaagggagggtgttgatgcgaaaaacacacactggcctgcgatatctgcttagctctagtgcaggaccaagggttggtgagatgcgggcatgctagtcagtttgaccctgcaactgacaagatatgcaaacaaaagatcaaatagccgatcagctgacaagccgatggagtagttccagccgatgccgataccagccgatagcgatagggttttgagctatcggccatatgtccaatgtagataatgatataaagacaatcggctgatgataatcaatataattaaacaatataatccagtggaaaccagtcggctagcaatgatatgatataatatgcactgatccgaaggttaaagcatacatcggctggaggtcagatgttataaaatccacaagattagattaaacagtaaaatctttattgcgatcggctaaatccaacttatatatgcaatccttataagccgatgccatgtccagataagtcatcggctgaaaccctgatgaaacccttattggcaatcaaaaaacaggctagagattatgattctaagtatgacttagtagatcaaacttaactgatgtagcagtaagtacgaaaagaaacacaatatgtagacaatgaagctgttgactgattttttgtaacaccctgaaaattcgaccgacaaaatcaaaactctaaaaatacggattttcaaaaacctttttaaattaattgcatcatgccgatcttattcgcctattttatctggatttgatctcgaagattattaatcgtgagtaaagaatagttaatcaggaataaaccttaaaaacaaattggtaaaataaatataaattaaaaataaagattaggtgtggataataataaataaaatattatcacgaccatatttggatcaattaaatttaaatacgatggaataagaattaaccctaataaaaactcaaataaattatataaaaataaaatatgagtaatattaatctagggtgaattcattagttaagataccacaaatattgagtaaaatgcatatatgtaaaattaggaattgtggaatcaaatttatatggaaaatacactaaaatcgggataaataggaaaagtcactgtttattgcctcataggtgttcgattttggtcctagccctagacccttctctgccacgcgcccggccatgcccggagccccgcgccgcccctaccgcgccgtcgccgtcaccgtcccgtcgcgccgtcgcctgccgccgcgccgacgtcgccatcgccgcctgtcgccgtcgccatcgctgccgcgccgccctagccggccttgcgccccgcgccgcgagccgccccgtcgccccgcgatgcgccccgtgccgcgctgcctcgcgccccgagccgcccgcccgtcccatcgccgctcgccagtcgtctcaccccgtcgccgtcacgccgcgctatcgtcgcatcgccgcccgtcgcgtcccgccccgagccgcgcgccgccactgtcgccgccgccgtcgacgtctcgtcgccgcgcgtcccatcgccgcctcgcgccccgcgccgccgtcgcgtcgccccttcccttctcttcctttccccctcctctcccctataaaactccaccccctccccattttccccactccatctcccccttcctctccctcttccccttctccatgcgccgccgttgtcgtgccgccgtgccgccaccttcgaagccgccgcgtcgtcgccctggagccgccgcgccgtgcgtcgccgccttgcgccgccgtcgccgtcgcgccgctctcgcgccgccacaccgccgccttcgtgccaccatgtcgtgcgctgtgcgccgtcgtcgcgccgccgtcgccgccaccgccgtcggtaagccgccgcctcctccccttgctcggtcgccgtcgccgccccgggtagcagggagccgagagagagagaaagggagaagccaaggaagagagaaagaagccgggagggaggagagaaagaaaagaaaaggaaaagagagagaaggaagaagaaaagaaaggagagagagaaagaaaaaaaaggaaaagaaaaagaaaggaaggaaaaagaaaaagaagggaagaaaaagaaaagggaaataaataggaaattagagggagattagggaagtttagaaaatttaaaataattagaacttagttatagattagttatagtcgtagaattgcgaaatttaatataaattatggattattcttggtaatttctacaagaaatcaatttgcggtagtagtttaaatgtaattaagaactaaacgattagatgaattcttatagactattatagattattttgggtaatctctataagtaattgattcacggtagaaattcggacttaatcactaggaattttagacgtatattatatttagtcgtttagtcctagactaaaattaaatcctataatattataagataatttttggattccgtccgatatttagcttgcgatagaaatttccaacctattatatggatataacgctcgggtagattaaattaaaaacttatgataacaaaatatttatacccacaaaatagtttaggatatataaatcgaaattgggtttgccctagtacgcgaatagtaaagttaatataaaagaatcgactttcacgttcgactttcatttggatttatttggatttttatttgaattctaatcgaatccaaatcaattttcgcacgtaactatagagcccgagggagttgcggatccaagtgaaggccaagacccccaagaccttgagcaaggcaagtcatcactattccttgaacatgttgatcccaattgcgaaattattttgtttataaataaaattgcatgcaatgatgaacatcctacttgtgattatgccatgccttgattattgtttatcccttattccttcgtaaccatgtttacgtatgagtccctagtcaattatg

SEQ ID NO: 20770 - DNA, 4562 bp, Oryza sativa
gatttgtgaaaggaaaataaagcgaaaacaactgttttcgactggggcggacggatgatttgggtggtatctggaaaaggctagtaccgtccccagtcaattaaggactgagccatgaagttaagcatgaaacgacccccgtacaaccgtacttctcgaatgggtatagacctagcggattagatagccgagcggaggcagtatccctgcatagatggttcacccctgagtgaggcaggtgcgctacgatgggacagccgttgaggtagggccgagaagcgtgccctacatcggtgtcgccattggtaggactgccatgagtgtgtgagagagagaacttaacttgaaccataatttaatatgtgtgtgagacttctctttccctggagcgccagaactcctctcactgctagaaacatggacgcctagagtgcatgaggatttaagttcatggagcgggtattgccaatgcgaggttatcgaaaagctttgccgtgacgcgtctcatgtgttgggacgaggctcatgtgttgggcagtcgcggagtgcgggtaaagtgtacatccactatagtgtgagtaaaccaaatctattcgaatagccgtgctcgcggttattgagtaccgggacatgtattacacttggctagtctctaaattcttaacttgtgtgggatgggttgttgcatgactaatttttatgctgttggagccacttcctgaggagggggaaggtgggcgtcctcagaaaactataacgactcaatggcgggaagctatccttaggatcacaatggatggtggacagaaccgtcgttgtttaaatacaaacactggtactaaaatttgatcagtcaatgctaggtcttaggtttgtgaaaagaattacaaaactggcttagcgcaaaagagccatagccatcctttgaaatacccctttcatatgcattgttgctgtggtgacttgctgagtacggttggtactcacccttgcaaatataaaattaatcagaagcgggagatgaagcttcggaggatccctatgcctactaccaggagggagatgaagacgatggcgctcagtaggtcttagtacggtcgttgcctgtggcaatggcgtgccgctgccttaactccgctgccttacctacttctgtttttggaatgtattccggaccgctcggtccgatgatttaagactgtgcctgcgggcttatgatgtaataattcatactagactctcgtgtatgtgcacttgatattttagctatgagttcgtgtgtaccagactccttgatccagggaaatggtactgtttacacgattgattcctgttataaaaacgggggtccacatttttagggtggtagatgccttagctaatctagtctaataaaacaatttagccgatactggcagaaaccgtaaagcgagagacaaccgatagagctaaattgagatactaagactagattaactaagacatatgataaataggcaggcaaaaatatcatccaaaccagagcaatccaagaggtcgaatgtactgatgcagccttgaacgacgctgacgtagacgaaacaattgcctgggccagcggaacataggacttaccccttcgccggagatcgaactaaaccgatgcaaccccgcgtcaggtgccaaattccgccggttgataagtaaaaacctctggaaagagggtggcgatgcgccgagagtagttgtattgattgagatattgtacaatgaccccgggtgtacatatttatacctggagagatactagtccttctaggacaagaaagaaactttcctaaagataaaaggaaaacataaagtccttataggacactaaacacactttcctaaagataaaaagaaaataagaaactattcctaatgaatagataacttgccatgctgcatcctccttaaactcggtcacttctggataagctttctttaatagatcaatttccttaaccgaatatagaaggaatctgactactggcgacgtgataattctcttagaggcttaccaaatttcactattaacagagggatctatacttgtgtcactggatcgactcatcgctggcaagcgaaaggggatcgattctgaattttgacttagggtttagggcttccaaactgtcaccaccactggggctcccttgcggcgggatcccatcccatattgcttggattggattgctgcctccctaatctccatcccatcccattccatctaccaggtaagacggccttcttgaacacaaggcgagtgctagggggagcggtggggctagtgtggcagacgacaagggcttagtgttggaggaggaagccggagcggatggcatggaggcatccttgcagacggaaggatggaggcgactgaggcaggatttgtgcggcagtgggaagcgccagcgacagcgtgaggacggaggcgatgaggacaaggtcttactatgattggtgcgatgtgaggacatggatttgcgtggtagtggggagcgtgcgacggcagcatgaggatgtggtgggtggagatagggacgggtgtaatgcgaatatgcgatggacgaatgaacggatgagattagtgcgatgtggatggacgtggatgggttcgtggatgatgatttgacctaaaggatcaaatcggtaagtctctactattataaaaattgtagatgattttgctagaattttgatacgtcatccatgtttgaaacggttttaattttatgttttggttttaatctatatctctactaaaaacaagaaattcctgtcctctgcaaaaacgaaagaaaaaaatccgactcaaaaaagtaaaaaaagaaagaaagaaaagtctgacttaacgagcgataaaaaaaagcttccgtcgtcagtaaaaaaaagaaaaaaaaacatctcttgtccgattcccatagaaaaaggaaaaaaaatcttccagtaaaaaaacaaaaaagtccgtttggttttcttagcatcagtattttttttccgttttttctttgcacgcaaaagagttttttattcgcacacgctaagacttttggtttttttgtcccctttttttaatccgacctgttcactgcgctcctgggtgtttttagttttttttgttcaatctttttgtcgccggttttttctctcgtgcgctttttgtttttctcatagtttttttggtcaatcttttttgtcgccggttttttctctcgtgcgctttttgtttttctcatctagttttataatcccatctgttcaccgcacgcctcccgaggtgaaccctagcgccgcgccgccgccatatcgatcgtgtatttttgtcctccaatttgattgcaaaaatcgattccccaatcctctcttatcattttctccatgattttcccttcgattcggctttaattgccggatttaatctctggtttacaattaccgatgatgacagcgatcttccccggtcatttttatcccgatcgtgtgttttctcctcctatttgattgcaaaaatcatttccccaatcctctctcatcattttctccatgatttttccttcgattcggctttaattgcgggatttaatctctgttttacagttgccgatgatgatagcgatctttcccggtcatttttatcccgagttttacgctctgattttagggaaaacggaaagagtagatcgagtggataaaaaacccttgaccaattttggctgatctagaaagattcggccggatttgatggggagatttgctccgataaacgtacgggtacgggcacaggattatctttgggaggttgaagatggtagtcatatttggaaagttgaagatggtaggtttgaagagagcagaccaaatggaggaaggtagcctctctctctttctccctctatattcgtttagatcagagaaatacattacctctatcctccctcctgtttttacacaaatgaaaagcacatcacaatgtctgacctccatgttccctcctttatctacagaaatcaaagcacacatcatgctcgccaacggaaaactacccaataaaagcagtaatccaaaattctaaactgtatgatgcttacatcagagactaacaaaaagaaatgcacacccagcggaactttgctcagacacctccttgctaaccagtggtctacatgcttccaggcttcaggcgctgctgcaatataatccacacccagccgcctagcctactgagggctccgcttgggtacaaaacacagtcccgactcacagcaaaacaaatccacaataaatcccgccggtgaggaggcggggagctgccagatctgggggcctctgagctcgggacagccgatctagcgactccccacctcctcacctgggggcctctgagctgtcccgccgtcgatcccagcctcgccgtggcctcaggcaccctccacatggcagcaccttacgccgtcgtcccctccctccctctctcttctcagcgcgtagaggagaagattgggagtggccagtggcttagtgccttcagacttcagtgg

SEQ ID NO: 20771 - DNA, 2118 bp, Oryza sativa
tccccttcggacgccgccgccttcttcaccgccgcgacggtgggccccgggcccgaaggcgacatcgactcggcggcggcggcgtcgcgtccaaggcgcttaggcccctcgcccaacctggtcgtggcggccgcgaacgtgctcgaggtgtacgccgtgagggctgagacggcggccgaggatggaggcggtggcacccaaccgtcctcttcgtccggtgccgtgttggacggtatctccggggcgcgcctggagctggtgtgctattacaggtgcggtgggcggtctcttgcttcttacaatttaccactggttttagatttcagaaacgaaaggatttggtcctagtttattgtgtactaatttgttgatgaatggcatgtaggctccatgggaacattgagtccatgaccgtgttgtcagatggagcggagaataggcgagccactattgcacttgcatttaaggatgcaaaaataacttgtttggagtttgatgatgctatccatggcctgcgtactaggtatgcatactgtttcctcattctccttttataatcgttaaattattgattcttgattactgtgaatatagtccccatttgcaaaattgtagattttgtaacaaatgtatgtgtgtaccaatgcaattaatgtatgtcaatcttcaccattggaccattggaatcacttttgattcccacaaccaccaaccaaattaataccacctaaccaggtaataagattaaaggattccccttgggaccagcttacatgtcaagtaacgaaccaatgaagtaagctgtaaggatctaggagtcttttcaaagacccctagcctttggagtggagctagtgtgacgaactagagtacatttagaattttggcaccaaggaaactgccctttaaactgttgctcaggctgcatttataggtctgaccgtctgagcaggatacataagaaattacatgtgggtggccttaataaaggtgtctatggcctgggtgtacattagacattttcttatattcggtgcatggatcgttcccacggggagccatggactgtgtctatagcgaggtcgtccctggctattgagccaggaatgaagaacggaccactgtgtctcttaactggactcagtgtttggtagtcaaaggagtcttctctgtccttaatgaattgcatgtgggtgaatccttcttctcttggtagcttgtcggatggcctttgatggtcaatgtgtcttcaatatccaaagggcttggtcattcatcgatcgttgagggtgccagttgggaccatcccgcaaaacctgctaatcggaaaattttgaatgatacagaggctgtttctaactagcgttattcactttttctgccttttttctaatgtagataaaattgaaaactccatctctttagtgcaactattttgctatcttttccttgctacaggctgatgcgctatcagtatttcattatcattcttgatgtttcagttcaatgcactgctttgagggcccagaatggcagcatctgaagagaggcagggaatcatttgcttggggtcctgttataaaggctgatcctcttggaagatgtggtgctgcacttgcttatggacttcagatgattattctaaaagctgcccaggtgatatttccgtgatgtatcacatatttttgtcttgaaatatatatattttgtcccatctctatctcttattacatttctcattaccatcaggttttcattatgccaacacttgctctaagaatatgggcccatttagaaatgctagtgctatggatagtgattacttgtctggatcagtagattacaaatattttactctcctccaacgttgtgtgtttgattgataatctttggtatttttgtacatattaggttggccacagcttagttggagaagatgaacccacctgtgcattgagttctactgctgtttgtattgagtcgtcatatttgattgacttacgagctttagatatgaaccatgtcaaagattttgcttttgtacatggtgagataagatctgttttgcacatactatatcgcagactacacacatttgttttttcatgtttttctata

SEQ ID NO: 20772 - DNA, 6057 bp, Oryza sativa
gtgctacaactatccaaatgtgaaaccttgctattcatgctgttttccatttatgatttctttaggttatattgagcctgtgttggtcatacttcatgagcaagagcctacatgggctgggcgtatcttatcaaagcaccatacatgcatgatatctgcatttagcatcagcatgactctaaagcaacatccagtgatatggtctgcagctgtaagtgtacaagattgctcctaagcattgtcttttctgtctttggtagcttattcctatgttctttcggcaataaattttggcgttcagagtactagaatgtactaaggtggcttgtggtattcactaaataattacttatttcttttgcatagaacacggtaggtttatctgtgattggtaaatgttccgaatttagataagttatcaaattttgctctatttcaggactaatcctagtattcaagtccctcattttaggtcagcaataccgcattgaggtgaatggtattgatttgtagtggtgctatcatttctgtccactagatcaaatgtgtgtcatactatgatcgcgaatcctttttttttttcttgtagattgctcaattgtattacatattttagggattccattgcgtttaagcactggatttatttgactctatatataacttcttgccattacaaaataatatacttaccattacaaagtgtttgttcctttcagaatctgccccacgatgcataccaacttcttgcagtgcctccccctattagtggtgttcttgtgatctgtgcaaattccatccattaccatagtcaggtttgatccctttaaatactcgtggtgaaggcacatactttattttgatttgctgaacgtggatcattgatttgaagttctctttgttattgtagtccacatcgtgttctcttgacctgaacaatttctcatcacaccctgatggcaggtactgtttgtatatgttaaatgcaaagtactaattggattacgatagtttgttctttttctcggatcacatacaaatgggccctgtttctgcttaactactacacggctacacacatatcagtggtgcagtaccatcacaatcacataccaagatcaccaatgtggatacctgatttaaaagtgataagctcaagacgtgtagtgtggtctcttcttatatggttgtccatagaaaataagattaaaataaccatcttgaacttcccctaggtcctagcaacctaattatttaatttttttggaagattatgtttgaagctacatacttttaaatccattattactaaaggtgttaactgagacattagcacagcatttgagcccatcttgatgtactggtaaacatgtgaactgagtaattcgtaaggtgaaattactagaaggtgcttgctgttgattatgggtgattgggtgtgcataacacacctcattgtacttatttggttgtaaaaaggtagtcaaatctactgtactggcatgcttttcttgctgagagcaaatcttacatgaaaatagtgggttgatccaaaaagatatagaaaacctgcgaaatatggcacatatactactccggcagcagtgttatacctatcaatattgaatagttgattattcttaagttctgtagtctataccgtattgatattgcttagcttctttctttttcagtagatttgtatgctggtaaccttctgttcttttgctggctttgcagcccagaaatttctaagtcaaatttccaagttgagcttgatgcagctaaagcaacttggttgtccaatgacattgtaatgttctcgacaaaggctggagagatgctgttacttacagtggtttatgatgggcggtatgataattctatggttcattgtcctattgtctgtgctactgttgttcagagttgatcattacatgttcttttattctttttacagagttgtgcagagattagatcttatgaaatcaaaagcatctgtcctcagttcggttggttacctatgtacttctgtgcttatatgcttccttttttagatattgctcttttttaagtttactaacctatttatggacaggctgtgacatctattggaaactcattcttcttccttggtagtcgtctgggggatagccttcttgtgcaattttcctactgtgcatcaaaatctgttttgcaagatttaacaaatgaggtgtgtactgagatatctgtgttgatttactttttatctttgaagtaaaacatttcactacatgtcggatacctatatttttggaacaacacctgaaatgagttcttttttactgtcattatagaaaacatgtaactagagatgcaatatttctgtacttgtggttttgaaaatttgaacccaataattcaccattgggcttgaatgcaatgatttttttgaactgagcttgaatgcaatattagttctaattcttctcatggtgttgaagcatgaccatggcagcataaccatatgggtgctgctactttgtgccggtgcccggtgatccatctgctagtgtccgattgtttacaccattgtttgcagcttgcattattgatcctcctgtcaaacagatgatgccacatctatggcactcactgtcaagtcattctattggcacctcaattttatgttccaaatgcctcttatcatagttattaaaaccggaccggactgaggtgtgatctgatttgattaaaagactggggatgcacatgaatcggtagaaactggttatactgcccagttttgtataaaactggctaaaaacctggagcagtctctggccggctatacttttttcaagaaaaatcaaactccatgcgtgggaggagggatcgatcccgtgatcactggcttgcccatgtacctagtaaaccaactgagcaagccacattgttgatttcacaaggagaagcactcgatttttttccttggagtcaaccaaaacaacaaaaagtaaaaaaatgttatttaaccaacggtcctgccaatgaactgtgaactgatgggctcactggtttgatggccggtccaggtttaacaactatgcctcttatgtttctcaacttgccatatagtttttctgttggcagatcagtagaaatggttattgggttggtttttaggattttttagaccaacgtgatacttgagaactggcaaccagggtcattttactgccttgtggtggcttgtttttgtggtggcgtgagttcttgtacttttttctgttttttttgcgtgtttggacacctttcttcttctatttatgcaatgatacacagctcttgcgtatttgagaaaaaaaaagaactggccactcgttagagatcattaaaggttatttcctccattcccaaatgatcatcatattagtagtatttattccaaggtctatttgttatgtgtgcataggagtaaatgtacattgatgcatgcgtccatgcacacaaccctttacaaccaacatgcaatgtcttggtttgttattggctaggaaatagtggggatggtgcatgcatcagagtttgttactagattaaatgtagtacatgatagttattagcttttattggtttgggtgcactcctgtaatatgatgatcaattgggaacggaaggagtacaagccttggcaaattcatcttccatccactgccttttcttctcttcctctgctactaccacctctctatgcttgttcgatggtatcatcatttagggcattcaatgaatataaggttcattttcaaggctagacttttgacagaagtccagaaatcaaccctgaaccttcgagttaagacattttacgatcttaaactctcaaatacatctgctttaccccctggttcgaaacattacgtctttatgctgacctgacaccgtgtgtatattagtggcacataagatttgttatgagatgccccccttcccccctacacacctcacaccattgtatatttttgttaaagcatctaaagatacatttagttaattaaccataaaatgtacttctacacaatattaaattatacttttaattaatactagtatcgctatagaataatagtaaaatatgtacataacatggatggttatttttgttgcatgtagcgttgagcctttgaaaaataccacgtataaggtgagctatggctgtcccttgaaagcattggtgactaatgatatagcaatctacttttgtagcgctctgctgatattgaaggtgatctgcctttctccaagcgcctaaagaggattccttctgatgttctacaagatgtgaccagtgttgaggaactttcctttcagaatatcattgcaccaaacagtttagaatcagcacaggtctgagtattactttcagggtttcaactgtatgctagctacctgtggttccagaatcatatgttctaattatctgtactcctttaaaaagagcaagtggtggtggtgaatctgccaccacctcatcaccagtgtccccaattttgatatgtgggacctactagcggagaaaaggttgtgccaaacataatccttcaaacttggttagtcaatatttgctaatataagaaagttgagataaaagaagaaaagcgcacaatcttactcatttattggttatgtggattgattatacagtgacgtttatccttcctgtacaatgcacaattccattatctttttcaattaacaaagggtcttcatcttgtatatagttgtttactatttctttttggctaccattccaatcacgaactatattacttattctcttaaaaaatatcacagttgcttctcattatattctgactatataattcactggctttttctttgcagaagatatcatacattgtgagagatgcattgatcaatgttggtccactgaaagatttttcatatggtttaagagccaatgcagatcccaatgcaatgggaaatgcgaagcaaagcaattacgagttggtcagtggcatggcaatctttacttttgatcttttattactgttgggtctttgtcaatcagttctatggttgatttagctactattgttggatgtgcatatgtggtttgttttttttatctttagtatggcaaaccaaggtttcaaatcctacctgtaagcagcaggttacagctggttgttgaaaattccaaaagtttctgatattagtactagctaggttttgaagattagttgttctcaagtcaaggaattaaatacaagataatgaaaagattaagacaataaactgaatgtttaccagaatgggtaaattgctaactggaactctgatgagtttatatttatacatagtacatgactgaataaacataattaggaacaatgtgccatctgtaatcaattgaggtgttaacatcaatggtccataatgtatgctattgaataatctgcatgaatatgtgctaattattatgttgacgatattcgatcttaacattttactttttttatcacctttcacatatctgtcaattcagtgcaacaattaaaggaatgcaataatctatttatcctgatttaataaaggatagtatatatatattccacttcaaagcatgcagtttacaaaaatgttgctgagaattgtggattgggaatatgccattgcaatatggaggcaaatggactgatttaaccccattattctttcgtcctttcccatctccacccactccatggctgccattgaccaactagtggtgttccagagaaggcgggtgccaactgaatgagtaacgagcagtcatggcgtccttggctgctgataagctctagaaaaatccgtggagttatctcttttgataccaggtccagccagcatcattgtccttccactgacctacttttcttagtttctccaacgcaggcctcctaggcactagcgcaacccaacagcacacttgacattgacatagcctccgcaaggttcaccagtgctagtgtcagcattgtaaacattgatgagcattggcactgcctt

SEQ ID NO: 20773 - DNA, 6058 bp, Oryza sativa
agtgtggagttaaaaataaagtagttaccatacttttgagttgaagtgatatccctcttactgttttttaaaaggagtaggaactgcatactcgaccacaggaatgacatcatcaatagtactacaccaaaccaaaatatccgtcaaatgtgtgcaccatttggtttctctcaaactcaagttctgggaacctgaaaactgttccctttgatcataacaagaaacctgtgctagccagtgttaatatagactataatgtattttttttattactagctaatctgctcatatgttgccatggaatcttaaaaagagaacctttgtcatactacctcagtccaaactctaaaagtttagctaaatttagctattattatctggagggagtacattttaaagcataaaattgtttaactgttttagtcaatttttgccatcagtttctaaatacatgctgagctaggcaggggcacagagcactgttgcttcatgatgaaaaactgacgcaagtctttttttcattcactttctggatgcctgctgaattaatcatcttctctatttaatgtgaattcatgttatttaggtgcaatacaggtcagtacaattctgcttgtgagggcaaaaagacacaaacatatgcacattgcataataagttatgacaattcagtccttaataaattgatttctatcaatacagcactgctgtgatatcaggcaggccggctacactctcgtacaccagcaggaaaggcctggcccatttacaacttgctaaccttaactcccatttacacctgccagcggcctgcagcttgcaccattcgttgcgtcctctcctccctctatgagctggaccacgccatgcttcctcccttctccaacgttgccactcctatctcctccattctcaagcgccatcggcgccagcccctggccctctccagcaccacctgcctccagtcccttctttggcgagtctatctagcagggtcacgtctgcaattctgtccccttcccctagtacgatttattcccgtccccttcctctccctctagcaagtgaaccggcagcgccgagcccgggaccaccagatccgctcaacctgagcgctatggtgctctttgagcagcagcagcaacaaaacagccaacaagcggtgcgttgtggtggaattgaccatggcggaaggattcaagcattggcgaagcacgctcagctaccgtgctgccccgccaaattgacaaacagtggtgagtctctgcactgctgtacaaatacagtggcatcagaagctggcgccctgccagatccaagcatgggcggcacaattcctgttgcgagttccatgggcaatgtccaaggcaaggaggtgaacgggggagtaggcgaggattcccgttcccctcctatggatctgtggtccccacatgtcagaaggttggtggcagaaccaccaccaccaccactaacatttaaagtagtatagatttcttgtacttggtgggtgcatttccaatgctaccttttgcatatttaaattaagagaaaatctattctatgccattgagtttgtcctggttcaacaatttgccattgactacctctttctataacataccactgagcatatcaattgttctacaatatttcttagaaaaatgcctttatagacataagattaacaatcgatttatcccatccgaaatttcaaaaaataatgatgttgttttgtgtagcctcgttacgcagcataatagtttgtttataagtttcaaatttttgcattactattattttataagatataatttatgtgttatatgctacttcctccgtttcacaatgtaagactttctagcattgctcacattcatttagatgttaatgaatctagacatatgtatgtgtttagattcattaacatctacatatatgtgggcaatgctagaaagtcttacattgtgaaacggagggagtacatagaatacttttttgctgctgtttttgatgtaaatcatctaccatgtgttacacaaaatatttttatagtattatcttttgtttaagcaattactcatgtaccacacaaaagtaactttttaaaaggacgcgactacagggagcgcatgcactcgttagtgctaaccagcgaccatcttttttaccaaaatagtacagtgggtatcaactcgttacccttcttaatagcacctgccacttgcatcctcattgcccatctaaattccaaataaaatttttctcttaaattatttgtcggatctacgatccgattacaccattgtgctcgttgcaattaaatctgtacaacaagatcttacatgattatattatgatgaaaaaattatttatgtttgtaaactacttttattatatactaagttacttttatcatatatataaattacttttagatttgattaaattacttcctatacattcataatgctatgaggtgattacttttattattattttagtcaattccataatttgtgctgattaatttagtttctagatagagttatgtttttatactacaacggatttacttctaatgtcatgacaaaattactttctttttgtctcaagttacttctataatatatgtaaattacttttagactttattgaatttacttttatatgtctaagaagtaatttagtgaaatctaaaagtaatttagatatattataaaagtaatttgtaaattttcatcgtaatataatcatgtgagatcttattgtaaagatttaattgcaagttgcaacgaacacaatggtgtaattggattgtagatcagataagtaatttgagagaattttataagaagggaaaaaagacatggatgcctaacactccgatgcttctctcaaattgtaaactctgatgcttctcgactaaatcggatggccgcgccagtcgtcgctgtgtaagaccagatcgagaggcctctcgttatagattttacgtttttaaaaatattaaaaaagaaaaaagtcttaaaacatttacccaaacttctttgtcatgcaaggagaccaaacggaaaatttcataattttttggaactgctattggtgtcaatcaattgccaacccttgtatgtatataagggcagtttggttattctttcaaaaatagctgggcacactgtagaaacaattgacgaactcggtggcatattgtagaaagggataaagtcgatggcaaattgttggacctaggaagttgataaactcagtgacgtagagtagagactcttaaattaactgatagccatgagcctacggacagaaatatttagtaagtttttgacccaatgaatggtgcaataagctgcaaaggttacagaaaatttgtataattaatttttaaatttgaattcaatgtctgcttgtacattgtcttgatttcatgtgcttgcaatgttatgtattatttgtacatttcaatccatatttaggctatcctagattacaggaactcaatttgtaatactattttgcatttcaacatgcataagctggcaatttgcaataatgtgcactgctttctttaatggttgtggtgtctgaataatcctctgagattgtttctgtaacaggtcaaaaacttcgttttgtttggtgatattcataaaagcatttattttctgagctggaaagagcaaggttctcaattgagtctcctggcaaaagattttggatcactcgattgctttgcaactgagttcttaattgatggaagcacgctgagccttgtagcttcagattctgataagaatgtgcaggtcattttctttctcataattcttttcatgcatcagctctttttattcgagtttcatactacctccatcccaaaaaggcttcatttttgcctatcccatacaaaccaatacaaagtgaaaatactagaatgtctcccacttaggtctcgcttgaatctgctgaaaaaggggataaaaatttggatactcgtggaacgcttttcaaactgctaaacggtgcatttcatgcgaaaactttctatatgaaagttgctctaacttatcagattaatctatttttcaagtttgtaattaatcatactttaataccacctcattttacgtgaaacacttaatcttcattttcatcttcatcttcatctttacgtgaaacacttaaactccatgcgttgattgcttcaaagatagtctttttgggacacatggaaggcggcaaaaatgaagtctttgtgggacggagggagtacattattggcttacatttacgatttaatccatctggctagctctctagcaatgagattttgtgttgtcacttgtgtgtgtttcatgggatattattatgttcgtcagggtccaagatagcatccagtaattgcttcttttagaagtaaacaaaacaactggacaaacattttctcctagaactcctagtgataataatctggcctatatagtctgccatagacttgctattgaaaaataaactggtgatccggaatcttggtttggatcgttccggtgcataaaagttaagcttccctgcagcaaagatgagcaatagatcagatagatctgttctctggagctgcaatccaaaataagtgttttgagtcaattggtgaatatttgcagctttatgccaggagcagcagccagtggtggagctaggataaaattatagtgggggctaaaccaaagtgaccaataaaagttgaaacatgtctcatgtaaattggctatatgtctaatacaaagtataaatatatgtcattaacgaaaaataacatcatccataccaaagcaatatttaaatgtccaatagatgatgacatgatttgcgacactagtacaccctatcgccaattattcttcatcaggggtaatctatacaaaagaaatgtcaaattaatgaataatgacaattgacaaacaatagcttcaaataatttaaagacttaggtagggaatggaggcatggagcatatcactaaattatttgtaggcagtaacatccgacgttttttcatatcttcaaaccttcgatgattttttcattactaatacttctaaaaatatgcttctcagtatagcatatcatcaagtcattcagccattcatcccccattttgtttctcaaatctgtctttataagagacatggctgaaaaaatcctctcaactgaagccgttgccaccggaagtatcaatactaactcaatgagcctatacactaatggaaaagttcttttcttcctgtttgaacattaattctaccctaggcctctttgactgacttgcaatctcattattgagtggaggatcgctggtatttgtgttacttgaactagaataatatgtgagcagtgttctttttggcatcttcacaatctagcaatatagcagagtagcaaactaggaatcacaaacaaaattttcaattcaatatctctatgatttcttgaagacttgaactattaataacaactagtcttgacaattgaaattgattttaaataacaaatcagaaattttctatacctcatatcctcaagtacttggcctgctgctggcactgcttgcctgcttgctgctgccacccttggcggcttggcccttcgctgcttgcctgctagttgttgttgcacgcctgccagtggccagcaaccggcgtgcccgcgcgccgcgtgtttctgcagtgttatcgcgccgcgtccccccgcggccccgtcgccactctgcgtttatgcctggaggcgctagtttgccggctgccgccgcgcccgccgcatgcggtgccgtccctgcccccttgcgcgtttccgcctctctctacgcgagcagcacgacggcgcctctgcagcaagagccaagagcgaccgagggagatgagatttacggttgggtaaggttttttttgggtcttctcagccttttgggccttctaaaaatctcagacaaagtctatttaagttccccttcctatagatatatggattagaattttaggggagtattatg

SEQ ID NO: 20774 - DNA, 703 bp, Oryza sativa
catttgtttcctttgtcttgttttttaataattgacagcattgagtcctattcgtactatccatttgttagatttattttcaatagtactattataatagtatagagttcaaatattcttaaatttattattattattgaagtagtggttaaagcttatatagctcagtcaacgatgtttaattattgaaaaacgaaccccactgtctagttaataattacagtatctggcaccatttcatcaactgaaacaagttgtgacatgcagatcttctattacgctccaaaaatggttgagagctggaaggggcagaagctcctctccagagcagaatttcatgtcggagcccatataacgaagtttttgaggctgcaaatgcttcctactcagggcttatcgtctgaaaagacaaatcgtttcgctcttctttttggcaatctggatggtggcattggatgcattgcgcctattgatgagctaacattccgacggctgcaaagcttacagaggaagcttgtagatgctgtcccacatgtgtgtggcttgaatccaaggtcattcaggcagtttcattctaatgggaagggacatcgtcctggaccagataacatcattgacttcgaacttcttgcacagtaagtttaccttcatatgagcttgattattttcccatttgcttttgggttcttatgttcgctgcaca

SEQ ID NO: 20775 - DNA, 1033 bp, Oryza sativa
cagggttgcacggccgaagatggcgttgtagttgtacgggatgtcgacgacgtcgaacagtacttgctcttcgtgtctgttctctccagagccaaaagctaccagcaaaagtgcttggccaagaacttgaactgcttctccgccgaaaccgcggagcgatgctggtgccggggtgagggcttgggtgagcaaccccatcttggtatatgcttcggcgaagataacatcggccgaactccctccgtcatccaggattcgagggacttcgaagccagctatctcggctgagatcaccagaggatcttgatgcgggaacataaatcctacagcgtcttccggcccaaaagaaattagctggttaagatattgcggtgccccttcacccgccgaagtgatgctgtggaccgttcggatctgcatcttcttctgccgtttggacaattggcttggcgggtcagcccttgtaatcacttggattacccttcgctgtgcacacatgggtgcgatgttttcgaccagaatgaaaaagttcaaaaagcaccaaaacatgattttcggacatattggagtgtattcggtacgttcgtagcaaaaactcacttcgtccttcgcgcggccaacttttgtcaattaaagccaatattggaacacgtggatgtgatgtttttgaccggaatgaaaaatttcaaaaaccactgaaacatgatttttggacatattggagtgtattgggtacgttcttggaaaaaaatcacatcgtgattcgcgtggcgatcttttgtcaattaatgccaatagtggcacatgtgggtgcgatgtttttgaccggaatgaaaaaattaaaaaagcaccaaaacatgattttgggacatactggagtgtattgggtacgttcgtggcaaaaaataacttcgtcattcgcgcggcgaacttttgtcaattaatgccaatagtggcacgtgtgggtgcgatgtttttgaccgaaatgaaaaagttcaaaaagcaccaaaacctgatttttggacatattgga

SEQ ID NO: 20776 - DNA, 1783 bp, Oryza sativa
cgaacttttgtcaattaaagccaatattggcacacgtgggtgcgatgtttttgaccggaatgaaaaatttcaaaaactaccgaagtatgatttttggacatattggagtgtattggatgcgttcgtggcaaaaagtcacttcgtgattcgcgcggcgatcttttgtcaattaatgccagtattaggatacacacgtgggtgcgatctttttgaccggaatgaaaaagttcaaaaagcactaaaacaatattttcgcacatattatagtgtattgggtgcaatcattgaacaaagtcacttcctgattcgcgcagccatcttttgtcaattaatgccaatattaggatacacatgtgggtgtgatgtttttgaccggaatgaaaaagatcaaaaagcaccaaaacaagatttttggacatattccagtgtattgggtgcgttcgtggcaaataatcaccccgtgattcgcatggcgaacttttgtcaattaatgccgatattggtatatattggcggacctgggtgcgaagattttaaccagaaagaaaaagttcaaaaagcaccaaaacaagatttttggacatattggagtgtattgggtgcgttcgttgcaaaaagtcacttcgtgattcgcgcggcgatcttttgtcagttaatgccaatattggcacacatgggtgcggtgtttttgaccggaatgaaaaagctcaaaaagcaccaaaacatgatttttgcacatattggagtctattgggtgcgttcgtggcaaaaaatcactccgtgattcgcgcggcgaacttttgtcaattaatgccaatattggcatatgtttgcacacgtcggtgcgaagattttaaccggaatgaaaaagttcaaaaagcaccaaaacatgatttttggacatattggagtgtattggttgcgttccttccaaaaaatcactccgtgattcgcgtggcgaacttttgtcaattaatgccaatattggtgggatacacacgtgggtgtgatgtttttgaccggaatgaaaaagtttaaaaagcaccaaaacatgatttttggacatattggagtgtattgggtgcaatggttgcaaaaagtcacttcgtgattcgcgcggcgatcttttgtcacttcaagaagcaccaaaacaattttttggacatattataagtgtattgggtgcgttcgtggcaaaaagtcacttcgtgattcgcgcggtgatgcagcaacgggggttcccgatctttcgatgagaggaggataaactacgatttggggaaggatacgacgttggcggtccgactacaactaccacaggggtgctgcgccttagcaaccggtacaccgactccacgttgttgctgttcttgccgtgccaagaacaaccttgaacctgcaagcaatcgaagaacaagcaagaacaagttgacaaggaaacagctcacggcacttgtcaaatgatgaaacttaaacaaaccaaaatggggttctgaatacaagtatccgggtggtctagccgacacacgcgagtacaaggaagtagctgcagctaaacttacatcaaaacaaaacccaaagtgcaaaatggtggctgctaggagtttatatagttggaggaatgaccaggagaggaggtgggagcaaaccctaggttttgtggacccctaatgggctgtaatgatacaaggcccaagcccaagtttctgatgtaaagaactattttcgtcattctgagcagcctgggtcaaacttgatggtgaggccacatatagctgaaagt

SEQ ID NO: 20777 - DNA, 4026 bp, Oryza sativa
gcattgtcattaatcttttgtagcactttgaaaggaccatcagctctaggtagcaacttagattttctcaaattagggaacctatcctttctcaaatgcaaccaaaccaaatcaccaggttcaaaagcaacatgtttctttcctttgctcccagcaagtttatacttaatattcatgcgctctatgttctccttagtggtctcatgcagttttaacatcaattcagcacgatattttgcatcaaagttcactctctctgaagttgggaggggcaaaagatcaattggagcacggggtagaaggccataaacaatctcaaaagggcacttcttagtagtagaatgttgtgaacgattataagcaaactcaacatgaggcaaacattcttcccacattttaatattctttttcaaaacagccctaagcattgtagataatgttctattcaccacctcagtttgtccatcagtttaggggtgacatgtagtagaaaataaaagtttagtccccaacttagcccacaaggttctccaaaatgactaaggaattttgtatcgcgatcagaaactatggtgtttggcactccatgcaagcgaacaatctcacgaaagaacaaatcagcaacatgtgtagcatcatcactcttatgacaaggtatgaaatgcgccatcttagaaaatctatctacaacaacaaagatactgtccctccccttctttgttctaggcagccctaaaacaaagtccatagaaatatcctcccaaggcacactaggaacaggcaaaggcatatacaaaccatgagggttaaggcgtgacttagcttgttggcatgttgtgcagcgagcaacgaacctctccacgtctctcctcatcttaggccaaaagaaatgatcagcaaggatatcctccgtcttcttcacaccaaagtgtcccatcagccctccaccatgcgcttcctgcaataatagcatacgcacggagctagctggaatgcataacttattagctctaaacacaaacccattggtgagaacgaatttgttccaagtccttccctccttgcaattcaacaacacatctttaaaatcatcatcgtgcgcatattgctcttttattgtttctaagccaaaaattttgaagtcaagttgggatagcattgcgtaacgtctagacaaagcatcagcaatgacattttcttttcccttcttatgtttgatgacatatggaaaagattcaataaattcaacccatttagcatgcctacggttaagttttgcttgacttcgaatgtgtttcaaagattcatgatcagagtgtattacaaattctttgggccataaataatgctgccatgtttccaatgttcgcactagagcaaacaattccttatcataagtagaataattcaaactaggcccactcaatttctcgctgaaatatgctacaggtttgccttcttgtaacaacacaccacccaatccaatcccactagcatcacattcaagctctaaagttttgttgaaatcaggaagttggagtaaaggagcgtgtgttaacttatctttcaaagtgtcgaatgcattcctttgtgttgcagcccaagtgaatgtgacatttctcttggtaagctcatgtaatggggctgcaatggtgctaaaatccttcacaaagcagcggtagaacccagcaagtcctagaaagcttctcacttgtgtgatcgttgttggaaccggccagctatgtatggcttcaaccttggcttgatctacttcaattccctgcggagtcacaacatagccaagaaaagagactcgatctgtgcaaaatgtgcacttctcaaggttaccaaataaacgtgcatctcgtagagcatcaaaaacagcacgcaaatgaccatgatgatcctctattgatctgctatatatgagaatgtcatcaaaatataccaccacaaatctgccaatgaaagcacgtaaaacttcattcattaatctcatgaaagtactgggtgcattagtgagaccaaagggcatgactaaccactcatataggccgaatttagttttaaaagctgttttccattcatctcctaacttcatgcgaatctggtggtaaccactacgcaaatcaattttagagaacacaagtgaaccactcaattcatcaagcatatcatctagcctagggataggatgacgatatctgattgtgatgttgttaattgctctacaatccacacacatgcgccatgagccatatttcttaggaactaaaagcacggggacagaacaaggactaagagactcacgtacataccccttgtcgagtaactcttgcatttgacgctgaatctcctttgtttcctccgggttggtcctgtatggcgcacggtttggcagagaggccccaggaatgaggtcaatttggtgctcaatccctcgaattggtggcagccccggtggaacctcctttgggaaaatatcagcatactcctgcaaaaggttagtgaccggaggaggcaaagaaataggagtatcctcaattggaaataaggtttctttgcaaaccaaagcatagcaaacaacagtgtcagtgtcaacttcatccaaatctgattttgttgcaatgaaacaagatcccttcagcttaatctcatttttattattttgaacagagttggtgggtttcttcttatgcttctcaagttcattagccgcaataagatgctcactcctagtatgctcctgatttttttgtttgctagctctagcaagttcatcctttaaaataacttcaggagacataggatgtaacacaagtttttttccattatgcacaaaggagtattgattggatttgccaaagtgtaaagaatctttatcaaactgccatggcctacctaataacatagaacatgcttgcataggcacaacatcacagttgattgaatcatgataagaaccaatggcaaaatgtactcttaccaatcgtgttacctttaccttgccgctgctattaagccattgaatatagtagggctgcggatgtggctgtgtgctcaatgcaagtttctccaccatttcagcactagccaaattattgcagcttcctccatctatgatcacgcggcaagagcgttccttgatcacacacttggtttgaaacaaggtgtggcgctgattctgttcagccctttccatttgtgcgcttagcactcgctgcaccacgaggctctcatagtgctctgcagcttcagccctaatgtgttcctcatcttggtggggcgcgtcaccttcccctgcattgttagttgcaagcaaagcataggtttcttcatctaaatcactagcggaggagtacccaccatcagctctcacgatcattacacgagtgcttgggcagtccttgcgcacgtgaccatagcccttgcagcgtaggcactgaatatctcttgtccttcctgatgaagctactgatgatgagctcttggaaggtgtagcagcaacccctcttgttggttcactcgggcgtggtgtagagtttgttgtagagggacgcagcttgttgcttgaggacgatggtgctgctgctcgagttgacggtgcagcagcgttggaagatgtccaagagctagcacaacctgcagaaatgttagtcctgaagctagctcttcgtccctgtacttccctttcagctttacaagcaagatgaaacaaacgattaattgaattatattctttgtaggctagaatgtcctgaatttctcggtgaagagcattgacttcatcaaatcagcgctgctagtgctgcttgcgatttggttcctctcccatattcctaacaacaagtagatcacaacaaccatttagtagcacccaattctgagaagaacttgtatgattagctaggaatgactttacctgataattaagttcacgagctcgagctctagtcattggtccttgctgtgcaatacgcgtggttgtatcgttggaagggatgtcctcatcacgcggcgatcttt

SEQ ID NO: 20778 - DNA, 2693 bp, Oryza sativa
tggtatacacacgtgggtgtgatgtttttgaccggaatgaaaaagttcaaaaagcaccaaaacaagatttttggacatattcgagtttattgggtgcgtttgtgacaaaaaatcaccccgtgattcgcacggcgaacttttctcaattaatgccgatattggcatatattggcacacgtgggtgcgttatttttcaccggaatgaaagagttcagaaagcaccaaatcatgatttttggacatattgcagtgtattgggtgcgttcgttacaaaaaatcacttcgtgactctcgctgcaaacttttgtcaattaatgccaatattggcacacgtgggtgcgatgtttgaaatgaaaaagttcaaaaagcaccaaaacatgctatttggacatattggagtgtattgggtgcgtccgtggcagaaaatccccccgtgactcgagcagcggacttttgtcaattaatgctaattgcacaagtaggtgggttgtttttcaccggaatgaagaactttaaaattcaccaaaacatgctatttggacatattcttgtatattgggtgtgtccgtggcagaaaatcactctgtgacccgtgcggtgaacttttgtcaattaatgccgatattggcacacgtgggtgcgatgtttttcaccggaatgaaaaagttcaaaaagcaccaaaacatgatttttggacatatcagagtatattcgcgcgacgaacttttgtcaattaatgccaatattggcacatgtgggtacgatgtatttgaccggaatgaaaaagttcaaaaagcaccaaaacatgatatttcgacatattggactgtgttgggagcattcgtagcaaaaaatcacttcgtgattcgcgcggcgaacttttgtcaattaatgtcaatattggtatatattggcacacgtgggtgcgatgtttttgaccggaatgaaaaagttcaaaagacaccaaaacatgatttttggacttattggagtgtattgggtgcgttcgtggcaaaaaatcacttcgtgatacgcgcggcgaacttttgtcaattaatgcaaatattggcacacgtgggtgcaatgtttttgaccggaatgcaaaagttcaaaaatcaccaaaacacatattggagtgtattgggtgcattcgtggcaaaaaaatcacttcttgattcgcgcgacaaacttttgtcaattaatgccaatattggcatatattggcgcacgtgggggcgaagtttttgaccggaatgaaaacgttcaaaaggcaccaaaacatgatttttggacatattggagtgtgttgggtgcgtccgtggcaaaaaatcactttgtgattcgcgcggcgaactcttgtcagttaatgccaatattggcacacgtgggtgcgatgtttttcaccggaatgaaaaagttcaaaaagcaccaaaacacaacgatttgggagaaacgttgacgatccgactacaaccgtacaagacattgcgttgtgccttagcgatcgatacacctctccgtgggttgttgatcttgtcggtacaaatcaaccctattcctgcaagaaaatctaaggaataagcaagaacaagataaaagcaatctgatgttgcaaataggaattgaatacaaatgataagttggggttctgaagaagaagtagacggacggtctagacgacacgcacgttgcaagcaagtagcaatggctaaactttaatctaacaaaacccgaataaccctgaaagggtacctacctaattataggggtgggaggacgaccaaggagtgccaatggtcgttctccacctagttggggcgcacgccacatgggcccaacttgggccggggtcccaaacaaagttacaagcccataggcccaagacatgtgacgcaacaccttttttatgtgattgtggccaaacgacatggaaattggcgatgaggctggatcagttggaaagagggctccgagagctttccatcaagtactcacgagccgaaaacggaggtcgtatacagattcggcggctgtttgaagtcagcagtgtagcaggtggctgaatcggattctagcacttggagaacttgatctcgatatctccttgttcatgcatgatgtcagcaatggttgtatccgtagtagccattgtcacatcatcctccccttcttcacaaaaaaaccgtcctcggcttttccatatggtgctcatcacatggtcgatttaaaacaacttgtttcataacaagacaaactagaagtaatatgattagaaataacatgcctctctagcttgcaggttttatccacatgtacaggaggttctaaatccgaacatatataaactctacgcaccaaacatattcctctatcatcatattcgccaaagatatgaaaaatagcattagttggacatggcaaaccagacttagcaaataatttctcctccaaattatcgagctcacaaaaatcatcgaactaaacatagcccaaagtatttaaagaagatagcaattcatgttcctctacttcattagcaatgtgaacaacatgcttaaaatcagcacacaaagaaacactagaaatagcatgttcattcaccagttgtggcatagatataagtgaagcattatcacacaactcttctttatcacaaggaacagcaagtaaatcaacttgtgacaaaggaaggg

SEQ ID NO: 20779 - DNA, 2214 bp, Oryza sativa
aaaaaaaatcacttcgtgattcgcgcggtgaacttttgtcaattaatgccaataatgtcacacgtgggtgcgaagttttcgaccagaatcaaaaagttcaaaaagcaacaaaacatgattttgggacatattggagtgtattgggtacgttcgttgcaaaaaatcacttcgcgattcgcgcgtagaacatttatcaattaatgccaatactggcacacgtgggtgcgaagtttttcaccggaatgaaaaacttcaaaaagcaccaaaacaatatttttggacaaattgtagtgtgtttggtgctttcgtggcaaaaaatcacttcgtgattcgcgcggcgaacttttgtcaattaatgccaatattggcacacgtgggtgcgaagtttttgaccggaataaaaaagttcagaaagcaccaaaaaaagatttttggacaaattcgagtgtattgggtgcgttcgtggcaaaaaaaatcacttcgtgattcgcgcggcgaacatttgtcaattaatgctaatactggcacacgtgggtgcgatgtttttgaccggaatgaaaaatatcaaaaagcaccaaaacatgattcttggacatattggagtgtattgggtgcgttcgtggcaaaaaaaatcacttcgtaattcgcgcggcgaacatttgtcaattaatgccaatactggcacacgtgggtgcgatgtttttcaccggaatgcaaaagtttaaaaaacaccaaaacatgttgagtttgcttataatcgttcacaacattctactactaagaagtgcccttttgagattgtttatggccttctaccccgtgctccaattgatcttttgcccctcccaacttcagagagagtgaactttgatgcaaaatatcgcgctgaattgatgttaaaactgcatgagaccactaaggagaacatagagcgcatgaatattaagtataaacttgctgggagcaaaggaaagaaacatgttgcttttgaacctggtgatttggtttggttgcatttgagaaaggataggttccctaatttgagaaaatctaagttgctacctagagctgatggtcctttcaaagtgctacaaaagattaatgacaatgcatacaagctggagctacctgccgattttggggttagccccacgtttaacattgcagatttaaagccatatttgggagaagaagatgagttagagtcgaggacgactcaaatgcaagaaggggaggatgatgaggacatcccttccaacgatacaaccacgcctattgcacagcaaggaccaatgactagagctcgagctcgtgaacttaattatcaggtaaagtcattcctagctaatcatacaagttcttctcagaattgggtgctactaaatggttgttgtgatctacttgttgttaggaatatgggagaggaaccaaatcgcaagcagcactagcagcgctgatttgatgaagtcaatgctcttcactgcgcgcgaagcacgaagtgagttcttgccacgaacgcacgcaatacactccaatatgtccaaaaatcatgttttggtggtttatgaacttttgcattccggtgaataacttcacacccacgtgtgccaatatatgccaatatttgacaaaagttcgccgcgcgaatcacgaagtgagtttttgccacgaacgcactcaatacactccaatatgtccgaaaatcatgttttggttgtttttgaacttttgcgttccggtaaaaaacttcacacccacctgtgccaatatatgccagtattggcattaattgacaaaagttcgccgcatgaatcacgaagtgagtttttaccacgaacgcacccaatacagtccaatatgtccaaaaatcatgttttggtggtttttgaacttttgcattccggtgaaaaacttcacacccacgtgtgccagtattggcattaattgaaaaaagttcaccgcgcgaatcacgaagtgagtttttgccacgaacgtacccaataaactccaatatgtccgaaatcatgttttgctggtttctgaacttttgcattccggtgaaatacttcacacccacgtgtgccaataaatgccaatattggcactaattgacaaaagttcgctgcgcgaatcacgaagtgagtttttgccacgaacgcacccattacactccaatatgtccaaaaatcatgttttggtggtttttgaactttt

SEQ ID NO: 20780 - DNA, 703 bp, Oryza sativa
ttttgttgaatgttgtgaagtccctgcaaaacgttagtaacaggagacacaaaagattgtcctggcatgtttgcacaccatcattgcataaggatataagagattcagaagcaagagataaatcacattgttcatgcttcctcgcatttgatatgttctgactctcaatgctatgagcaagcatgaataggtgtccaatatgattatatgtcacattagcaagcaaaacctgaattttagaaataagccccttgaaaaatttgcgcattgtgttttcattgcactcttttagatcactgtagatgacacaaactttaaattcatggatgtactccctaacagttctgtcaccttgattcagatgttcgaatttctcatgaagagtacatttgtaataagaactcacaaaacgatttctcatcatgtttttgtattcatcccaagttttaggtttgttactaatataagtccaccaaaacaatgcagaagaggtaaacttattaccagcagccttaatcatttgagcatcagaaaaatcatatttgtcaaattcattgtctactgctagttcccaatcaatatatgcaacagaatcatacttaccattatagaatggtaacttagattcaactcgcgcaaaattatagtcatgtacctcgaatgcatcatgtggagaagttgtcatatcttgtagacagtgaag

SEQ ID NO: 20781 - DNA, 702 bp, Oryza sativa
attcctgcagccctatatggcaatattggcatcaattgaccaaagttcgtcgcgcgaatcacgaagtgattttttggtaggaacgcacccaatacactccaatatgtctaaaaatatgttttggtgctttctaaactttttcgttccggtcaaaaacatcgcacccacgtgtgccaatattggcattaattgacaaaatatcgccgcgcgaatcacgaagtgactttttgccacgaacgcacccaatacacttagaatatgtcgaaaaatcttgttttggtgcttcttgaactttttcattccggtcaaaaacatcacacccacgtgtgtatcccaatattggcattaattgacaaacggtcgccgcgcgaatcacgaagtgactttttgcaacgattgcacccaatacactccaatatgtgctaaaatcttgttttggtgctttttgaactttgccattccagtcaaaacgatcgcacccacgtgtgtatcccaatactggcattaattgacaaaagatcgccgcgcgaatcacgaagtgactttttgccacaaatgcacccaatacacccgagtatgtccaaaaatcatattttggtggtttatgaacttttgcattccggtgaaaaacttcgcacccatgtgtgccaatatatgctaatattggcattaattgaccaaagttcgtcgcgcgaatcacga

SEQ ID NO: 20782 - DNA, 1275 bp, Oryza sativa
atcggaaagaagttcagagcaaatgcagtaaccgcacttacagagttctgctaaaatgtgcataaaacatggcccgtatagtatagaagttcaatgatcttgaaaacgaacttacagcttcaaccatgtcgcactactataaaaaaaaggaaatccagtaagctcaactagacttctgctgaaaagagggcgcagacctaattagcagtagattagtctcgtccttataaaccactatggcaaacacagtgcctttctaattaatcttgatcacttccaactgtcaagtgtcaatgatctcttttacattgtggctgctatcttcacaaggtgtcaaatggtcaggtcactgaattttggaagaatatccagcttctccagcatcatgtggttttaaataaaaatcgtagactagcatggttgtcacagtttgctgagataattcccttaatggcatacatcaactattaacccttgaggactagcaaggttacaccaaagctggtgccaattgccatgagatcacagaaattaggaagaaacttcatgtggcttcagagttggctaactgccagcttctaaatctgattgacgctattatttccaatgtaatctacaagaaactagtgcccagtgaaatatcactgaagttggacagtatctgcgagcgggtagttccaatctgctgtgcaacatcaagctgctcatctaatgacaacatctcatagctacaagagaaaaaaccggtcaattagctaggcatgttatgacgtacaatgattaaataacccaccataagaacttcctacaacacagtacaatttgcatcaatgcctcagaaaaccagttgcctgctcacttcgcggccaacagtagaatttccgttcaagcaatatccccagtcaaagaagcctatcagattactacttgtttgtgtagtcctttcggagaaatagtatgagttcgtacaaggtattaagctaccattatgattaaaccattacttatagacatcagttgtgtatcatgttgtggggactaaacattattaccgaggaatatatccattttacaccacttaacaattgcaaaggtctaaattacatgcttcttcaaaattatctgtttcataaaggtaacttttatattatttatctgaatctcttatgttctaaaacagggttaaaacttgtctgaaggcacaactcaaccaagggcgccagctggtctatggcatagactagtttagcaattgacggaatataaagtggataa

SEQ ID NO: 20783 - DNA, 844 bp, Oryza sativa
aaaaattgtccggacagacggaactatccgtaccagtttcaaccctgcccccacacttatcctttacccgtccttcagtaaagcttagggatctactagaattttgattttctgcccaatgatatgacacacaaaatattccaaggtttcagggttatggataccacatacctaatggtagttgactaaatctcggaaggacccaccacgtaccatgtcttgtacgaaaacaacctgcggatttaggaggagttccggataaggaaagacaaccagagttctacatggaaacgacaaggactactcggattgtatccatattggtttccctagttctacttggacaaggggacacctatgagtataaatacaaggccccctaggaggggaggggacaatacacacccaccatagaagacacggaacaacagaagctacaacatacaagccaacatacgccaagacaagacatcggatatcgacttcagggataggataagcacggctagtcccctacggtgtctccggatactgtcaggagagagaaagcgctatctctgatctcgccgggcacaaactcgaggaggaagactaccctgttgtcgactatgagtcagaccttcagaccgccatatcgaaaacagttagataggctaccccaaatattgtactggtgtgattatggtgaataagagcaataccggcttcggccaacaggatgtagggttattacctgacaattcaggggcccgaacctgtataaaaattcttgtctctgtctctttcacctcagtctcgcatatatcctagtaccaacgatccccatactatgcaaataccggaa

SEQ ID NO: 20784 - DNA, 583 bp, Oryza sativa
ctcggtacccatactggccatcacatgaggtggacggtactccaagatgctgtagttgtgaaagaatggaggtacgttcaattaccatgtttgaatttataaatctgattcagcatacttggtcagatatgttgctgttgcaaaattttgatcagttcatcaaaaaatggcttgtgctcttatcagccaagggaatcaagatatgtattgctggacgatggtcgcaaactctgcctggagtgccttgattctgcagttatggatacgagcgagtgccaacctctttatcttgaaatacaggaattttatgaaggcctaaatatgaaagtggaacaacaagttcccttgcttcttgtagaaagacaggctttaaatgaagccatggaaggagagaagactgtatgttgaccaaagctggacaatccatgattctcctgtttttcactatactaatgttagtaaatattttgtttcctgtggaaaccagggtcaccaccatcttccagaaacaagaggtttatgcttatcagaagagcaaactgtcagcacggtgagaactattctgagcatgagatgaatggat

SEQ ID NO: 20785 - DNA, 621 bp, Oryza sativa
actatagggcgaattcgagctcggtacccttgcaaaaactgcaaaagtagcagattacaccatatagtcacgagcgcgtccagcgtgctcaatttcaagcagacactagaattcagaacttgcgaatatagttgcaaaaagcagacaatagacaaccagtacgaccttggcaacagcatgccttttaagttcgataacttcttgacacattactatcatgatgatgtgactcagtaatcctttcgccttaatcccttccagcataggatgaggctggcccacgcccatcaatttctggatctgaaacagaggagaggaatagtcaagtttacattatagcatgagaaagtaaccaaaataatttgagcaagaccaaagaattaatatgcatacagctgctttcgaagtgttcctgcgtaagtagagcgaatcagactcgttgcagctgcggcgtccttccctgggccagcacagtcatgtgattggctgattgctaatcagagtcttcatacaatccctcatcgtcagaaagctcatcaaatgaccggatatctagctggtaacgcaagataccaccaatgccaccgaatcctctacaaaactgagatccctcttgagatt

SEQ ID NO: 20786 - DNA, 696 bp, Oryza sativa
gcctgcaggtcgactctagaggatcccccgctctccctgatcgacgtcaccccgaacacatccgtgaagaagttcgtgtcgtgcgcgaggtagaagaagagcacggtgaccaatgccatgtaggtgccgagcaccacccccgtgaggaagatctcgttgagcttccaacaatcgggcgtcggcgacggcttgacgcgatccttggagatggtcatgatggtgccgtcgttgaggatggcgatgatgagcaccatgaacggggcgaagtcgaacttccagatgatggcgatgaggaggaagccgaggacgatgcggatggtgatggacaccgcgtagatggtgtagttcttcatccgctggaagatggcgcgggaggtgagcaccgcgctgacgatcacgctcagcccgggctccgtcagcacgatgtccgacgcgctccgggcggcgtccgtggcgtcgtccacggcgatcccgatgtccgccttcttcagcgccggcgcgtcgttcacgccgtcgccggtcatgccccagatgtggctcatctcctgcagccgcttcacgatctcgtacttgtgcttcgggaacacgccggcgaacccgtcggcgcgctcgatcagctcgttgattggggaggccgttcacctggctgtttttgttgcccaggagggtggtcgacgggtacatgttggtgcccat

SEQ ID NO: 20787 - DNA, 3453 bp, Oryza sativa
gggttagtgacaaggcatttggcgatttattgaaactcgtcaagaacattcttccggggggaaacaaattgcacgagacaacgtacgaggctaagaaatagtctgcccgttaggactggaagttcataagattcacgcatgtccgaacgattgtatcctatatcgcggtgaggagtatgagaacctagaagcatgccctgtttgcaaagcactacgatacaagattagacgggacgatccaggagaagttgacgggcagctaacaaagaagagaattcttgctaaggtgatgtggtatttccctataataccacggctaaggcgtttgttcaggaacaaggggaatgctagaatgttgcgatggcacgctgaagagcgtcaacaggacgggatgctgagacaccccgccgatggttcgcagtggcgaaacatcgacagaaaatttaaagaatttggaaaggacgcacgaaacatacggtttggtttgagtacggatggcatgaatccttttggagagatgagcagcggccatagcacttggcccgttacgatgtgtatctacaacctccccccctggctatgcatgaagaggaagtacataatgatgccgattattattcaaggccccaagcaacctggtaacgacatcgacgtgtacctaagaccactggtcgaagatcttaaacagttgtggaagaaagaaggtgtccccgtgtgggacgaggacaaacaggaggagtttaacctacgagcgctgctgttcgtaaccatcaacgattggcctgcacttagcaacctatccggacagtccaacaaggggtacaaggcttgcactcactgtatggatgaaacagaaagtacgtatcttaagcactgtaggaaggttgtatacatgggtcatcgtcgattccttgcagcaaaccacccggtacggaagaaaggcaagcacttcgaacataaggccgaccaccgtacgaagcctaaacatcgcagcgggaaaacagtgtttgctatggttaaagatcttaaagtagtgttcggaaaggggcctggaagccagcatatagagagcgaagatggtcacgcggcgatgtggaaaaagaactctatattttgggagttaccatattgggaattcttggacgtacgccacgcaatcgacgtgatgcacctcactaagaacctttgcgtaaaccttcttggcttcctaggtgtatacggaaagtcgaaagatacactggaagcacgtaatgatctgaagcatatggaacaacgcggcgaccttcacccggaaccaaaggagaaaggaagccattacttgagtccagccagctacactcttagcaaggcagagaaggaaagtatgtttgaatgcttggagagcataaaggtaccgtctggatactccacgaatatcaagcgaataataagcacgaaggagaagaagttcacaaacctaaagtctcatgactgtcacgtgttgatgacacaactgctaccagttgtaataaggggtatccttccagacaatgtccgggcaacaataacaaagctatgtgcattcatgaacgcaatttccagaaggtcatcgatccggatagattagaagcccttcagaatgaagtggtgcaatgtctcgtcagttttgagttgatatttccaccttcatttttcaatataatgacgcatctgctttgtcaccttgtaaaagagatccgtattctcgggcctatgtacctacacaacatgtttcctttcgagaggtacatgggcgttctgaagaagtatgttcgtaaccgttctcgtccagaggcaagcatcgccaagggttatggaacagaggaggtcatcgaattttgcgtagaatttatcgaagaccttcgcccaatcggggtacctgaatcacgccatgaagggagactacgggaaaagggaactctcggaaggaaagcaataatgacggtagacaacaatttattccgtaaagcccatttcactgttctgcaacactcttcattggtagctccttatatcgaggagcacttggctctagttcgcgccaggaacatcggtaagtccgatgcatggattacacggcatcacattgatactttccccgcgtggtacgacaacatctcatgggtaacgagtcgatcaaccaacaacttgccttcctggcgaggggaccgtctgggtcgatcgcgacattccagggatatgagatcaatgggtacacattctacacgagagcccaagacatgaagagcacgaaccaaaacagcgctgttcgtgtcgatgccatgggacacgatggaacaactgccacgtattacggtgccatcgaggacatatgggaacttgactatggtcctctcaaggttcctctgttccggtgccaatgggttaggttgactggtggagggtaatgattgatgacagtgggatgacaactgttgaccttaacaaggttggatactcggacgaaccttttgtccttgccaatgatgtaacgcaagtctttttcgtgaaggacatgtctagcaaaggaaagaagggcagagggcctgatgagcctaagcgtcaagtggttctcccaggcaaaagaaaaatcgtcggagttgaggacaagactgacgaggattacgatcagttggatgggcaaccccctttcacggtgacgattgaccctagcatcctcctatcaaatgaagacaccccttactcacgcagcgatcacaaggagggaacaatagtgaggagaaagtacgtgcggtcaaccgtcaccgccgatgtaatgccgtaattattgtgtacacgatgtaaactattttggatgtattgattatccatataaatcaattgatgtatggcatatgttaattacgcacgattattagaggtttcaacaagtttaaatcatgtatatgttagttatatgtgatacttacaatttttaaaagttttaaatcacacaggtggcaatttcatatgtatgttaattagagtttttaacatttaatttactagcattcatatgctaattataattgactagaggatttttaaaagttttaaatcacgcaagtggcaatttcatatgttaattagagtttttaacatttaatttactatcattcatatgctaattataattgactggagaatttttaaaagtattaaatttaatatatttttaaaactatcattcatatattagagtttttcacaatttaatttactatctttcatatgctacttatatatgactattcgaatttttaaaaggtttaaatcatgcatgtggcatttacatatgttaattagagtttttagcatttaatttaatataattcctacgctaagtacatatgatgattacaatttttattaattttaaatcatgcagtatgtacacacatatcttaattagagtttttatgatgaactactgta

SEQ ID NO: 20788 - DNA, 63780 bp, Oryza sativa
ctgcctagggcaaatccccgcgccgacgccgccgtatctcgccgtcgtctagagctagtcgtcctcgccgccgcctccgcctcctccgctgccgccgcatctctggggtgagagccgccgccgccagatctccattcatgcatctcgatctctccgatctcgatctctctccgtcgcgccgcccgccacgagacgccgcgccacgacgacgacgcgccacgccgccgccttcgacgccgcgcaacgccgccgccgcatgccaacgccacgccgccgccgccatcgccacgccgccgccgccttcgccgccgcgcgcgcaatgccgccgccgccacgccacgccgccgcgccaaccgccgccacgccgccgcgccaaccgccgccccgatgccgccacaccgccgttaacgaacgagaacgagaacgatcgaacgaacgagagcgagaacgaacacgtcaacgtacgttgccgcgacaacgtgaacgagaacgagaacgatcgaacgaacgagagcgagaacgaacacgtcaacgtacgttgccgcgacaacgtgaacgagaacgagaacgatcgaacgaacgagagcgagaacgagaacgatcgaacgaagacaagcgagaacgagggaacgaacgtgaatgagaacaagcgaacgaacgtgaatgagaacgagcgaacgaacgtgaacgagctagggaacgtgaacgagcgaacgaacgaggacgaacgttaacgtgaaatgcaatatatatatatatatatatatatatatatatatatatatatatatatatatatatatatatatatatatatatatatatatatatatatatatgtatatatatatatatatatatatatgtatatatgtatatatatatatatgtatatatatatatatatatgtatatatatatatatatatgtatatatgtatatatgtatatatatatatgtatatatgtatatatgtatatgtatatatatgtatatatgtatatatatatatgtatatatatatatatatatgtatatatatatatgtatgtatatatatatatatgtatatatatatatatgtatatatatatatatatgtatatatatatatatatgtatatatatatgtgtatatatatgtatatatatgtatatatatgtatatatatatgtatatatgttacttcgcatttatcctaatacatttttttgtatcttgcagaaaagacgtgttgtcggagtcgtccgtcaagcctgagtggaagagctagccctagaaggaattggagcaggcaagtgacgtaataatataaatgattgttatatttgtaatgcaattaattaagattattagacctgtaattagacttatcatataagattgtgtagtgttctaatattatttgagttttaatataagattattttattgcaaattagacttagtatgacattattgactagggaattggtgcgactcctagcaattgactattgtagtcttaattagacttagcatatacgcacgaaacacttagcatacattactattttagtcttagcatgtaatattatttgagttttaatataatattactttatttgtaattagacttggtatgtaattattgactacggaattggtgcgacaagtagcaattgactattgtagtcttaattagacttagcatatacgcacgaaacacttagcatatacatgactattttaatcttagcttgtaatattatttgagttttaatataagattattttatttgtaattagatttagtatataattatttactagctagggttgtataatatacgtcacctagacttagcttatatcacgattcgtaattagacttagcacgtaaggttgtgtagggttctaatgtacgacatttacacttagcatacatgacttagattgttaaaacataaatgtctcatgacttagcatatacgcacgaaacacttagcatatacatgactattttagtcttagcatgtaatattatttgagttttaatataagattattttatttgtaattagatttagtatataattatttactagctagggttgtataatatacgtcacctagacttagcttatatcacgatttgtaattagacttagcacgtaaggttgtgtagggttctaatgtacgacatttacacttagcatacatgacttagattgttaaaacataaatgtctcgtgacttagcagatgtttcttgtatcaacagatggctgaccgcgatgaggaacagatattgtacgatacaatcgcggagggaagcagccagtactggaatgaagaagaggggaacgaggatccaaaccagtacttgaacgaggaagggaacgtggagagggatgcggaggggaaccagcaggggcacgtggaaagggatgtggaggggaaccaggaggaggaggctagtggtagtcaaccctccgttggacagaagagggcacgcgggcaacgaggtgcagcgaagaagcttgagggtcggcacatcataacggaagtggaagaagatggacgtcctagtgccccggccgaagccgccaagaactatgtacgtcacagcggttgggttgtgcgggataacgtgcctgtcagtacggtgtactggcgaagaacaagggcacgcggagatcatgagagctttgtcccagattcggagaaagagatgctgtggaccacaatgctcgagacattcacccttcctgcgggtacagaggacaaagtgaaaaggtggactctgaagaaaatggcagaacagtttcagagcttcaagggagatctgtaccagaagtatatactgaaggggcagacaccgaacttcgacacattcccaaagctaagggatcactgggacgagttcgttgcatataagacaggtgaacaagggcaggcgatgatggaaagaaacaaagaaaatgccgccaagaagaagtacctcaccacttggggtcaggaggctatagcgtcgcgatgccgaagtgggagcagatggaggctagcttgattgagaggggtatcgaaccggcaacagccaattggccggaacgatcgaagttctggtactatgctcacggtggaacgctcaacctagctgatggctcactggtcttcggctatcagatacaagaggttgcgcgacgactaacagatgcagtggaagcctcctctcagggcacgttccgaccagacagagatagggacgagctgacactcgccctgcagactccagagcatccaggacgaactcgagggaaaggggtgattccttggaagattggtttcaaggaggacatccacacgtacaggaggggatcctctagagtcgaatgaggagcaagagagataccgaggcgaagattgcagacctagagttccgggtatcgagctacgaactcaacatgcaagaggaggtggcaaggaaggttgatgaacgcatggccgcacatcggtcccatgatccccagccgaccattcctcctgcaatggtgagcccgtcaggaaaccgtagcagctgcgcctcaacggggcaggtaggatcacagagcatggacgccatgcaaacacaggacgaatcgacctgtcccgttgatgacatcactcagcggacaccatgtgagctgcatattcctttcaagaacttatcaataaaggtaagatttagccattccgctagttgctgcttatatatgttgattactaataaataatctctcacaacatgaaggtggcgtcgggcatggccatcccaacggacccttcaggtacttaccactgcaggccgattccagcaggatactccaaggtcgaagttgagttggtcgaaggcgcgtacgaggacctcgagctggattaccatggaggagacggtgagacgcatctacgagacacatgccatgccattattctatggcgcaggcggtacatcatcctccatgggcgacaagcggcgtctcgtgcaccatctcctccggctccgccatctcctcctcaggatcctgcaccgtctcctcctcatgctccgccagcaccgtctccaccgcaggctccagcatcgactcctcctcaggatcctgcaccgactcctcctcgtgctcctacacctactcccccgcaagctcctcttccggcaccttcaaagtcaagggcccccccagctccaccgcttgcccacacaagggcaacaaagaaggcgaaagttgacgccgccaagaacaaggacccggggtacgattgcacgcaagaggagcttgacgcttacgttgcatcagaagtcaagagacaattcaagcctcgaagtccagaaaagaagattcctatagaccctagtgtcaggaacttcttcaggggtatgtctgcatctgtcaaggaggccatcaagctatcggactatgagcgaacgctgaagaaagcatcttctggaaagtccaaaccagtccctcagcttggagagcaaccaaaccaggagatcgagccgttggtgaccggtaaagaaatgacgatagaacaatttattactgacaccggtctaactatggatcaattgctaggagtcgcaccaatcgaaaaggcggaagtgaaatacatgtacgaactcggtaaaccgcttgtcaagcctgagctgctgcagtccctacccacacaaatgtacaagttccatcagctgtacatggagatgagcgccaccggtagagagatgatcggagcgaggatcagggacacggacttcttgcaaggagatgacattctctggatcaatttcaggggaatctacgaactataccagctggacgccctcgacgtctctattatgagttgctggattttgtaagtatatcgttcagttagatttcttactatacgtctcctttaattaattaggtccttgtatataagtagaccatagaaaataatatactcccttttatcgttgtagaatggagattcaaagggcccgacggcggagggttttcgatactggattcatcgaccctcggaaagtaaacgtcgcaatgctcgaccaatatccacaagaaacagaggacaatctcgtccatctcctgaaggcgcagcattacaagacgttcatactgttgccatacaacacagagttagtttaattttactgtcttcctacataccaaatttcattcccgtacgaacttgctaagtgtttcatatgtaatgcatcccacgcacattgcagattccactgggtgcttttactcatcgacctggaggcctgcaccgtcaacgtatatgactcaatggataaaaaagagtctacgtttgacaaggttttcgaacttatagacaggtaccgtcataagttcctttgttaattaagaaaatcttgttatgttaattgctactacgaatcatagctttaaactccatgtagggcttggtatcggttccgtcatttggtccgcggcaaatggagagaaagacttaggcggaagttcaaatttcctgtgagtacacatgctctacatttatatttctccgattcaaatacatacaagtgtatattaattagatctctcgttgtttgtcatttatttgtagtgcgcaaagcaaaagcagggaactaacttgtgcggctattacgtgtgcgagtattgccactgccttgcagaccaaatcatcaccacaagagagctcgatgtacgtacaaataaattcaaaatttcattacgtagcgatttcttgtttaattactaatcaatttcatacactcatatagtttattcgcatgagggataacctgaccacacacaaggaatttatcgcggcggttcaagaacaactcatgggattcatcaacgaagaaatccttgatcccaagggtgaattctactacgacgaaaacacaattcaccggtccttagcttctgagctagcagcgagtactactacgtcgaaatcgtagctagctaggacatataatggattataattaatacatgactacatatgtttctatatgcatgtgtacacattttctataatgtaaatatattttgttcatatatatatctatatacatatgcatttgcataacatatatatatatgtataaatacatatatattatgaatgtatatacatataatataatataatatatatatatacatatatatatgtatgcatatatatgtattgaaacatatatatgcatggtttatatatatatatatatatatatatatatatatatatatatatatatatatacccatgcaccaacaggggcatgcaaaaaaaaaaggtcagctcgatctttagtcccggttggtgttaccaaccgggactaaagatcgatctttactcccggttatttcacccgggactaaagatagcgatctttagtcccggattggtactcccggtttggaaaccgggactaaaggggggttacgaaccgggactacaaagggtttctccaccagtgctagtaagctagtaacacttgcatctatcgacggttgagaaatgtacgtgcgtacgtatggctttatgatcggagctacatatgcctaacgataaaccgtacaaaactttaaaaataaaaaagaaatgctttataaataaaacctctctactacaaaagaaagccaccttaaatcaattaaaaagttccaaaacttaaagtttggcaatgatcgatcatccctgggattacaatcgagctgcggatcatgcaaccacaagaaaatttacagcggatcagtgcaaccacaagcgaaactactatattcattctaaaatgttgctacttagaatgagatgtgtcaatattttacgacggagaaagtacggatcagtgcaaccacataggaaactaccatattcattctaaaatgttactacttaggatgaggatgtgtcaatattttaagacggagaaaataatagtactccctctgtcccactgtcccagaatataatgcctcctccaacaaggatgagtcagctagctcataaatctccacatcagcttttgtatgatgtggaagagagagaaaataaggagagagaatgcactatctcttcttcaagagctaagctcctaaagaaaatgtaagagaaattatggaacccaaagcattttaaacaatgtgctatgagacaatctattggagaggtagactttttgctatctcttgtatgaggtggacaagcatgagctagtgcactagctcaatcatgaaggaggcctaaggagttttagagttggacacggttattaagaaagtaggtagaagtgaatgatggagagttgtggttggatgagtagtggaggtaggtggaaaaaatgaatgatggagggttgtgattggttgggaagataatattggtggagaagttgttatattttgggacaaatactaagggctaaaatttgttatattttaggacggagagagtatcaaacaagatttattaatggacatgaccacataaaaaaactaagatcgcgagctactggactagtcctagtagagcatgaatagcagactataaccgactataaatatattttaaagagataaaaaaaagagagaagagcggcgggctttagatttgtagccagctgcagtacggactccaaaacataatatgtgtatgacaggtgggatcggatattaatagtgtagtaagcagctattgtatgaattggctataagtgatttggagttaatagttgggtatactgttaaacttgctcgtagtagtgtggagtagagtgtgagtgtgtaactgcagctagctaaggtagcagtcattatcttaaaaaaaaaagctaaggtagcagtagcacgcgcgggcgcgggcaagaggacgcattgatggacgacggcgagaatgcattggcgcgcgcggcagtggcattgacgccggccggaccacgcaatccgcgacacgatctttgcatcatttaactccacaccccccacaacccggccgcctcgacgtcgcgccgtgtcgtgtgcttgaaaagaaaaatgaatacacccgaccgtcctgtgtacgtacccccaaccgcatcgccacgtgcgcacgctcatacgtgggccacacatgcatgtactccctccaaaaattcacggtaacatcgttaatttctagagctggatatattcatagtcccataaattatactccctacttccctaaatatttgataccattgacttttttaaatatgtttgaccgttcgtcttattcaaaaacttttgtgaaatatgtaaaactatatgtatacataaaaatatatttaacaataaatcaaattataggaaaagaattaataattacttaaattttatgaataagacgaacggtcaaacattttaaaaaaaagctaatgacgttaaatattttgaaatgggggagtatatttttgattagacggtaggccagaggctgcttttaattgaaagccaaacggcctagttcagctggggataccagcgtacatgaaggacaaacttcacacgaggaggaacaagtgctcaacgagcaacccaacactaacacataggaaacacctccaaaaaaactaaacagagcgatcacaaaagggttcagcgcaaacacagtggccaagattcacatagctctaacagctacagctctaaggggaaccagcaaactaaacacaaaaattaacccactcccactcttggggtcctcagggtcgatcaacaccatcagcttcatcctttccaccagcgcttccatcttgattccttcctcaggtcgtcatagcttcctccactgcaaaagattagaggtaatttaaaaaggtatagtcagtacgtggggagtaaaccagttttcctctgaagatcatattatttctggttatccagagattccaacaaacagcagccaataaactcaaagtaactctaatagaaaattggttagtgtcacccttgcaaagaaaaaaaaactcctcaaaattcctagggatggtattcctatttaaagtgtccctgcaaatgcaccatatcagtcccataaatcaatggattataattttgtaaaccattataatttaacctacaaattttaaatccagcgaggatctataatatagagttgtgtaggagtaccaaacaagacctaaattagtttcattaaatttatctgtgatctagtgttggaagtgctattatgttttttctataaaattcaataaattaaacttgaaaaggtttgattagaaaaagtataaaaaagtatcttgcaatatggaattgaggtggtagaacagtgaggttgtgtactagtataagattatttcgcaaattttgtttttcaacttttttgaatttagagaaataataaaattcgataaaaaattattcaggcctaaatttcggcaattaatttctaaaatttcagattctccggtgccctcagcatatttttgcatacccaaatactttctccgtctctaaatataagatattttggttggatgtgacatacctagtacaacgaatttggacagagaatatgtcacatcgaaccaaaatcccttatatttagggacagagggagtacttagtaaaccctagtatccatgatccatctgtagtccatgcatcgctgacatgtgggccacgcagttgctaagctaagctacaaacagtgaggctgtgtacctgctcggctgcaataacttgggatcctgccaagtttaattccagttgatactgtttctgcaatccacaaagcgtatgatggtgattacattaatgtgttactacgactttcaacttacgacgacgacgacgatatgatgcgtctttttttggtcctcgtcgccggcaatcatggtcgcacagtaattaacacagtggtgtgtagtggctaaaagctgcatatgtcatgtcatctctctgaaaaaggctggctgttattatgatcttagcagctataatagctctgactgattaatgatccgtaaaaacataatgatccaagcagctacgagacgcgtgaaccggttaaagaatgttcggttctttgtcttgttgactggtaatctcagtccaaatatttccggtgcagagaggagagttaattactatagtactaattaatagtagtagtaatagtagattgtttttgcttggaccagctatataattactatagtactaattaatagtagtagtaatagtagattgtttttgcttggaccagctatatagccgaccaggcatgcatatgcagtgatgcaccgaattaacctgggtgatctattggggaaacgccaagaggaactctctgcattcacagataatacagattgttctaatgctgtacgtgtgccttaattttgttttggcatgtcatgtcttaaaatgcagaggtcgtgtttggtatctttgatacagtctctaattcgcatatttcgtaattttatttcgcatatggtggccttccatcgtttaccccgtggtttataagctatagcaaaattttaaattttaaaatgtttttgggcttttgtatcgtagtttaccgaagaggctgttctgtggaagaaagctgggctcctcccggattagggtggctgtcttcttggttgctaaactgatgacgcgagatataggccctatgttttaatcctgttctttgttcttctgtttgttgttgttatttaaaactcctccaattcttaatacaaatgatgtgcaatcgttttgcgtatcctcaaaaatagtttagtatttagtgttcgttttcaaatcgcaaaagaaagtttcttcaataaattattttgtagttgctataagctgtaggacaaacgatgaatgccattttttttgcccctcgactgcatgaactaaaacatgacttgcattttggatcagaggtggtatgatactttttgtagcgtttttatgctatgtgcatcaatgttgtatgatttagatggtacagtagccaagggtactaccattgtatgcctacattacaagtttttcaaattgcctgccaagcttttgtttccatgattggaaaagtttacctttctctttgctgtttgtttctgaatcgcatccatcatccatggatttcactgtgactgagggttgcggaattaagttgtgtacattttgggctataggctttttaattagtcccctgtcccctgcctgggtgaagatgctgtgcttggattttaaatgacatggtagtagtagtacgagtacatagtacgtagtattcatctgtaggctagccaactctcctggtgaaagctttttttatgaagttgtgagtagtagctgtaactgcatgcatagacaacgagtttaactgcagtacagtaacattggcttccaactcgcaatgctgtattgttgttgctgcgtgtaacagtgctctgggatctgcacatttctgggccattattgtgaatctcttgcaatgaagcaaaactgtgtcattatactgttccaatatagtagcagtacagatttacaaggacactggtttggagtgaggctccatgcttttttctgcacacatggtagaggtcagtaaattacctgtaaaaaaaaatctgtaacagccttctgatctataaagaatccaggccaatccaaaaggcaggaaaacaaatctcacttgtgcttgatagtgcaaatagagtatttatgtaactcgacttgtttggtactgtaccagttaatgagcaggttaaccataaaacatactactgtttccattagaatctcacttgtacatggtagtataaatttcttattaatttttgtcacataaaaaataccgctgtttccattagaatttctgaatgccatacatgtgtgattggttgggctaaccatatcacaatttaatcaatgtcgtcagttagcccttccaaaagtaactgaaaagattgtttgtacaattgcacatctcaaaattgctttcttttcctgtaaatggacgcttaatgacaaatcgatcgtgtataacttccatcaaaagacgaatctatgaaatttcaaaatgggaaagtccctgttaaccggatatgctcaagggtgcgctttagaccatactgaagaacagctcggttgccagctctaaaaccatcgccataggccattgaggtatctgactcaatttggtgcttgaaaaaatcaccaagctttcgctcaaactgagatcttcccccctttttcgatgatgtggatgctgatgaggatgaagacgttgaagcaccattactgcctgatcctgcaatgatctctgactcaatccacatgtgagcaagaacttggcatatgccctcttctacgtctggactaagtgtgcgatatcctgcaagtagatatgcattatagcatgaaatgtccatatacattttttaagtaaatgagagagtgatgacagtggcaagctaatgtaaactcttcctcatacagaataggactgaagtactgaatcatgcgctgcaatatggattctctctttttctctattattcagcaccttccttagataacagatttgctaatatcattactattagttttgatttcatattcagcggtggacagcatgtggtgatgtgactagcttgtattttgtactgagatttacaagattaatagtagtgttgattgttttgtcattgccaatatacttattattagtggcatataacggaggattgccaacaatttacatggtaactccccaagttcacccactcatggacttgtacaatcttgaaagcaagatgaccaagtttctagcgaagaatatagttttagttgctatattcttggttcaggtactcagtcatatgctaaatggcaaattggcagtctcaccacaatgcaaaaaaatcctggccctatcaggcaatcaccctcaccagaatagctagtcattataagtgagaagtaaaccacacagttttctgtaggaatcttgaaccatgatcttttttagtctttaccacaaccaaagaccgtgaaagttcaatgctctagattaccaatgtgttgtacttgtacacccaataagagtagaacaattagtacactaaaaagagtagaacaattccattgatgtatgggcagtttacattgatttgtagcaactcaattgcttttactaacctgtttgtctttgaacaaacatgtgctatttaattgaaaataaaaggtccttttcctcttctctgacttctcgtgtgttattttattatgatgtttgtccaagaatgaaaatgagaattaaaaattacctttaagtcgcaaccacgcatgcatcatctcatgagctaaaattgaacctgtcaacaatctgcaagaacaataacacattaaaataccgacaatgtacttcatgaggtcccaatacagaagaaccaaatgataacacaacaaataatttgcatattgtactgcagaagctacagtgacaaggcacaagagtaatatcttttcccattaactctgtagagtcagcatgcagtccagaatatcttcagtgaatccataacattttttagaagaatgtattctccaacacagaaagaaatattatttcaaatcagttataaattcgaatattcctcctagtttttgttgatattaaaagagtagcaacaaggtaacaatggcattatgaaacagatagtaagtggttcaccttgggagaccataaagaatgagaattgcagtcacttcacatcgacgagtcaacctatatggctccgttatcatttccataactttatttccagccattcttggtctcctcaatatctaaaatattaaaaataaatgctggaactcagtcagaagtcagaacacagcagaccaatacaattgaaatagaatttaaattatgaaaagatccattcatctcatgctcagaatagttctcaccgtgctgacagtttgctcttctgataagcataaacctcttgtttctggaagatggtggtgaccctggtttccacaggaaacaaaatatttactaacattagtatagtgaaaaacaggagaatcatggattgtccagctttggtcaacatacagtcttctctccttccatggcttcatttaaagcctgtctttctacaagaagcaagggaacttgttgttccactttcatatttaggccttcataaaattcctgtatttcaagataaagaggttggcactcgctcgtatccataactgcagaatcaaggcactccaggcagagtttgcgaccatcgtccagcaatacatatcttgattcccttggctgataagagcacaagccattttttgatgaactgatcaaaattttgcaacagcaacatatctgaccaagtatgctgaatcagatttataaattcaaacatggtaattgaacgtacctccattctttcacaactacagcatcttggagtaccgtccacctcatgtgatggacagtatttttgtaaccagaaaggatgtgctctatattcaatcaggccattcatatttgtaggaatctgaataagaaggaactgtaagatggcgcatttaaaaaaacaaaaagaaattgtcggctgttacttaacacatgttaacaactttcacatgtcaattatttgctgccccatgactagtgcttttcaaatgcaaacatggccaatcagctatccacatgattcaaggctttcacaattgtaatagaaaatgagaaaaggtgaatatgcatgttaatcatatatcagcaacagtaaacattgcaatcatgatggcatgtggagtagtttcctcatttaacaacagcacggtatatcagttcagaggaagctttgatagtactaggtatgaaaatatagaacaaaacgatccgtcttatgcaaacagataagagcaaactaatgaagcgactcttacaaattgcttgcagacatcacattttgggtgaaagcgctccttgtagcatgttttatggtatggatggtttcccgacatggagaactgcatagtcatatattggttgactataagcatagaaacattactcttgcagacatggataactgcttaataagtaaacaaaggagttacctcatagtcatatattggttgattacaagcatgacagcgaaaacattctggatgccaaacagctcccatgcaactaaggaaacgcccatgaccaatctcactgtgacatccggcacaagtcctgaggaaataagcgtatatattaagaaacagtaagagtaaaagcaactcgcagcatcccattctcgcttaccaattaccatccccaagtatcagtgcagctctttcttgcattttaacttttgggtaacaaaatatacactaatcacttttttgctttatgacactgtaaagaacatatcctgggtgcttctggtgaaggtataatggaaccctgcagattttgcaggacttcaaaacatgcatgcaatagtgcaaccataggccacagtcactgcaagtttaatcaatgaacccaaaagggggtgatttcttctatggttgacacctacataccataaggggtaatctcctgtgcttgctgtggctgtggtgcagctgacagctgcaccaaatctcagatttagcagtgtctgtggctacaacagctagcacgacctataacctagatagtttgaaccttcttcacaggggtaaaagaaatatttacaaaaatttaatttggcaaaactgaggtccacagttttcaaactcgcaaaagagctgctcagctgtacaccttagctctacagaattgtatcaaacaaaactagggagattgcctttgacctctttagttcatatgcaaactcacactgaaaatctggtacataagttttttaaatcaagatacacccactaaaatatatctgtgaaccccttacacaaaaatgtgatatccagggaatgaattgttaaagtcagcacgccgcggggcaatacaaaaacaaacaaaagtggtgttttaaaaaacagtagcacgtagtctgtatggttcaggacttaatttattatactgctttatggtgaatactcgtatcagtagttatgtggcacttcaacatcaatgaacccaaaatagcatgtccacataaagtatctactacaaagtatctagttatactaaagtaagaaaaatgaaaatgaacctgaatccagaagaaaacataaatggcagtggttgatacatattgccaccattggcgttgccattttcacgagcacgaggaggcgattcaacattcaaactttcctggatagctcttgcaagttgttcatcctcctccaaatgcatgtccttttctagatgagtgaaagaaaatgaaacaaaaagtattgcatgttaaatgcatggattcatcgatcatagacacagaataccatgatgtagaattgcttgataggtagctccaaacagcattttatataatacttccagatgcacttttattacttgggtacagttctaatccaaacatttggtacagaagtatatacaaaatgtccacactatgattttcgatttttacatctagaaccagagaactcgcaccaaacatttcaccaacacataacaaaaaatagccacaattcaacatgtatatttctcatgaaagaataacacatatataaatttctttttctcacaatggatctgtttatgctttgccgttgagtattaacatactattctatattgtgactcaaaagaaaaataatgttggcctagtccttgtataaatgtgaaactaaaaaaagatcaaccaagttcagaaacagagagtgtgaagaaacttatcctaaacatggactccatatgaacatactgtatcatcggcaatgaactagctccaaaaattttctgataggtgtggaaataagcacaaggggctctcttaaaagttaaaacgctaagcactttgacagatgtcatcgaataaaaatgatatgaaggaacagctgctggaagtaaagaagcggacaaatgtcagcctttttggacagtaagtactcaaacagcagaagtactagtattagttaccatactaacctattgcctttgcctttctttgttcctcctctaatagagagagtgatatagcacgagcgatatcttcattgtcaaattctgacgggacatcctaaattgaatttgaaaatagatcagctacatagtcaaaagatgtagattcccattctttttaagcactaaataacagatactactacaatggcatataagctcattatatttggaagcaatttgtgtcatcctgaacctagaggcatatgcacaaaaaatcagtggtatagtttttgttaatacttaattcacattgaccaatcaccaaatcacctgaaactcaaccaacaaaaccacataacagtattacagataagaaaaattatgtttatatgacctactaagcaagatagcaatgtgaagcgatgatgtatttttcagcaggggaaattgcatttgtgcacctccaaattcggagattagaatagtacagatttacaccaacagaactggtaatagcgttatgctctgcatacaaaggaagacataaaacacacagaattgttctccctaaccagggtaaaaaatttcttgttttgtacaagagcgtcaagatatagttacattttacactgtaagtggcgtacatacaccatgctgatgagcatgagaagtttgcaagagttgcaattgtgagtacatgaggtgcaagactggttgggcctgttgcctcaacttacaacaatctacatcgtcaatgacaagttgacggagatcagtagccaacaatagcaagtcgagttgaccaaatgtggactctagtgggtacaccatctaaacacgggaaccacatttcccatcaaaaccaacagtttgcagttttctatgtccatatcagtaatggcaaaacttttgtgtatggatgtagccaacactttcaagagggataatgatctatccgcaactgttaataataaaaatattttagaatatggttggaaagttagaacatgatggtagtttttttttcccacatctattggtatttcttttatggcgcagaatcgcagtacattgtttatagtttaatggacaaacagtcaaagaccaaaattttgattgtgaacatgccgcaatggcatatgttatagaacaaagggagaaacaaagtgagatttaatactctatacgagggtgcaatccaagctttttggagcacatttcaaatgcatctcctttggctatcctagttttataagaatgcacttttgccctaacacgaagataaccgtagaacaattaatgagctcttactcctgagaggtaaatgtataacacagaagaacttaccgtcacaactgcggaattagagggtccattccatatcgtctcctccgcgggtttgctgtggtattgcccttccgagattttgtgggttgaacctctaaaaaatttggtcaaccaacccatagagctccaaatggcaatgttggaagggacacttttatctgcaatcaatccaagatgttaggataccacaatataacacaagaaaaatttcaagcaagggatcaacaccagagaatcataactagttaccaaagttagccaagttagcagatcgattgcaggtccagccgtttgagtaccctcctcctcactcaggcccctaaaccagaaacctcctaacctcacaggaatggttaacaggatagatcggagatcaagcgatgattctcacagaccccccactgggttttctatcgctagcagcgtcgcattagaacgtaagcctggaatggctcaaaaaaaaatgcaggttctccggcatcaggcggggattacgagcggcggcaagatcgagagggggggcacacgctccgcgtctctatcgtggggaaggggacgaaatgccaatgcccaccaccaccaccaccaccaccacccgcgtcggtgctaaaattgcgcggagaaaacgaagggtggggctccgatcacctgatcaccgcgtcacccgcgcccctcccgcggacgggaccgccggcgatccgccaccggcctttgctcgaccaccaccagcagcagcagcagcaccgaaaacccgacaacgaaacgaaggcaagctacgaccgacgacgtccgacgtcgcccgccgcgacggaggagggggcacgctcgatccccacctccggcgtcgtacgcccgccgtgcccgtacgcgcgcgcgctcgggcggcggcggcgagcgggcttggcgtggggtggtggattcggggtggggttgtgcgggatttgggaatctgtctcgcctcctcgctgctgctttgccttgctttttgtggcacggcaggaggaggcaggtgacccgctcccccgtaacaccgcggggaagttggggggttaatccatctgtttgcagcttggtaaccgtgtaataaactaataacactgccttaaaaaaacgaaaattttaaaatgggttggagcatccatggttgatagaggagaaaatggtgagaaaacatgtattcgagaggatttgaacttaaggtcaatgcattagatccggtttagatgggattaaaagtaattttaagtctctatcgcatcggatgtttgggcactaattataaatattaaacgtagactattaataaaacccacctataataagtttttggatctaaataccatcttactctaagtagctgtcctatcaccgagctacgcgccggtgcattactccctctaacttgacgctagatctgtttgttcctgtaagcgaatacgaccgtctaattgtgaattagatgaaagtttacaagttatcgaataattatctgaacagatataaataaaatagcgtaactacatatttaaaatcaaaatacccacttcacaagaaaggactagacagcctatacatccttaaagttgtcatttgtttcttttcccttccagaaagtcaaatatgcagttttgcacggaacctattcgcttatatcggattggttatatttgtttttggctctggttgcgtttttttcagggttttccggaggaacccgacgacggacggacggaccaccgccgtcaccgcgtgagacgacgaagagggacacgaaaccggcgccgggaggcgagcgagagctcacgcggagaagcaagcgacgaggagtcgtgttgacgccggcagagcgtacaggagacttggtggtagtagttgagcgctacgtttggactttgaacctaggcatggcgctgtttgattgtcaccagtttgaattttccatgtgcaatcttccaacgaccatttttttttcctaatatgtagtggtgtagagacgagtttctgaaggaaatttgacccactttggctgtttactgaaattaaaggcagttctcatgtaagcatgacagaaaaccttggtgttagaatttagtgagcaaagaacatgattacatagggaggtgctggtgcaggcaaaccatcagcgaatttacattgcattacttcactccacggacattttgacagtgcgttttgtacttctctgtattgcgaaattcggatcatactagtatcacatttacattcatgtacggagtacttagtttcggtaccagtttgtggaagtcatatgtgctcacgtggttgcttgtacaagactaattcctgctcaagctccgtcctggcatcacccaccgtcacccagacctcggagattttctcaacggcgccttcaaagagatcaacaatggtgaacgcccgcgatgtcggaaccatcagtcctgttaatccttcgagcccagtcttttcgcttgtggagattgcaggctgcctgcttgattgcgcatgattcactctaggcacaacggcgccgttcagatatatagtccggttagctccaaaggcaatcatcttccgaaggcctctcccgtaggcgaggctcttgtgcatgtgaccgaacacgaccagcggtatcgaaactccggtttctctttgcagatcagatatggcttgctccagatctgcggaggttcttgtctaagatggcgtattaagcaactgtacaagtggaagtatcatcgatggaatatcagacctggatcaccatgatcaccaccaccagcaacccaatcccgcccacaaatatcctccattcttgagcctagacctgtgtaaccataatttaatgtaggcatgttacagcatatgtgtgcaagtgcaagtatatgtagtttgctagtttaaacgttcagacacctgttggcccattgtgtgccagtaatatgacagcatgctcctttggtgcatttgtagcagcatcatatatcctctttgcactttcagccatatcattgacaccatacctacataataatcgtaggatcaaataaacaatggtagacaagtttccaattatgaacaagagtaagagttcaccaagtaaaaaaaggtagcagtattgtgtctgtcttatgcactttgttttacgaggtggactaaccatccctgactacaccaccaaaataataatttactatagcttcacacttcttattacagtgtgctatgtttattttatcattaccaatatatactgcgctgatcgacaagaatcaggtcaaagcataatcacctactccaccaatatccttaccactgtagctcgatttcactgcatgttactacacagcagaagtagtatgcaataagaaaccaacccggtgaagcaactaagaatgacagctatcaacaatatatatcatcaaactctaaaatattcactacctaatacagtagtgctacagatgagaacgaagtataagttggtaactctactgtttattgtgccattcacccatcatttcacgagttcacatacatcgtttgcttcttaattcaatatgaaaagaagggaaggtaaaaatgacttgtagaccaaaatgacaaggatataccaaactagtatctttaggaaaagtatgctgcaactcatttctcttatgccttacctaaattactgcatgtttcacatgaaccttgtaactattttttggatactgtggatcattaggtctattttacataaatctattataaatagcagtagtattttttcagtagagccctcttctactgtttcatgaaaaagaaaggacaactaaggactccttagtaaggagaagtatataccaaagaaaactgataaacatgtgtatctattggttagcatgtctcttaccaaccattttgacagaagctttggtctaaatatcctattacccccgcaggaaaatggtcgtccaccaacaacactcagctttattgttggaaaatccaaacatttgtacccaacatgctgctcaccaaggctgaaattggcaacaaaaaataacaacagaaaattacttgccgcaaggtctgcaaaaatagtaccagagtctggtgaagacaagttataacccagaatcatcctgaattgccacagcttattaaaaatcatggaataatcaggccaaaatttcctgagaatcacattttttccagcaattactagcacagttttaaacaactcacttcttcttggatttaagtgcagtatcagcttcttttatttctttcaaaaaaaaaagagatgcaaatcatgaaatgacctagcaacaatgctaaaaatcaaagtaatacctgtttagtgctctggtgcaactgaaacaactttaaataatgcaagttttccttcaaaataacaacaattgtgcaactcatataacccattcattggcatttcttacaatagaaattcatcaaatgctagtgttaatcataacactgttgtattaaacataaaagcatattcacattaaaggaggaacatcttacctctctagctgaagctggacacgatctaccttcctgaatgccaaccaaggatacattcatcatttcatcaaatatcagtgcatttatgttgaacactatccttgttggatgaaagaattattcttacttctctgaaaactgatacgtgtgccaacagtcatgattcccaagaatagctgctttggggagctgaagatctgaaatgcttttaacaagttgaacattctcgttgccataatcacctgccataaatggaggacagcaaacaggagatgtaaggaataagcatttaagtgtaacttcacaaagtaacgagtatattatgtagtacagatataatagggcaaagggcgcacctgtaaaaagtaccaaatctggctgcattcacacggagagaaagttagatcttctgggaataagaaacataatgttatagaaaataaatgtagtacggatatttttctatcaaactccagtgtcattttggcagctggactgtacatcagtacatgttgatggcaggcatacaaaaaggcgtagaacatgaataaagaaaaggacagactgcacttcagatgatcttacatcataaaactagagacatgctacaataatcagatgtgaataacttaatgcaatacacagatacaattgactgaatttatctggatttgcaatacctggagaaaatgtagggcttttgagtcttcctcaagggtccaatcattatgctgcaatgttcagcacatcacaacagccaattagtgcattgttctcatcaagaggatattataatcccttgagccataattgatgttataaccaagtcaagcatgcaaataaagtaaaagccatcatattcctcttagtacaagaagtaaagcacatctcgacaggaaagcgagctaagagatttcaaacccacaagatcaacaaagcatggtatcaaaacacactatcctagtgactggttcaagccacaatatgttgtcactccgctaaaatctcactccctgcatcttctctccaagaagacattttacagttttggcttttcacattgtagttcacaaaaaaaaactatctctgcatttgtcccttcagatggaagtcaaagctttatccctcatgaacctcttcgcaccaccaaattcacctccatccaaactactactactacaatcaaacgccaccttaaacgcaaacccccacacagccacagtgatgaatcacactcatcatgcactcctctcacagcatctcaagatcggagctaaactgagctaagaaagtcaacaagtatagatgcctcagtttttttcttctttttttattttttttttgggggggggggggggggcgggaattggtagaatgcttccgtccccaaagccatctccctctcactccgaatcccctatgctacgccacacgaaacccaccgagaatcgcaaggccacaccagcacccatgtctggcctatcccccatcccaggcacgccgcaaaaaaaagacggaggaagagggcaaggagggggttaccacgtcgccgacgaccgcgacgcggacccggccgcgtccgacgccggcgctggccatgctcctgcggctgggcctgggcggcggcgaggaaagaggaggaggaagaggattcgcggaggcgcgcgcgacggcggcggcggcggcgaaggagacagcggctgctcccgctgccggccacgacggagtgggaggggaggagcgagaccgtagcagtgcgggcctcaccatttctttcttccccccttcttttttttcttttctttttccctctcgaaatggtggcgtgtgctgccgtgccggtcagttgtcccgtgacacctggcgcctgacgtcccgccgcagcggttgggtggcgaggttgtaggatcgaatcatattaagtaagccaattagaaggggtgaatagttgatatactcaaaaacccaaacttttagcggaaataaaagttaccctcaaatttgatgtagatcggtctgaccgaggttgatccgccggtctgaccgagctcatgtcgccggtctgaccggtgttgatccgagctcatgtcgccggtctgaccgcctgaagattgcctgccgcgtgtgaagtcgccgccggtctgaccgcctctcctccgtcggtctgaccgccgcctgtcaccggtctgaccgccggtatgtcgctggttagaccgccgaaacccgatgaaacacaaatcgaagaactctcaaagtagatgacaactttattacttctctctgtgtttacaaagtgcatcaacagcactccttacaaaaatctcgactaaactcaaaaccctaactaaactagcaactcaattgctctcaaaaacgataccgggaagcctcacgctccccctctatttatacatgaggtaggcagcctaaagccacgaaccaagctcatactaagagtcctagacaccttaggaaaccctctagtacaagacacaaactttacataatcaattgtaccaaatttggactccttccaaattcgactccgcatcccatacgcacacaataccccatcgtatgccatatggaatcttcaccaaccacgtgcatcaactctagccttagtatcccgcatgatatctgaccaccacggacatcgtcttaccaccaagccgactcccggtccatcaccgcaaatactctcccgaggcatcgagtcacctacacatgaaataaacaaagaaaccatattccgagaccaagctatccccaacttgactcattgttagcaaacaacagtattatatacgtatagtatccatctagaagccataaccatgaaacaatcacagatatccaaagaaacaacccgaaaccgaaactgacacagcgtcggccggtcagatcgcgggccggccgatctgatcgctcgatcaccaccggtctgaccgacatacaccacccggtcggaccggtcacataaaataacagtgaatccgattatcacctgaaaattgattatctccaaaaccacttcgacgataatctccaaatatcaaaaccaataatcacagatgccaattgttcatcacagaataagaatcaaaacacactttgatcttacagaggtgcccaacacgcctcccttttgagcttcgcagtctaactataagaactttgcgaactactccctccgttacacctccgttacaaaatatagaagcatatcatccgctactacgttcttacgtagtatttcgaatattttacgacggagggagtacagagtgcaattttatataaataaggttgtgtttacgatgataaagatgatatgtgttatgagaacttctatcacaaaaataatggagtaaattacatcgttggtacatgaacttgtcaagtgggtgcaatctagtgcacaaacttgtaaaatactcgttttggtgcatgaacttgtctggcatgtgcggaggaagacaaaaagatattacgtggctaatcttattatttaggggctcaataagatctatgtaaacatatatctaagaaagtttattattagacatacacatcttcaataataatagaatggataagagatcgtataaaaagattaaaacagagcaatgatataagagtgagaatatatatgaaattcatcatttccatgatgaaggataaagtaggaccaaatatataaatattgcatgtcttatgtatactcgctacacgtcacatctaatcaacatcagcttcgtaaaattaacattgtcaagctattttggtcatcgttcgcacgaagtagacaagtttgtgtatcgaaacgaacatttcacaagtttatatactaagttgcacccacctagcaagtttgatagcaagtttatgtgctatcagtgcaatttactcaaaataatggtaagactatttaagtgtgttatcaatattacatatttgtgactattttagtctggtgcactgatgttcatatgatgttttatatgagatgaagacctatgatataatagagtggactacagtaagtcctaggctagattcaccccattttcaaaaccggctataaccgtgtttttaccgggtacaataaaggcatgcacacaacaacccatcaattttaaataaacttataataatttaaattttggataaatttatatggtttctcacgttttgctgtgatattgtcgccgagatgtggttggctgcaaaagtttcaaacatccctatatcaccatggatcatatagtaaaaatacgtggtttagttttgttttgacacaatatactagacacgatataaaagtgagatataacttgaatgtatcaatgtgcttgtaactgatatgcacaggtgcatgagggaacctcaaattagccaacacgtacatttgcaatttgcaaaggacaaaggaccgctcaatgtgatagccaaattaacatgataaacagagatagcaggttcaccttcgcttctcttgagttgtccaggacaagatgttgtcataattgctactccctccgtattttaatgtataacgccgttgactttttaaccaacggttgaccattcgtcttattcaatttttttatgcaaatacaaaaatacttatgtcatgcttaaagaacatttgatgataaatcaagtcacaaaaaaataaatgataattacataaatttgtttgaataagatgaaaggtcaaacatttgttaaacagtcaatggcgtcatacattaaaatacggagggagtactaactcccgcgtcctttctagttaaaattgtttactgaaattctattggtacaatgaaaaacatatatacatacacatgtcacattggacttgagaattgaagccccagaaaagagtagcaatggagctcctaattattttcttacaaaagaaatacacaccacaaccacctctaatgcctccttggaacctaggaatttggttctatatgaatattgaaccaatttctatgaaaatcattacattttaatttaaaattaatgcatttagaagagacttacatttttgggacactactcaaatagatatattttatctcatatacaattaaaattataagttgacaaaatagttaatatgtttcaatggttggccataatactcgctcgcaattgtccaaataaataaagccctcatgaaatagaggattgatttagtagtacttctagcaaaactataagttctatcaacatcatgtgtatctctaaataaggcatgtccatgcaaagcttgcatgcaactattaaatctagccatttgtttctaagtcaagcaacctcctcaatatctcagagaccacatgagaaaatgacaagaagttctctccgtctatttgttttcctaacacaatatgcatggtcaattaggcaacgtagctcttatatcgtttttagcatgaaaacatgccaaattttctatacccataactatttcatgattttcttacattcataatcattatatatcgccagtacattaggcccagcaagatgaataatgccatctaattttccacggctcgatgactgccacgtgtccagttcctccgaagcagccatcctcagccgtttgattcgcgtataaatagccacgggcacccgagcccaccgcctatttcaccacccgcttcccctcccaccctcccccatttgttccaccaccagctggacggcgagacgaagcggaggcgagggcggaggcggagcacccctcgcggcctctcgctttaaggttcgtgctctctctctctctctcctccgccgaatcccccaggcgctaacgctggaccaaatgcaggaggaaaccctagaggaagcgagttggtggaggcggcgggggaggcgcgatgacggggccgcggggtggcggcggggaggacccgccgcggacgtcgtcgggcgcggcggcgtcggcctcggcgtcatccggcgtgccgaacgagccgctgaccccgacgtcgatgctcatgtcggggcagcaggccgggctgaaccggcgcgggtcgaggagcgcggcgatggcgacgttctccatggaggtgttcgacaacgaggtggtgccgtccacgttgagcagcatcgccccgatcctccgcgtcgccgccgagatcgagcccgagcgaccccgcgtcgcctacctctgtatgttcggatgttccacgctggaaccatttttgtgtgcctgtttttttgggggggatttttggtgattttaaggcctagattggtgcattttggtgtttaggggagttggaatgaggcaagcagctcgaaatatttttttcatggcgtttgatggatgtggcgaagcctgtgaagtagcgtgtgcctgggtggttttgtgcttgcaattctgtcgcaacgattgcgttcagattcatccggcgtgtgtttctccgcgcatatcctggctttgcggagttagatttcgaatttgacccccacttttttttttctggaatctatttttggataaggttcgctcacgaatgcatgacatgttcatctcagaacacccttgttttgtttcgtttgattttttttttgtttcaagggtgtttgtttggttcgaatcatagggtagcttaacttgttcgatcggtttgctttggaattgtatcaaccagctcgagtgggtgattcggatgtcacgcttattactgctacttactgtaagaattagagggattttctagctttttctgggtttattttgatctgttccggaccttctggtctgaatataggtcggttttacgcgtttgagaaggcgcaccggctggatcagaactccgtcggccgtggcgtccggcagtttaagacggctctgctccaacggctggagaaggtgacacacatttcccccttcatatttttcgcatgatttggcagcttagcgtacgttgtgtttcatctgttagttctgttcagtatggttcagttcgcgcatgttagcttgctattttgcctttcccgaactttggcctgcgtgatttggctagtgtgaaattaatgttatcttaacttctcatcatttatataagagctttgtttggtaataagtctagttaatgcaagtaatataaaaaatagcttaacttagttgtcaaaatgatcatataaaacaaataggcaaaacatacacaattgaagtcatgcatggtacgtttttacccaattttgcttgtatacggcattatgtatttgatgttatatacgaaaaactaagcttattggaattctaattcagtagaaactaggtcaggtgataataataacagctggtgatcaaattgggatgaattagcttaatctcactaacacattggagatgagatgaaacaagcatgcaaaatgaattcattgaacaacctgctacacaaagcacaattttccagaaccagaatgacgtgtgatgctgttttttcttttgtttcagatgagatgttttatgttctaattaacttctggtaattgagcatgaccaaattttatttattatgcttgtaatcctttttcagtaatgcgacgaaccgtttggagtaccctcttttttttttaaaaaaaaaaaatctgatatattgtcgatcatgattttgagtcgatacatcaatttcacatggtattattttccatttgcactgatcatgtattcattatcttgatttccacccaaattatttgagttcagggcttgtttggttggcagtcataagttgccacaaagcttagtcgtgcaacaacttttaagtctaatgtttggtccattgctataaatcttcacttggaatcttatgcaacccgcaggataacagtcccagtctcgcgaaacgcgtgaagaagaccgatgcccgcgaaattgagagcttctaccagcagtactacgagaactacgtccgtgccctcgacaaaggggaacaagccgacaggtaattccttaactgtgctccaggtctataatgaatccactccctttcttgacatatccagtcccatgccaatgtcacctgcagggctcaacttggtaaggcctaccagacagccggagttctcttcgaggttctctgcgctgtcaacaagaatgagaaggtcgaggaagttaatccggaggttcgtattcaacatctactcaaattacggtcgttctttgtcaacgaaaatctaggtcttctcaaatgcaatgagcttctctaattcccaatgtgcagattgttcgcctgcaccgggatgtgcaagagaagaaagacatctacacgccattcaatatccttcctcttgatgccgccagtgcatctcagtccatcatgcagatggaggaggtatgtacaattcacaataacggtatctgaaaaacaatggaaccgtgtactggttcagtgaatgaaactggcgtgctaactggtttggaaccttaacagatcaaagcagcagttgcagcgctgcggaacacgcggggcttgacctggccttccacatttgagccagaaagacagaaggggggtgatcttgatttgctggattggttgagagctatgtttggctttcaggtttgctagttattccacacgagtcaatttcagtcaattctattcctaagttaacaccagcttatcttcttgtgtgcagagggacagcgtgagaaatcaaagggagcatttaattctcctccttgctaatgtgcacataagacttgagccaaagccagagccacttagcaaggcatgttcctttgccactttttactttgctgatttgactatatggatatcaatgtggataatgaagtaagaagcctgggatcagtatgtattcattgtctgactttattcattctagtaaacaaaagcctcagcctttgatcaaaacaattttgtttcttttataatgatttagtatattcaatcagctgggatttggagtaacctcttgcaaaatttgtgccgacaatattgccttctatcacattccaaaagttatcactgtaaaattcaattgattgaactgattaggtgcatgtctttcaaatgtgcagctaaataatgctaaatacatccttcatttcctgtgccacattccttcttttgtttcctctataattgactggagcttttctttcaaccctgaaacagcttgatgatcgtgctgttgatgaggtgatggctaagctattcagcaattacaggaagtggtgcaactttttgtcacgaaagcatagtttgaggtacaaaaaatcccttacctttgttttctaaatagaactgttattattctcttattgtacattgtgttgatgatttcacaactgcagaagtcctcaaggtgcacaaccacaggaaattcaacaacgaaatattttgtttctaggtctttatcttctcatttggggtgaagcagcaaacatccggtttatgccagagtgcctttgctacatctttcacaatgtaagtcacacctttttgggtaaaaaaaaagtaaggtacacctttttaacatattaagtatcaaagcttaatgctattaacattatcatgtatataattagatggcatatgagttgaatgggctgcttgctggaaatgttagtattgtgacgggtgaaaatatcaggccatcttatggtggggatgaagaagctttcttgaagaaagtagtcacacctatctatcgtgtcataaaaaaggtatttgatccatcagaaatcatgcaaaatggaaaaaaaaaaggtttcttcaatactaatgattgtggcggtttgcaggaatcaggaaaaagcaaacacggaaaaacaccacactcagcgtggtgcaattacgatgatctaaacgagtacttctggtctgtttacaatcttatcttttgtacacattgccaacatttttcattttctataattcctaacctatttcattcaggacaactgattgtttctcgttgggttggccaatgcgggatgatggtgattttttcaaatctgtgcatgattcaaggcctgtaacaacggtagaaattttatccatctgtcaatatctcttggcatgtttgattgggattgacaaaacattatttataggctggaagctcatcacaaaagggttctactaaaagcacagggaagatgaattttgttgaaacaagaacattttggcacatcttccgtagttttgacagaatgtggaccttctatctgttggctctgcaggtactaactgaaatttttatatgattttttcatctaagttattgtttcacagtcttgagcagcaatcttctaatgattaaattgaacaggcaatgctgatttttgcttggagcgattatacactatctcaaattcttcagaaggaccttttatattctctatcaagtatatttgtcacagcagcatttctacagttcctccaaagtatggtccacatctcagctgcttgcctttttttattgcatgaatttgtcccctgaaacagctacgctttaatacgtcaggtgacattgccttcttggtttgtgtatgtcactggatcttgctaatgttgccacaggcattggaatattagcttctttattgtgtctttgtacttgttttgttttgatacatatggatttttaggcagaaaatgtgcactagttttgttttgttcacaatgctaagtgagcatctgttgctgaaactagtacctttccgatgtgcacattgcatagagagagcttctctctctctctctctgaagacacttgtcgggttcaaaaccggtccacctgaattatattcttaaaaaataatcaagtactggctaggcaaaactgtgaacttggcaaagtattaccaagggggaggaggagagtgctgctcttccaataggcaaaccttgcttgttcatctccttcttcagttgacccttttactaaccaaattttatgccttctatacttttttgaaactttatcagttctttttcatttctattaaggcaacctttctatttagatcagtcatgtactatgttcttgagatggtgttgagttggcagctcctattagaaaatgtaactgatcttttatttaattgatggcaggcattttagactttgttctgaacttccctggtcatcataaatgcaagttccttgatgccatgagaaacattctgaagataatagctagtgctgcgtgggctgtgatccttccatttttctacattagcaccgcatctaaagtcaatttaccaattaaagatctggataaatggtttcaatatgttaaaggagttccacctctatatatcctagctgtggcagtgtacctgatacctaatatcctaagtgcagcactcttcctgttaccatgtttccggaggtggatagaaaactcagattggcgtattgttaggttgcttctgtggtggtctcaggtattcacagcagacttctttttcaattttcttttctgttctgttaaatgttcatttcgaaatttctactatgagaaaatagtttctttacctaatctattgtttggtactagtaggatggaacataattttgagggattggatttgaacacagaatctcatatgttcttccctgtatatagtagctctggaattcctcaagttgatgaatccgtaaactttcatctctaaatactaagtatcaactctgtattctatctatccacgaatctcatgctgaggcatacattatacttctcatttgtttgaaaaagcatgatcttggcagtttcatagctcttcaaagcttatgcagatcgatgatcatattctctaatctctaacaaaagttcatcaactgaacattatattctgtgtttgcaagagctatataactgaataataaagatatgtatgtgtcatgaaagtaaatggaagcaaaattccagaggtgctactggaaataggaaaaaagttgggaagtaactaaatgtagtgaagacaataggtgtattttggtatgccaacttataaatatgcccaagcaatgtgcctttaagtaaaataaatggatgtctttcctggatataacaacaatgaacatttttttttttgctcctgctttctagtatctacattactctatgtcatgtggtttcttttctattagctacactaattgtataaataactgcagaaacgaatttatgttggccgtgggatgcatgaaagcagtgtttcactttttaagtaagttagtttttttaattgtttgcttttttatccatgaaaaaaaaactcattctcttgtattcaactcaaaaggtatacactattttggatcttgctgctatgctccaagtttgcattcagttattttgtccaggtaaattttacacttggatattttggaaagatgatttgacaagatggctctgatgctcatactaatttacagataaaacctctgatcaagccaacaaaggacataatgaatgttcataatattcattatgagtggcatgaattctttccaaatggtaatcaatgtttatttttggggagtgttattatgtatttttccaaactgataatagctgttgtcttttcagcatcatataatgttggtgctgtcatgtcgctctgggctcctgtactcttggtatgagcttatccaacttccatattagctgaccacagtgagcagtggggtcttattatttttccggggtcatattattcatttccttttcttttgaactcatgtactaagtcataaatgttcacttgcaatgccttcaattcttgtaggtctatttaatggatacacagatatggtatgccatcttctctacaatatctggtggtgtgtctggagcacttggaagacttggagaagtaataatgaatcttgaacttttacctgtaactagttgttttactttaggaagtcatgaacattagtatgtattagaggcctagatcaccacatggatgggtaaggggcatgcttctgcattaagcactcacataaaccaataggatcttaactctacaagtcttaagtgctatagaagaaaatagtattgcattcttttttatgaaaaagacctaccatagtccaaacattttataaatagagaatagcttttagcctgaaaatgccaaaaaagttctgttggaagagtaacaactaaatgtggaagttgattaatgattagtttttatttctcaaggagaacagagtacatttatttgagtatatcttagactttgaacttcgctctttttcatgttaaggcgttaagctcatgactcaagggctctgttgccctatgttaggtgacaactctcttctattcaaactatattaacgaaataagtttgttactgtccttggttccttgaggaggtacccaataagtacatggtattgttggtacctcccctctccataagatgggaggtactgggtacctcatgaggtaaaaaaaaacatggtatttcttattaaatagaagcatggtaaaagagcctacctaaggaccatagaaaagctccaactcctttttaaccttgcctattcttatttaattgtgttataatagttaatccgtatatgtaattgaagctgaatgcagcgctgacctagtttcttattgacttgcaattcttctatgaatcagatacgaacattaggaatgctgagatcacgatttcattctttgcctggggccttcaatacatttttggtgccgtcagataaaagacgaaacaggcgcttttcactctcaaagcgcttcgctgaggtcccaaataatagtaacaacattttttttcatgatggatcttctaaaccctcaaatatttatactacaaaattgattgcacaggtttctcccagcaagagaactgaggctgctaagtttgctcagttgtggaatgaagtgatatgtagtttccgggaagaagatcttataagtgataagtgaggcccctggctcatgtttaggaggaaacatgttatcatttgctcatagcaatgcgtttaatgaacttctgctattcagggaaatggacttactggtggttccttattcgtcagaccccagtcttaaactgatgcagtggccactcttcttgcttgctagcaaggtttggcagaataaaattaaagcttctcttttctcctccttacgttctgtgttcaattgcatgatcgcaatttattttgtgggaaactctgcagatacctatagctttagacatggcagcacaatttcgaccaagagattccgatctttggaaacgtatatgcgcagacgagtatatgaaatgtgctgtactggaatgctacgagtcattcaagcttgttcttaatttactcgtaattggagaaaatgagaaaaggtacattcctatatttttgctcttcccaccattcttgtttctacagtagaaaaggctaatgtgagttgagtaaagaaagaaagcccctagttctttttctgaagtttccttcctttttttcccccattttagtgtcaacataatcttggaaacaactgcttcgatacaaaacagtgaaattagagtatgcccatttttttttcttaaagatatcattaccattatttattactaggttttggtttctatggaactttggtactttggacattaactatttgctctttgcttcaaagctttcaataaagttgggtaactcctttggtcagtaaacagtttcattcttattcttacaaagccaaaattcctttggtcagaaaaatatcagctttatattgatgtgcatgcgagctatcattataatacactgtaagaatagagactggccaattgcatatggcttcacaccatgctatgtccaattagaggacctggatgtccaaattgaactaagaagatgcccaagcatcacagctataaatggagagggataccgtgacagctcataatttgtaaatgtgcaatggctattacgtaggcatttgtgcattcatctttcatgctagctttttttgtttaatttatttttgtttatgcatgttaccttaaaagcatgtatatcttggtattttgcttcaccattctttccccagaatatgttttgcttcacttgtttgttcattgactgctacaggattattggtattatcataaaagaaattgaagctaacatcgcaaagaacacattccttgccaattttagaatgagcgcactgccagtcctgtgcaagaaatttgtggagcttgtatctgccctggtaatacaatgtttactacttctactgaattgtaatactgtatgagaaatgcagtgttgttttgttcagtccttagaacatgtcatttgtcatgtattgaaatattctaagattattttactcacatccacagaaagaaagggatgcctccaaatttgacaatgtagtattgctgcttcaagacatgttagaagtaataacaagagatatgatggtcaatgaaatcaggtgacactttttgtactcaataaaactgactttctttctcatggcaaactggtgagtaatctcttatactacgattcgttcacagagagctagctgagtttggtcatgggaacaaggattctgtaccaagaaggcaactttttgcgggtactggtacaaagcctgcaatcgtctttccacccccaatttcagcacagtgggatgagcaggtcatatcatcaatatcttgtttgtcttttataactaggaaggtgcactaacttcacttgtgtccagatcaagcgtctgtacctccttttgaccgtgaaagaatcagcgatggacgtgcctacaaatcttgaagcccgtcggaggatagcatttttcactaattctttattcatggacatgccacgtgcacctagagtacgcaaaatgctgtcattcaggttagtctcatatatcaacctgctaatggtactgctgtgtttctgcttttatttccatctaaaatgaactctgcagtatttctgtcacgtttcacacatagcacactgcatagagattgtatgtagcatttctagaaaatagaatattgaaaacacgtgttaaaactaaattaacagaacacatggaaaatttggcagcaactaactgatgtttcttccactgtactcctactaaaatatttaatactttaaaaataatcttgtaaagtaaaatttgggtcgagttttggtgtgatcccacctcttaccactgtagttccgtgagtatttggccaactgtcctcgaactgaattcctagtgtgtgctcaccaggaagggggaaataggcattaataccatgcaggaatttgccatgaatgttaggtttttttagctgaagccgttgatgatgcctgacatgaatcaaaattgtgttcattgtttatttaaagctgagttgatcctcaggttcatttcttaaactttatgctattattcgatgtattaattatactgtgcccaacaaataatgcgagcagctactgacctgatgccataattctgttaggctgctttcaatacttggaatttcaacaagcactgcttgcctttgttctgattcatgtcaggcagtccagttaatttgattcactgtgatcttactatgagtctatgagagtagctactctttaatccgatgaaatgatatttataaagttcattgtattcgtccttattatagcatgttttcttgatgataacactactgcaaatcattctaatttgtgaaatatgaaatgtacaaaacgaagtggttgaccatcctgatgcagaccttgtaagccctgtacaacaccaccaggcacatcaacaatgtcgaatctagaaaaagacactgaatttgccacaaatataagccttctatgcttaaatttagcaatgtgtttttacaattttcaacaatgattgtgcattagataattgcatatcacctactgtcctttgcagcgttatgactccatactacagtgaggaaactgtatattcaaggaatgacctcgatctggaaaatgaagatggtgtctcaattatattctacctgcaaaagatttttccaggtctccactcatgttttatttttctttgcacttctaaatatggatacagtcaccaggattctgtcctttactcttcgctattcttgttatagatgaatggaataattttttggaaagaattggttgccaaagagagagtgaagtttggggaaatgaagaaaatgtcctacaacttcgtcattgggcttctcttagagggcagacactctgtagaacaggtgaatcaaactggctgttttatcttacaaaataaggatgattttgttgattccttgttaaatgcttttcttgctgtgaatagttagaggcatgatgtactacaagagagccttgaagcttcaagcttttcttgacatggcttctgagtctggtgagcttcttctctccaagctgagcattccctttctttttgtgccttcataaatatttttgatcttatgccctgtcttgcatgtagagatattggaaggatataaagcagttgcagatccagcagaggaggagaagaaaagccaaagatctctgtcatctcaacttgaggctatagcagacatgaagtttacatatgttgcaacttgccaaatatacggcaatcagaaacaatctggtgatcgacgtgcaaccgatatcttaaacttgatggtgaagtgagtcattttgatgatctattctaaactaataagatatagtaacattttgccatactacaagatacaccatatctatcccctggagcaaaaatgttttcttcttggatttttggagattatatcccttggtttacatttattttggttgatggcatttaactgacaaatacatgatttctaggaaaatattatgcactctgcttgttctattaagaataaatattattttcttttatgagcaaagtaatttcaatctgaacttgaaactgtagttatcctggtttgcgcgtggcatacattgacgaagttgaagagagagacggtgaaaaggtgcagaaggtcttctattcagttttggtaaaagctcttgacaatcatgatcaggtaatcatttccacaaagttgaattaccttgatggcattttgatatgatgtacatctcgatagagcttatttacttttgtatactgtgaaggaaatataccgcataaaattgccaggaccagcaaaattaggtgaaggtaaaccagaaaaccagaatcatgcaattgtctttacacggggtgaagctctccaaacaattgatatgaaccaggtgaattgaacggttgttctaaaaaactgaagagctatgctgccactcaagatatatctaatctgttgcattcttaattatttttaggacaattatttggaggaagctttaaaaatgcggaatttactggaggagtttcacgagaaccatggtgtgcgccagccaacaattcttggtgtgcgtgagcacattttcactggaaggtctggttggatgctttgcagttgttactgaatttacttctaaaaaaatacatatcagtgcctaacatctaatattcttgcattgtagtgtgtcctctctcgcgtggtttatgtcaaaccaggaaacaagctttgtgacaattggacagagagtactagctaatccattgaagtaagtcagcatcggtttattatgtcctgatgagatgaagcggaatccattaatattatgtggaacaatgggattgcggcatgttggaattagcatctgtagcaactgactcaaagtcaaataagttatagatgatttttttggtattatttcaaccgttgaaatgcatatggatatgtgtctgagattaagtaaataagttgtcaaagattaaatcaaccaagtgctatttgtcatcttggccattaagaaaaacatgaagacggtttatagcgtgacacaaaagcaaagggaatcaagtcttatagtcttgatgttgcatatttgacactttattttctgttcagggtacgttttcactacgggcatcctgatgtatttgatagaatttttcacattacacgaggtggcattagcaaggcttcctgtggtataaatttaagtgaagacatttttgctggtatgtgattctccatgtatttctgacttccccatttgtgctgtcggataccataggcttacacttctgttccaggtttcaactcaacactgagacgtggaaatgtcacccaccatgaatacattcaagttggcaaaggacgagatgttggtcttaatcaaatttctctctttgaagctaaagtggcatgtggtaatggagagcaaacactcagcagagacatctatcgcttgggtcaccgctttgactttttccggatgctgtcgtgctactttaccactgttggattttatatcagttcaatggtaagttggtaacttacattgacctagtagagtgaacacaggacaccttcatgcattacattcgttatgatctgctaccatcctttttattctcgtaaggttattgtcttaattttgtgcagatggttgtcataattgtctatgtcttcttgtatggaagactttacctagcattaagtggactcgagttagcaattatgaagcaagcacgaatgagaggtaacactgctcttcaggcggctatggggtctcaatctattgtgcagctaggtcttttgatggccttacccatgtttatggagattggactagaaaggggttttagaagtgccctaggggatttcatcattatgcagcttcagctctgctctgttttcttcactttctcccttggcacaaaatcacattactttggccgcacaattctgcatggtggtgccaaatataaagcgaccggcagaggctttgtagttcgccatgtaaaattccctgaaaactatagaatgtactccagaagccattttgtcaaaggacttgagctcatgttattgctagtggtttatcagatgtatggtgatgtggctacagattcgactgcatatatacttctgacatcatcaatgtggttcctggtaatcacttggctgtttgcaccattcctcttcaacccatcagggtttgagtggcaaaaaatagttgatgactgggatgactggagcaagtggattagcagccgtggtggtattggtgtgcctgctaataaagcttgggagtcctggtgggaagaggagcaggaacatttgcagtctacaggttttttcggccgcttatctgaaatcatcttgtctctccggttcttcatcttccaatatggtatcatgtatcatctgaatatctcagctggaaacaaaagcatctctgtgagtcctctgttttatttcttcaagatattttacataccttttgtcgtttagtagcatgcttacaaatacaaatctatgacttccctctcaaaaatctgattttgtgatttcaggtttatggtctgtcgtggctggtaatcgttgctgtggtgatggtcctgaaggtatctcattttctttctagtgatcaaaacaagaatggaaaaatacatgacagttgatatttcacacatagttaaactttctttcccctttatgtttctgaccagtaacttttctgcaggtggtatccatgggaagaaagaaattcagtgcagacttccagctgatgttccggcttcttaagctgttcttgttcattggatccattggaactctggccattcttttcacccttttgcatctaacagtcggtgacatattcgccagcttccttgcctttgcaccgacaggatgggccattcttcaggtacttcctcaaccatcaacattgcacttttaaatagtgtcgtcgagtacccccactgccacctgctaggtccagtaccaatccatataatttcagaaatgaatacaaggcattaaccatagctgtccactccccttgtccacttgggatgctacagttattattattattattattattattattattattattattattattattattattattattattattattattattgatgaaatagagaagcagtgctcccccctttcaatttctagaaacacgacgggctacggagttcagaaaacaaccagaaaacagaaattcgaacatccagcaaaagctcacaaacaatgccatcccatcacctgtggaaccttcacccaaactaccagctaaactaacagagctacagaaatccaaagtttttcatccatccatgcctcctgcaaatacagcctcagcagaaactttgtctccaaaacatgtaccaggacatcaacagattgaacaaaagaggatcagcttcctatcttccatttcatcactcattccttttcttctgtttcttagagcttccctcgccaggttcttctattccagtctgccagctcctatcctccagccatgctttgagttgtagatgtcatttgctacctgctttagcagatggagaccccattatagatttcttgtatttgccaccgacctctgcaaaattgcccacgaggagatccgagagctgatataatgaattagctcaattgggtgtgataatgattcattcttgaaacaggctttgttcctagtcttcaaaattgcccacaatacagctgcacttctgatcgctatccttctctgtaagtttctgtcatatttatttagccaagcacccagtaaatgatgtgttttacatccttcaggatgtagaggccaggttttatttaatccattatctaaaaaaaagtaaatgatgtgtgtcatggataacccccagatcagaagtgctagctgtatcatattccagggcaggtcaggagtaaattttttcttccccttccaccctcttttcagcaagttatatttggttaaaaggctattcttcagaatcagccatataaatattctaattttcaaaggcaccttgaattcccagagatttttgtatgggaagttcaaatgttatagtagtattgcaaagctctatgaaagaatcttgccgggaccgccaaagttctatgaaaggatctaaaagagaagccctatttactctcaattttccacactaacacgtctttctcattattcagagtacttgtctggcattggcagtcattctgcaacttgtgtcatgatctaactgtaacatgtcttaggcgaatatgtatctatcacctggcggcttaaacttatccagtacatatcgcctaactgtttgtgtcatcgtgagaaaaacaattcaccgacttccaatctgttttgtcacagatatctcaagccagcaagccggtggtgaaggccttcgggctatggggatccgtcaaggccctctcgaggggatacgagtacctgatggggatcctcatcttcgtccccgtcgccgtgctggcgtggttccccttcgtctccgagttccagacgaggctgctcttcaaccaggccttcagccgaggcctccagatctcccgcatcttggcaggcgggaagaagcagagctgagcccgcacaaagtccaccaagtgaccgtacataagcatgcacaggtttaggcgaacagcatcacaagaggttaggtccaggattgatcgttgtacagtggagaagtttgttcaggaggcgtcgtacagctgctgacttgctgacccttcagaagttccgttacttttgtacacacagggcgatgatttttttttctttttaggcattttcgagttattacatctccataccatattattcttacgtctgttacataggctgttgctgagtattgtatagatagatgttgtatgcccacaaacaggtgcatcaaagcattttcgttgatttaaatgcaaaagatgagattgtttattctctacgtcaaaagaatatacaccatgtcacctgagacaatgctgttacttatatccatattttgaaatagaacatgtctcccttttctcagctactaattattattgttatccacgcctttggtatccaagagtactccaccagacgaaagtgtgggcattgtatgatactccactcttttttttttgagaactatgatagtctactcacggtgatagtattacattactagtctacaccatagatgatatatttaaatggagatcaagatcactcacctcaccgaaatccgaattcccaaacaggggatgagtcatccattccaggggaagcaaacatcaattgctaatttgcaatcaatacagaaccggtaactaactaatgcacctttcagcttgtccaggacatctccaaggcttttgacttggtcagatgggactacctacttgcgctcctccaaaatagaggttgcccgtaaaaatgacgcgaatggataaccggattgctgtccacttccacctcaaagatcaccctgaacggaatccgggtcgaaacaatcagacacgggaagggtttgcgacagggtgaccccctatcccccctcctcttcatcttagctatagaccccctccagcgccttttagacaaggttaccgacatatgagttctaagtaagctgcggggcagagttgtgcgcttctgcacatttatgaatgctgatgatgcggccgtcttcattaatccgatcaaagaggatgtgagcgccttcgccgatctgctaagtcgttttggaaaggtatcaagattatgcacgaacctacaaaaattgcaagtggcgccgatcatatgtgataacataacctggacctcgatgacattctacatggcacgcctacaactagggcaagcttcccgatgaagtatctggggttgcctctgtccactggtcgtctgcgcaaagtaggccttcaacctctctacgacaaatcgatgagtcgagtagctagctggcaaggaagacacattggcctggaggggcgataaaccctggttaaatcggtgttcacttcacaacctgtttttcttctaacgggactgaaagcatcaaaagagtccctagaggtcatcgacaagcaaaggaggaaattcctatgggcatgcggtgaagctctgacggggggcaagtgcgggcaagtgcaaaataaattggacacggacctgcctccctacagcctcaggaggactgggcatcctgaacttggagaaatttgcaagggctttacgtctgcgatggctttggaatgagtggagatcaccggaaaaaacatgggtgggatcgggaacgccctgtgacgacacggataggttactctttgcagcagcaacaaccataacaataggggatggagcgaaagcaagcttttgggattcggcttggctggaatggagaatactaaaggatgtagctcccctgatctatgcggcctccaagaaaaagaatagcacgctacaacaggcctcagctacagaccaatggctgctcgacctggacctgcccgcagcctcaggctggacaacggagctggtcagttagctaatcaatgtctagagtgcggtgcacaatgtgcaattcacagagaacgaagaggacaagataatgtggaagctcactagccacggtgaatttactgtgacatcggcctacaaggcgcagctcctaggtactacagccaccaacttcaacatcctaatatggaagccgtgggcaccacacaagtgcaagacctttgcctggttgatcatccataatagagtttggacctctgacaaactggcaaccaggggttggcagaacagctctttctgtcccttatgcagacacacccaagaaacagctctccaccttctcgcagaatgaagatacaccaggaaaatctgggcggcgttatctgaatggactgggtgtggtcaactgaatcctggccaatggcaaccagcttcatcggtgttagagtggtgggaggccaccgctaacttgaacgaagccccaaagaaagcactccgcacgctaacactcctggtcaactgggaaatatggaaaaagagaaactgcagaattttccaatacaaagagctatctaccggaagtctgttggctaaaattaaggaggaggccaaaacatagtcttgggcgggggcgaggcatcttggtagctggcttgaattttaattttagcttatttggaccgaaggtcttgagccttgattttcttacttgtaaagtttactcctctattcaataaaattggcagcttgccgatttgttcttttttttagcttgtccaggtatcatggctaatgatcgcctaatggctcactgtgaattaactacacacgtgatgacttggcaagtggctagattgctctcaggtcagccgctgtgcgtgaactgaagtgtttttggtttagtaagcaagggggcgaccggatgctgttctgcccaataatgatgtttgtttgggatttgctttagttgttgatccatctgtggctttaatccaacaaccatgttattgttccttgtagtgaactcgttttgttcttaacaaatttcccatgtaattcttcatctactaaacttccttccatcttaactttccagcatgttaggactcctttgaaaagcatcattgaaaaaaatagagaaataagaaaaacgtagataatgtaagtgtagaacagattattaccaaacataaaaaaaaagaaggaatgattgtttaagtagatcatagaaaagacatatgaatcggatgagagagactcaggaggtctcttttataaaaggttggagctattattaactttccttcaaatctctttagagaaaattatgatagataggaatcaatcttttgttttaaagttcttaaaattttttcttctgtaaaattttctaccaatcaaaacgccttatacaaaaatttcctccttccaacaagccaacgatatactagtataaatgaagcgacccgcacatctggaaaacattttccacatacactagcttcatatatacggaaagttcagattcacgtgtcccgaactggacctaggatttttttaggttgcggcgcggaattattacacgttccaaaaatccaaataaagcgcgcacaaaattaaaaataaaaatgtggagacagccagagccgctcgtctcgtctcgtctcgtccggccagccagccaagccaggctgcgccgcgagacaaatccagcagtagcgtagcgcttactggaaaaaaacacacacacacacacacgggcatcgcgaggacgccgcgcggcgcgggtgcggggcgcgacaacgacgcgcgcgacgtgcgtgcgtgcgcccgcccgctcgcccacccacggcgcgccgcgcgaatggcgcccttctcctcctcctcctcgccctcgccggcgctggcaccggcctcctcctcctccaccgcctccacgccccgggccccaaggcagcagctgcctcgcggcgcgtcgtcgtcgtcgtcgtcgtccccggtgtacctcaacgtgtacgacgtcacccccgccaacggctacgcgcgctggctcggcctcggcgtctaccactccggcgtccaaggcatgtacgctctgctttcctcgccttcgatcctggttcgccaccgacggcgctgacacgccggtgtgctatgtctgtggtgtgctgcagttcatggggtggagtacgcgtacggggcgcacgacggggcggggagcgggatcttcgaggtggcgccgaggaggtgcccggggtacgccttccgggaggcgatcctggtggggacgacggagctgacgcgcgccgaggtgcgcgcggtcatggcggacctcgccgcggacttccccggcgacgcctacaacctcgtctcccgcaactgcaaccacttctgcgacgccgcgtgccgccgcctcgtccgcgcccgcatcccgcgctgggtcaaccgcctcgccaagatcggggtcgtcttcacctgcgtcatcccgggcaacggcgccgcggtgcggcgcaagggggaccccccggccaccgccaccgcccccggcgggaaggccagcatccgcagccgctccgctcgccagggcgcggacgccgccgcgccgccgcggcccaagacgttcttccgctccctctccgtcggcggcggcggcggcggcggcggcggcaagaacgtgacgccgcggccgctctcgacctcgccgtcgccgacaccgcccgctcccccggcgtttaccaccgccacgtaaccgcgccattcctttactttttacagtttcatctcatctttttgtactcggtaaaaaaaacctttgtgcataaacttaagattaaaattaatccgagatttgctagtgccagtgccctctggttggttaattaggctcttattaataattagctcgagcgttcatctaatctcagtcagtttgccggattagtgaagtgaattttggcttttactacgagcacaattttacgtcgaaatcaacgacgtgcattgttagggcgagtgatgcaataggaatatattcctcttcttttctttggatttaaccaccggcctacgatgcagacaccgaaagttgcgaatgctgatgctgagaaagaatatatgagttaccaacaaaaagaaaaggagagaaagaatatgtgctttgctaattcattcatgggtatatctatcttatcatctctagggtttaaacttcaaagtaactttttttatagaaaagaacggtgtgaaatccgtatatttcttaaaactctatttgtctgatgtcttcttatttttctaattgtgtactctctctattctattttaagtgtagttgtgatttttcgtatccaacattcgaccgttcgtcttatttaaaaaaattatattttttaaaaaaaagccaatcacaatgtactattcatgttttatcagaatattaattataaaaaattttaaataagacgaaaggtcaaatgttagacacggaaatctacaactgcatttaaaatgggaccgatgaagtagaatatctcaaaatattttttaaaaaataataaaataaagtgatatgtgatatatggcatgcaattttaaattttacttacaagtctataaaaagggaaaaaaagtaattttctatgatgccgcgttggtgtaccgtgttcttgctcgccgtggaccggcgcgaccgcaaatgggcgttgacggctgagacgacgtcggtggcggaccgaaacagaatccgggcggccatgcatggtcaaaatattgacaaccattgtccactactggagaaacgcaaaataggtgcacatatcaaagctcgcatcgcatttttagtttagcagaaagtccacgattctaagtgaaaatcatttgacttccgaaccccttcggacacaggaatattcttggtttttttaaacaaattaagtactatctccatattttaatgtatgacaccgttgactttttgtccaacgtttgattattcgtcttattcaaaaaatttatgtaattattatttattttattatgacttgattcgtcatcaaatgttctttgagcatgacataaatatttttatatttgtacaaaaattttaaatgaaacgaatagtcaaacgttggtcgaaaagtcaacggtatcatacattaaaatatggagggagtaatatgttaaacattagaaataaagtgtacatggataagtgatagaacattgttagctgttagagctgacatgagggcttccttagtgggacacatgaatattcttggtgtttcatgtgaattgttcagtttcacgaaaatcctcaataaattctctgatgaataatacttctattgaatttgttacttctagccgtcggggttcaaattattgaggattcgtaaatttggaagtgtcacatgtataatccatattatccgcataagctggttagaacagaatttttaattatctttcaactttttaactttttatttttaaaataaactcttccaaattttttttttaaaatgggaaccttttgatcaaccatcccgcctgacgtggacgctgctagcaatgggcgtgccaatcttaactagcgtgaccaaaagaccagatttggttttggagtgtttattttaaacaaaataaaaatttagaaggttcaaaaaaagtttttaaaatcattagagcatcccttaacgatagcttcccaaatcagctctgaaagggatatgtctcatcggatattagattgttatattttggaacgacatagtactcgtaactgattagaacatcccttaacgacaacttcctagatcaagtttgggatcaatttgcttggagctgcagatataaaaaaaaagacttggagtgagagcattactacgaacatttttcaagaagaaattataaacgtgttggaaataaaggggttgtttggatgggagggactttagtccctcacgggactaagggcatgtttggatcagggactaaagttcacatttgatgtttggacactaattagaagtattaaacgtagcctaatgaatctataaccttgctaatttgcgagacgaatctattgagcctaattaatccatgattaacctatgtgatgctacagtaaacatgtgctaattatagattaattaggcttaaaaaaattatctcacgaattagctctcatttatgcaattagttttgtaattagtctatgtttaatactccaaattagtgtcaaatattcgatgtgacggggattaaagtttagtccctgaatctaaataccacctataatttttgtgaggggctgaaattagtcccccatccaaataggaccctaaacttgggacttgtatgtatctctggagctgcagatatatgttcaggtgagtagggtggcctggcactgggcgtggtagtagctggaactgggctatgggagagaaaaaggtgcagtggacaatggacagtgcctttctccggctgtctccctgccggccgctggaattatttgggggcaaaggtttggttgagtgaaatcatggaacgtgcagtgcacccatgcaacggaagagtagagagaggggggggggggggggcagaattttatggcgagtggggttgcattttgcagtgctagtgcactgcacacctcccaactaattcctgcgggcaataattctgcacctggcccacccaccaacgtggcttttctcaagggttgcagcttagaacaggtataagagctgtgagaaagcagaaagttgagatggatgagagagggtaaaggagagatatgagaaacatgctgtaagagcaagtttaatagtatagcccactactagctttaattcatctataatcaatctaatagctaattcatacaatagttgcttactatactattaatatatggtcccacatgtcatacacacattgcgtcttaaagtccgtgctacagctggctatagatatgtagcccactgctcttctctctcatcttttatctcattaaaatatgtttatagctggctaatagtctgctattgtacctgttctaaggttacagacggcttaggcatatgaaccaagaaaatttgtgagacaaacagatgaatcatgaagagctaaccactcggctgagagatatatctcattaaaatatgtttatagctagctaatagtctgctattgtacctgctctaaggttacagccggcttaggcacataaaccaagaaaatttatgagacaaacagatgaatcataaagagctaaccactcggctgagagataggctataaagatctatacattcagcctggttatattatgattcttgctcttacgtgtgctcgatctgtaatagtacactgcacgatcaattgagatccagtgcagtctattatcgcagtcctgcttgcgttgtctataatctccaagtgatcatatagacgctagcatttggctgtttggttcccaacaatattttgctaggcatcatttgtcaataaaaattaccacactttatctaagatgaggcgatcaactttttagacacaatttacaaaggttgagggaatcttgtcatacttttagtcattagcacatgaaacccaatttattataaaggaatcttgccacaactatagttacaaccgaacatctatcaagttgatcaaatttacctaaccttagacataacaaagtgtgacttgaaaccaaatattcctgcttagtcgcttacttctcaatacatataatgtctaaaaagtctaaaataatttatcatcacaaatatatactgctatttctttcaaataactatctatataaacaattaatgtttagaccatatgtccattccccacagcagtttcggttatgtcgattataaactgtaacagtttattagctataaaaaataatttataaataaaataagagttttaataatttataatttatatatatctttattaatttaaaaaaaatacccgaaaaaaactctagtttctctgccaagcaataagagcgttagttctctgttctggtctattgctatggtcttcacgtgttagattcagggtttcccaaaccgtcgaggccagggttaccacgccccggcggtaagcacagttatcgcgcggtaaccgtgaaaaaccgtacgaaaccacgcaaaatttatcaaaaattcaaattattttttaaatttatttgaatttaaggaggttaccgtggtatttctattaccgtaccccgcggtaaggccagtaaccacagtaaccgcgcggttaccgacggtttgggaaactctggttagatttcatgctgagtctggctctcatgtactcccttcgtcctgagttcggctgtcatggaaaccatccgttcaaaaaattatatattttcggactttctaaagtaaagttatcattcttttactccggttagcacatcttccgaaccgctacatggtttttttttaaaaaaaaagaaatatctatacaaaagtttcttaaaaatcatataaatattttttttcaagttttttctgagattaattaatcatatattaatgagtcactctattttgcatgcacgtggaagatcacaacccctccatctgaatgcaccctgaacttatccaagtttatggtaggattttttttttttgacagaagggataagaccttggttaagactccaataaactctcgtgccagtaccccagtcaagaactgggaactttggtgtccaccgctacgattgttggacagaaaagcaaaagcagttcagatagctggaaaaaacaccgttcacaaacaaattgtagtggataagtcctatagcgaacactgtagcaattgtggttcaacaatgctgtagccgtgtactgtcaggttatcaagcccatatcatgtttggagtgggagacaaacctggacctcaaaatcaggtgaccctaaaatttactacatttgatctttgttagtttgtgttttggatgttgacacaatcttcggtgcctgttcatcatcacttcatttaactatatatttattaaaaaaattaaaatataactacatgaaactatttttcatgataaaactattaaaatcatttatacatactgtagtccttttttttcatttaatagttggtaaacataccgaggtttcactgcatactttaggacatcaactatttgagaatggagataccgagattgtaacttatgaaacaaaaaatattttggttattggcatttttcaaatttagaatttcattttgcgtttagcatcgagatatcagattcttgagtacggatttgactcctatatctcgagcgctgaagttgtattttttatactaatacacaaacagtactggatccttagacaacaactccttttccttgtaaagagaaactgtgggcaactatgtcaaagatggctccaatttccgatatcaccagatataatctgactttccgtttggtagggtgtccagcaaacaagagtagcaatattgtggtgttagggacagaaaaattaccttggctgcactttttgaagaagttgcatactgtataagtatttggatagacaacaacaaggcagtcgccgaagatccaaaagatgaagtgcaggcatcatgtgggacgtagcaaatcgacctgttcaagaagctggtagctacaattaatctaggaacaaatagtagttcaagagactgatagttacaatctaagaacaaatagttagacaggatagctcagttattaagcatttagtacaagaaatatatgaacagaaagccatcagttggccaagagcgattatatgccacacggcttattagcaacgtaaaacttttatacatgtattcttagcaacttaaaagacaatggtaaaaagaaactacgttgaaaataccctaaaatcaacttactttgaaattatgctgtaaatttcggcagctgctaatttgttataggggacaaaatattatagcaggcataagtctattggcggtccatgcttggtatggacaaccaacagggagtccaaatccaacctgaccataggcccatgattatcaatgcgggcaactgggaggcggcgcgaggagctggcaggagaaagtaattaaagatgtgattaaattgtgatcacatgattaaccgccgaataggaatggaatatgaaatcctgaatatggctgaactggcaccttaaagaaataaagcaaggttaacctgaattcccatggcttgcttgatattgacacatcactttggttttgggactcgatgcttctttccatagaaagacatgagcagctggaaaagtggcaacctgaaatccaaaggaatttggtaatattaagtggaagaaaagaatagattgctgataaacattcaaagagaatgatggtgggtttgctgattgaagtgccggttcccttaggcaccaagggatttcccttccatataacaaatcaaactacctttatgcatattagtggtcaatctttcacaacgttgactgactgcgatctagacatctaggataagcaataaatggagggattattgtcattgtcatctggaaggtcgagttttactgacaaaataattggaaagcaaaagtaacttacaagttgtaatcttgccagcaaatctgcaatcatgaacctgctaccttcggcaatccacaagtattaggttatttgtttggcaatgtatccagtataaggttaagtttaaaaatgtctcgtttgtgacaaaaaccagccctatagaatgacttgattataaagtcgaacatatggcaatcagagagtacaccatttccttcaaatacacggtgaatctctatattattcaccactctaaacaagccagaagatccattggaaatccactttaagtgatttcataaaaatataagtatccttgtcaaattttccatctctgcataatctcatcaaccaataatgtatctgagtgacttcatctggattctggagcaatatcctgcgctgtcgtgcacgaaattaggtacttcaactcattaagttttctaaggcagcaaagccaatcaatgaggataatgtatgccacaacattagtaaaaccttgaccatggaccaggctcttggttatggaagactttctccctaatgcaaagagccaaagactatgaataaaaatgttgaatgtctttgcgattggacgatacttttgtcgatcatgtacttggtcaagagcttcagaacagccatttgcccatatctaacagcccgctcatcagagtgttgtatgcagagttgcagaccctcgctaacaagcacaaggcatatgaaaccctcagtcatggagaaggcaattcggaagaacactcgatgtaaaagccgagggatccaatcctttcacttagcataacatccaactgatcaagtacttcctttgcactacctttcttgcagaggccattaaggtatatgtattgtaggcgagcatactgtgcttccaaccgctggttctactactgttgaaacctgctctgaacagagttgtaggtgataacattgggaggacaactagcccgatccgtcacggccatggcggcaatatgcatttaacactggacgtgcaagtgtacatcacttattcagcattcagtctgaggatgccccatgcctcggcgaccttcactgcatgcgccacagccggcaaaccccgtgatgagcattgagttcatggcaatgccggcctccaacccgtgctccccccccccccccgatctccaggatgagcttgcaggcgaggcgaggcgaggtcgaactgcaacatccacccgtacgtgcagcttgaccatgaccatgaagttgtccgacgcgagcatttcgtcgaacgcctcgtgcgcatcccccgcccgcgcacgcgagctcatcgaggagcatgctgtgggaggagcacgtcgcgcgtcgcgccggaccaccgccgtcggtgccgtccacgtcgtagtctcgctccacctgccgccgcagcggaggaggtgagtcgggtggcgctttgggcgtcgtcagagtgttcgggggagggggaggagagcggcggtagaggcggaagaaaccatgcgcgaggggtggtcgccaatggaagtgaccgacggcggccacggccgcggcggaggcgccggcggctagaggagagtggtaagcgacggtgaagggtgggggaatcaaacgccgccgtccttaaaatttgaggtctctttggatttgatgaattttgcagaaattatagggaaattgaacaacggctaaaaagaaactcttgttaaggtgtgctggtttctactgaagattgattgatcgaagttagggcaaaaaaaatatataaaaaaaggacattagcccatgattaattgagttttaattattattgatttgaaaaatggattcgtatgatattcttaagcaacttaggccttgtttagttggcgaaaaaaaattttttgggtgtcacatcggacgtttgatcggatgtcggaagaggttttcggacacaaataaaaaaactaatttcaaaagattcgtctcgcgattttcatgcaaactgtgtaattagtttttgcttttatctatatttaatgcttcatacatatgtccaaagattaaatctgacgtttttggaaaaaaaatttgggaactaaatcaggccttatatacagaaagttataatgcgaaatgtatcatttaacaatttaaaaaccgaggtatactcataaaggaaacgagcctaaatcgtgcatttcaaatgagacctgcaattctcaatagtggttttgtggagtgaatttatgagattgccactaaaattaaaatgaatgttctttgggaggtaggaattgaaaaagcacatgaaatgcgagaaatatagtcatgtggaatcttaaggaatataaaaattcggaaattgttcaaccatgttgtttggatgcttttatatgaatttggagacaaaacaacacaaaggaaaattttccaaaagtttagctcatgttagatttccttccaaattttcatgaatctggtcatttcattcaaatttcaaagggtacattcctttgttccaaaggagcatataagaaaatcttccaaaagatactcatcctgcgttttttttaaaaaaaaattaaacctttgttccaaaggagtctgagataattaactgatcatcccaccgtctttccactatcaccctaacccaaaaatatattggtcaatggttgttgccttgccggagtcattagagatggagaaaacaaaatgttgggatacaaatctcggagagttggagtcaatctaaatgttagaaatttcaacctaaatctctaaacaaaaatgtattcacacatgtatagcaatttggtttagaagggaagttgtacaagatattatcttttgcttcacaaacaatgaaacaaaaatgactgcaaaatcctcctgctctctggacaaattcaagcaagaatatttgaatacaaaaaaaaaaaaacttgtacccacgaattttctcacttgattatccacacaaaatttttctcatcatcttgcacgcgaatgcggcaatcatgaattaccaatcacaaattcacaagcaaaaaataacatataatttttttccatacaatccaacgcaatgcaccaacgccatggacgccatggatgcatggccattaattacctcctcttcttcgtcttccagaggtgcacgacgagagagaagccgccgccgtcgttcatcgccgcctcctccgccgtggcccagtcggccaccgtcgccatgctcccggccgacgacgccgccgacgtcgacgccaccgacaccgccggcgacgagtccgaccccgacctgaacggccccctcctccaccctctcctgtcgctgtcgctgctgcaccagctctcggcggcggcgccgccgccgccgccgtggtggtggtgcttcctgttgaaagagctctgccttagcgcgagcatgccggcgtcacgttccatgtcgatcttggaggtgtccgcgacgtcggccgtctcgaaccggaggacgaacaccgcgacggcgtcggcggcgaagagccagccgtggaggtcccacgagacgcggacgcggccgcgcgggaggtcgagcctctcgctgccgcggaacttccaccggagccgccgcacctggagcgccttctcgccgtcgatggcaacccacatgacggcgtcctccaccgcgatcgacacctcgtgcctcccccccgcgacggcgacggtggtggcgtacgcctcgccgccgccggcggcgaccgcgttctcgcggcgggtgaggaggaacccggcggacggggcgagcagcgcgaggtcgcccgccgccagcacgagctccccgtcgacgcacacatgcagggaatacctcgccacgggctccggccgccgtccggcgaggcgggcgcgggacatgtcccacgtgaacgcgacggcgtgcccgccgccggcgaacctcttgcaccctcgccgccgccacgggagcaacggccggagcaagaaccgcagcgcgggcgcggcgccctccccggcgaggtggagctccgcggcgaggacgagcccgagctgcccgcgcgaccacgtcagggtgacggtgccgaggtgcgtccagtacaccgacgtcgccgacgcggccggcgccggggacgacgacgacgaggcgcccgcgcccccgccgccgcgtgcggcgaagcaggcgagcggcatggcgcggcgcggcgcggcgtggcgtggcgtggcgtggcggcttcttcttctcgatcagattggtttcctttcgagaggcgatcgagtcagagagtggcttggcttagttgcaccagtgcggacgtagcggcgacttgagagggagcaggcgaaagttgaccggatttctttctctctctctctctctctctctctctctctctctctctctctctctctctctctctctctctctctctctccatttttcacatttctttttcatttttttgtatttatttgatttgatttatgtctttgtttatgtgtcaaactgtccattttaaggctcgtgtatttccttttcagattcagaggatatgacccaaggaaaggaaaattagggactttctaccaataatgtgttgttacttctgttactaactccagtcaacagcaacttgtttttaattttttataactcaaatgtgatgccactttgacagcaactccaatttgggtatcatatatgttgtgagattgtcgtaaaagtgacaataagcagagctaatggacaagggacaacaaatactttctgttttaaattatttatcgttttagatttatgatcatgttccttaaaccttttcttaaaaaaacaaagtttgacatcatgtttatgtttttagattcatcttagggggagtttttataacatataattcacatgttattaaactatatgattctttataaaaactagtgattttagatattttttattcagacaaatctaaaatgataagtactgatttgaaacggagggagtttagtaaattagatttagtgtcagaggcagttaagagtttggtcaacggcaacaattccactgtgctacctgcagacagtcagcgacagtgaagggaacaaatgtggttttcgctctggctcgtagtatttttttaaaaaaaaacaatccatcattttttctttgaggaaaattaatccatcattaattgaacaatgaaagtccaaacatcattaatctgaaaacaatgtcaaaaggagatcttccaagtcaggactgacaaagtcgtaagcgtgtaaagtaattttcattttttttgatagagaaagaagattaattaactttttgttaagtctagccaactttttatgcagttttcaccaggacatcactatcgtatattcgtatcatcgctggtgtggtgtgtgttctcagctattacaagtctgaagtctccatcggatcaagaccgttgatatggccacgtggtcgtccccaactactcctatactactaatctatatggacagtacagtatgaaatggagtagtagtattcagtagtcagatcaattattcagtattcagtattgtagtacatcatatctactattcttatataattgtcgccattattgtgattataggcagccacatcaccttatttatttgagccatcagatcaatgtcaaaatcttacagtaactgttagatctaagcatctccagtagaggtcctaacacagcccctgtactaattttgagagttgagactaaaaactcaggtccaataagaccactactaaagctcctaaaataagaaggcctctaaattatcccctcgagccccgagtcctaggggctttctccgcagcccccatccatggcagagatgcgcgggagaaaatcccaccaccgaacgggtactatttttccgcgcaaagtatcctgctagcccgcaactaccggcgcctccacagatctacgctgctcctcctagccggcatcctcctccctggtaggcctcctcctggccggcgcggcggcaccctcctcccctacaagcgtcctccctggtaccctccttcccggctggccacctgcctacccggcatcatcctccccagatccatgtttgaaaatttcaaattaaaatttgaatcatgttgtttgaaattgtaaatttaaatatggttgaattccatgcgctagaattattttatgtttgaattattatagtgttaaactagatataaatataaattctatactaaaataaaagagaaaaagaaataggggctaagttatgggggctactgctagagttaatgacatatttaaggttctaaagatttgggagcagcccccatttaacctttaggggctttaaagtaggggctactactagagatgctctaagagcgggtaaaataggagttttaagctggcggtagaatggccccgctagcaaaagcaatgagctggcaaaaagaaagaaggaaagagagtgtgaatgggcgattatattaccaccggctgtacgtgagcttcgagacaaggtaagcaactgctattggcctatacttgcatgtgaattgtgaattgtgataggtcagtgaggtctgcaaacaaaccatagtaattggcatgtctaaa

SEQ ID NO: 20789 - DNA, 28353 bp, Oryza sativa
ctaaactattgacaaataaccgaaccatatactgcagccttctattatatgaagtgttttttttaactaagctttgggtgacacggccaattttaccgtcgtcagcgggcagtactattggacctgctctaaggcaagtactatgggcatccaagcacatgcccaagataccacataggattaaatagtgagatggaggagagaagaaggatgagagagaaatagtcacctctcatgcaaggggcagctcctacccaaacttcaataaatatgtgagagtgttagatatactggggattgtgtggtagaggtaacctattatacatatcacctcttaatttaaatatgtatatcatgcatgaaattggatgtgtagtcacccatactataaaacttgcccttagatgtctaattgttggtcaccctcttttgcactcatgtgtcacctagccataaaagctaccttcaaagtaatttttgcactaatcccaactattctctcaaaactttctttcaattcttattatagttaggacagtcatcacacatcatcacatcctccatcggcacatttgacatttttgtatttacccacgtatagtttatatctagctacatacacaggtaaaaggaaaaaaaatcaaactatgtgaatagtacaattatatatgcattgtttttttatttttgaaatttccaaattaggcactctcacacagaacaaaaatcatgctaagagataaacaattgtcatctatcattctattcaaccttccctattttacaccttcacaaataaatcttatttctttataaaaattctcgccgcaacacacgggcatcatctattatatctataaagttcatccacactaaatgcagttaatgttaattatctcttctctcatgaagtcacatcatattaattatttttagcctttggatgatcatcaagaatgtaaattgcatctattttcccaaaacacaccatacaatccaatcatttataacctttagataattgatcaaggtaaaaaaaacatataagcacatgaaagaaaaacgtattgtagatattaagaaagaaatttttaaaactcacatctattgcatcatcgcacaattcatccacaccaacacgcaaggtacccatctaattttacttacaccaacatctactgatctactccctccaattcaaaatatagcacttagatttatctaaaaaataataatatcttcacatgtatttccttctcaaccgataacaatcttccatcatttacatacttagtatttctaaaccaattacatttttttctatttaatttcacttttctaatacatgtgtttaaacctaaaacttcttatatttcagaacggagatagtattaaatagtacttgatcactgatgatttgtcacttctaacagtggtatttaatgatttatcaatcaatatctcctcactaataaaagaaaggttgttcggaaatcgtaaatgattgttgatcggaagccatatattattacagaacaatcacttccgatcaggcaaaagaatatctcggtcctttatatcatggacacatgatacgaaattcttaataatatatggcttggtctatctctgttgttgtttctgtcgtgttcgtcatctctatcctccaataacctgtctgtggttgtggacgtgtccattcttccatgagataactacagtatactccactgacaactaactacactacagtagctcagtttcattcaacaactcaggtaagcaatcctctcattctttacgggcatatttctaaaccgctaaatggtatgttttatttaaaacttttaaataaagattatatatatatatagtttgtgatagttaattaatcccacgctaatgacctttcacttcttttaccgtggaaaatctcatctgaattactgaaatgtaagagtagtaaggctgcatttggatctccatatagacaaagctaatatcgtgttctccatgaacatgttttccaaactaataaatagtgcacttcatataaaaaatcaaatataatttaatttttaagtttatgataattaatagttaattaaccatgcactaatttacttgctctagtttccaagccacttagtagctcagcagttctgcgggaatgaacacatcctaagggtgagttcggaagtgagtttgggtttgacaactttctaattctccatgagcatgtttcccaaaactgcattaacgatatgtttcatgtaaaagttttttatagtagtttcttttaaaaaaataaatacacctagtttttaagtttataataattaatattcaactaatcatatactaatagctcatttcgtttcacgtgcctaaaatatctcatcccacgactacagccgaactcagccttaagagtatgaatgcactgttcttcactattcgcatttcgtggcaaaatctcataatcttttcaacaaagcatgcctaatcaagctaagtactcatgagtcaatgagtcatgacccttttctcccttcagagaaagcagagacagaaaaagattaatgtatactcagtcgaacacttcaatctgaaactctgaacctttggtcccataatctgaaactctgaacacttttatatgcagtaataatcatgaacggcacggcggattgaacatcaactaatagatgatcgtgtaaaagatggtgattaactcgatggttcccactggtgtgaatatctgaaaagtttagcggccaaattaaacagtgggagttggtagttttgacctcacctgccttcgctttgctgcttggtcagtgtgaataaatgtgatctccaagcttaacttcctcacgcgtggaaaagcacacagcgtaagctgcttactgaatactcagtcaagcacctggtccaagtaagcaaggtagtactaccagactactagtagtagtattaaaagagtttactagtaatgtgctccataaaaagagttttggatatttgcagattgtttaattttttgatcggaccagtagtttcaaagttaggaaggtaccagtaatatctgccggttttatgagtcacatctggatttttgcgtttgttcggttgaaatttggagcctttgttttgtgtgcaatactgcaatgcattggttagccttctgtttgactatagtagtgtagttccttcacttttcaaaaggaaaattcagacgcttgaacgagttcgttctctctgaatgatacctgcgaagctacatttcgggccaagaagttggaccatttattcattcagacgaacaacaattgcgccatcaagataaagcaaagcgaaagtccattcctactccctcaactataccccgagtcttgtttcgtgtagcacaaaattgggtagaaaatctccctgaaccattaaaacatgatcattttacctccctgagcagttttgatggcggttttgtactatgaggcgtctttgtggcgtatccagaaagaaaatagcggggggggggggggatctaaatgaaatatacaaagctatagctcatctttcccatctaagtatggcaagaaaaattagtgggggctctcatggtactcgtgccagtagtggaggctcgagctccactgctgccatgctggatccgctcttgtctccagatcaaggatcatcccagctgccacctcactcatccctcagtcgctctcaatagtgttgttgcccttgcaaccttgtcgtgactaagctcggaggagtgctgctgtaggctcatttccttgcacccagcctcgccatcatgtcaccaacaacaccaaattaccccaccgagtggatgggaacggaggacggtcgtccaatgacccaaccttttcgagctctagcaatgggctgggtcttgaagcacggaaggtgggaagcgacacggtggagacaagaccggtggcgtcggaggtgaaggagagagacgactagtgacatcgagaggaggcctacatctcccttctctctcctctcctcttttgccaggaggccatccgaatatattaagaagaagaaaagttattagaaaaaaggcagaagctatcgagatcatgtgtgtaccaaagtgcgtgtccaagaaccaccaccctctctcccgtctctctaatcctatatacttatgtagttcatccccactaagtgtagttaatgttatttctctcttctctcattaagccacatcatcacaattatttctagcctttggatgatacatctatggttcaaattgtctcttcttttttctcttttaaaaacatgcaatcttaattatttttaggctcaaaattgtatcaaattgttttagttttgattatcaaattacatcttatttgtacatattatgcaacttaatttttcgcagcaacgcggcggggtattcatccagtatggatgatgaaatgactgggttttaataattcgggaaggctttataccctactgaggaatacgaatcaaactcgggctacagttaagggagacaaaaatggacgctttcgtcaataacagcagatccatacctaaccgtgatactcgttatggcccgaatatgttgtacacggtggcgcccaaatatgttcttgtggtcccttatacgtgtgaagggaaattaacacaaaacaagcatagttcaccatggctgaaaattgccgtggaaatcttcagcaaacgaaatacgaacacgccgatactgtctgccattatctgatctaactacttccactagccaccacccgttagcgtcaggggaagcaaattcgcggccgtgcaggccccctatcctatcacactgcattgctgctatagctgctacaatctgcagctgcaatggcgaacggatcggacaatgcaccattgattgctccccgaccaagccgcggattcttttgacaaatacggacagaaatctctcatgcagacaacatccgcgatgatctctgaatctctctctctctttctcttgcactgcactgcaagccagcgcgattagtgcagaggccgcaatggccaccatcatgagcgagctgaaatgaaatgaatccatcctcgccgcagcacgccgccccggcggccgccatcaatggccctgcattgcatgcaatgtgaggttcagaaagttcagaggtgtaactgctgctgctgctctgcaggtggatctcctgcgcctgaaaattcgtccttgggatgccgggatctcctcccacatcgatcgcggggggattcgttgcgttcgtacgcctcgtgcgctcgtcagggggctcgatcggaccacggtgtagcgcataaaagttggatctcttcctctttttcttttgccctttctgcacttgcctgaatcttgatctgaatatctgatggacagacacactggtaagaacttcagaaattggcatgtttgcaatattggcctgtttagatcgcctggcaaaattttttcaccatgtcatatcgaatgtttggacacatagatggagtattaaatataggcaaaaagaaaaattaattacacagattgcgtgtaaattgcgagacgaatcttttaagcttaattactccatgatctgacaatgtggtgctacagtaaacatttgctaatgacagattaattaggcttaataaatttgtctcgcagtttacaggcggaatctgtaattgttttgttattagcctacgtttaatactttaaatgtgtgtccgtatatccgatgtgacacgtcaaaatttttcactcctgaatctaaatacacctatatcaatatcgattttatcctctgtcagggttggtggtggattggatttggatccaatgtgggggatgttggggttttagtggacagaaatgtcttgaaaaatttgcgaaactgggatgattttcgctgacttttgggttgaattggtatggaccgggaattgccactttcttgtcgctgttgttatcagctttatttattacaccatttgcttggctttgatttgtgctctcttggacttatgagagatctcattttaaaacacgtgcagttatactgtaaacaccctggatgaagagtgtgtaagattatacccttttctgttcccatgaggatatatatattttaccttgatttttgttagcatgtttttcaaatggtgcgatccgtgcgaaaactttccatatagaaatcgctttaaaatattacatatatccattcgtcaaatttgtaataattaaaacataattaatcatgtgctaatagctttatcgttttacatgcgtcaacttaatctttatcttcatgagtttcaaacaccatcatgtgttttgtaaaaatgtcatcaccagattcatcataaaaaaactttcaaacaaatatattttattatatacctcacaatataatatttttcaaaaaaaattagcgacgcatagtgtggcgtgtcaaaagtgtgctggagactacgtagctgttcgtttggcgactaaacctcattttatcgatacaaaagttgaccaacacttaattggtcatagagcgtgacaacgttaaaaaaggaaaattgagtatataacatgcgagtgggtataaggcctagtaaagggtgatatgtcgcaactatatcaaccattgagagtggaatctctccggactataattataattgtaacaattatagcaactagtaaaatgtggcatatcgaattctcttcacctgcaatctatgtaactgagtaactccagacttttttaacacgccctactacatattttcgcatgaatggaaaattcaggtgggaatctctcccctctaatgacttgttaaaaataattgaggcacacataagttttaacacggtagcctttggcacttaaccaaacaagccctacgtgcacatcgaactctaacaaataagagcagtagtaataaaaaatataaacctaacttatcaccatgggagcatgaaaagcttgaagatgaaattaagcacatgacactaattaaagtagcagaacaaaaattgaaggtctcaactgcaaccctattatgctctaaatgatgctaccgtatacacaagctgctccagaactcactgtgaccaaactaacctcgatcagagttcttcctcacatagcttactaaactaaaaaaacaaaaaaaaagaaagaaaaaaaagagagagagaaagaaacaggagatggagcagagaagaacaggtagatgaacagggcacatcagcaggagatctccatggagaagttggagtcgaggagctcctcgatcatctggtccacgtactgctcctcgaggaacccgccgctccactccgccgtcgccgccgcattgcccaatgcgccggcggcggcgggaagggacggaatcacggcgcgcgacgacgcggcggcggaggaggaggtggtggagtcgtcgtcgttgctgttgccgcgctgcgcagcctggacggaggcgaggttgaagcggtggagcttggcgacgagcgccgcggagaggaacgacgaggaggctgcggcggcgctgtgcggcggcggcggcggcgcggcctcgtcggcgacgtcgtgggggaagttggtgcgcacgcgcgggccgcacatgatccgcgccgcctcgtcgtacgcgcgtgccgcgtcctccgccgtctcgaacgtgcccagccagatcctcgtcttcctgcaagcccaaccaagaaatcaaaccgccatggccaagaaaccaatctacgcgaggaagaaacaaagaatcaatcaatcaggaggaggatggcgacgatgaattacaggagagggtggcggatctcggagacccatgagccccagtggcgctgccgcacgccgcgataccgctgctgcggccgcgccattgccgacgtcctcgagctcggcgacggattgcgcgtggtcgcggcgagagagagcgcgcgctcgcggcgggagagcgaggagtgagctcgaggttgaggaggaagtgaggtcgaggtgatcagtgtggtgaggcgagccatgggggcggtataaatagggagggaagtgaagcagaaagagtagcgagctcagttcaattcaattcccggcttgtttgaattcaaagcaacccagctccagggtggggcccgcctctgtgcctgatcagtctatgattcctggggcccacctgggtcgagccaaatttgttccctctgatttgtactccctgtgacactcctccctctcagaaaatgtttgcatttctattgcttacgtataagcatttttagggttggatacagttattaagaaatttggtatgattaaatgaggggagtgttgtgattggagaaaaattagaggtaggtgtgaaaattgaatggtggaggattgtgattagttgagaagagaatattgacggagaagttgttatattttgggacaaattctaaatgttagaagtggttatattttgggacagagggagtaattagcaaagactaagaatgaagtgaaaaaaatatccctttcagacatcttattggttaaattttgaattttgacttgctcagattcccctactaagcacatgataggttgaaaatacctgaatttccgtggattgaaatcaatgtctcgaaaatactcatattgtgtaatgtttcaaaaaaaatactcatattgtgtataaaatttggatcctacaaatacttatatttagaaacggatggagtacttagcttagcttttgtttgccattttccctttttgtttacttattagtagtagaaagtttgattataaaaagatagaggacatgcagaagtcaaggctagtgtcgacaatattcccctagaacatccaaatcatggcattgcattatccagtgaaagtaatcacctaatccagtgacctatattaagggaagaatgaggttataataattaatctagtttatttagttcaggcctaactctagacttatccacagtgcaaccatgttagttcagttataatgtcatatggtaggtaaaccagagaaaactaatgtatgctctcaggaaaaaagagagcatgctactaagctctgaacttcggattccccacaagaacccaaactagcctacaagcattttcttgtgcaatggtactactactgaagtttttttttaatataaaactctctgtttttatcctagtcatggctagggtaatcatttttacaatgaaagtacaattctcagtctctgcattagggttcctttgaaacgcgggataggaaaaacatagcaataggaacaaacataaatcaagtgtcatgagtagccgaatcctataggaaacgaagataccgggaatttggtagagaagatgtttggttacttcataggaaaaccacaagaattttgaatgaaatacttcattcgaatgggtaatagtagataaaagacaagatattaagatacatgttgccttggactttccgaaggaaatgcaaacatgatgagctttgatgtaataatgtttggaatcatccaattcctacaatctaaagggctttcattaaaattcctatgaaaatccttggttcctagggaggcccttaatgggaatgcacgcaactatatcttttcagataatggatgctctattgatctcaacacaaaatacatcaagatgatataactcgtaccaagaacactcttgacctttgcataactaagatccatgtagccaataactcacaataatatgctaggatcattcttgttcagatttgtccctagaagttgattcttttgggggcagatagtgtaactaaagataatctagttaaaccaaattgtgaaaagctcaattagcccattatacatcatcctagctagctatactatactagaatagatgatgatcacagccaagccaaccaaccagttgcaatggctagctagatgttgagataaccttattgggctgctaacaatgtagctggttggcaccatccatggagccagagtgtcaccttgggaagagcagggtctgcactgatctgcaccttgggaagagcatgcagatggaactaaactgaacccaagccctcccccaaaagacaaaaaccttgcaaatattgcaatggctgctgcgcctgctgaggcatgatcagtcatcactcatgcattgcctttgcctatcatgtctgcctcctgcttgtgcagctgtaagtatgtgcatcttcagcgtcagttcagaactctgcaattgtctgaagctctgagtgcctgcatgtgtgtgcgcgcgcgctgtgtgtcattgaacccgatggctgtgcacatgcatgcaccgtatccaccacacgatcttggctcgtcccttctcatgttggacgctagtgtggtgttttagcaaattaaggctccgtttgaggagcttaagatcctggaaaatagccagtgagaaattacctgatgagaatctaaataagctgggcttttcagtttatagtttatatattttctggattttacaactacaccttctcataatatggatgagaagctagctgatgagaatatgaaagctgttttatcagcttctgacttctagtttattttctatattctgtaactacattttcttaaaatactagcatattgtccatgagctgcaatgggatttaaattagttaaataaaattatcattaatatattattaccatctcttaaatattctatatatttgttactgacatgtggattctttagtcccacaccattcttttttcttcctataaaaagtagagagttggtgagagtacttgacatgtcttttttttttctaaaagaaagttgggagttggtggccaccaccactactctgagtatagataggtgaaattttgaactatttaggagaattgaacaatctagaagaatctatggttatcagaagctctctaaaataggatctaaatgggctcaaccagctgtgaatttttatcgttattttagctgatcgtaatgaagaggaagttgggagtttgtccttatgtttttctattcatgttagaacttattggctacatgcttaacgacagaggctggggatgtaaataattttactatctaaaaaaaatcagccgctaatgcataatgcaggccattaattctaatcagggatcagtacaatgtgcaatgtacatacatgctgctaccatgtacagtgttatgctggatttttcctgatgatcagtgtgagtcagggtatgggcactgaccagggtttgttttggaggctcatggttgagacactaaactatactgttgtgccatgtgggttctaaatagtagtgttcttaggtgacagtgagagtagctagtctgtctaatcactgctgatagaatttggaacccttcctccatgctggttaactctgatgattaattgtttatcaatcctctgacaaatgacctaataaccatattgtctcctctgcagcttccatgcttgaattggcatccattcactgattcacatactatatgcattgaacctcacaagaattggacatcacaactactagttatacacatagagataatagggatagagcttaatctaatgagcctcacaacatggcagcacatgctgttcaagcccagccaattaaaaacaaatctgtactgaacctttactgcaacaacaatctgctgatgcgcacatagttcctctcttgaatgataagcttacaaaacgagaattttatggctctgctcagccacagtcccaaactgttcttactgggagtctgtcatggtcgaaaggacaaggccacaggcaagaaccgatcgatcggccggccaatgctgcaatcctgcatgcatgaacacgaacactgacaggatctatccgtgatccgcctaaccggcacagagaaaagttcagaaacagaaaaaaaaaagttcagagaaacaggttatcagtatggttcttgaggcggctacgtggctgcacggcggctcgtcaggccggcccctacgccggcgatgggggaggaggaggaggaagacgacgacgacggtgaccgtgatgatggatggatggtcagatcaggtcagtgattggattggattggattggattgtgttggatttggattggttgggttcagagtttaggagtggagagaagcaaagatccgagtacaaatcttggccatgatccgcacgatctgtggcgctgtggctacacaaacatcactgtgttagtagctctgcatgcatcgctagatgctaccatgctgatgaaatcttgtcactcactcactcactcaccatgctgctgctaagctaaaaagcttagctagctatggagcatggaaaacatggcatgttcttgtgaaagattactaacgtttccatgccatgtgctgcctaatctttattactactaaagaaggtttcagaataaaaagagagaaaagatgtacatgaacaatggaagctagcagggtgttgctacctgctacctaacacatgattcactggaagagttgctgaccaaagtcccaagctaattaaggattctttcaacagcatatatcttaatatctcattatctagatcttgatatcttaacacattatatgtgttaattatctatatgcttcattttacccaaaaaacagcttcattttactctctatatgttgcaagcactgtacattacctgaaattttattgggaagcaggcagaggattacatgtcagttctgtacatgggtcaaatgacgttggtcactctgatcatctctgcactggattgtgatccgtgtttaatgttgatgtcgtttggccccctcctcacacggaatatgaactcattatctgacgattgtgacattgcgaatctgatgctcttttttgagaatacgatgatctgttgttgcatccgagttcaatccagttggcagattaaaactagctgaatgcctcaaaacctcacaaattgtcggcaacatgtgtgtatcagtatcatcatgcagtgcagatctttaatcaagtagtagtggtatcctttttctttctctcaattcagtaattaaaatgcatttcatgctgtttaattaaatataataactctcagatcacaatctgttatcttaataaagtagtattacaactctcagcaaaatgcagtgcaaatctttaataaactagtatcctttttttcccttctcaattcagcaaaatgcattgcatactgttttatttaaatataactctcaagatcacaattgattcaaagagcatgatcacaaattcaagatcatggcaacctagctttcatttgtttttggaggttttcttttcttctgaattggaatatttatatgcataatgtagcaaaacaaaaacatgcaaggaacataccaacatggactgccaagtggttaagaaacgatctgacattgcaagtggcctgattagacatgcaaacaaacagtatttacacgtgtcgcttaatcttggtcggcacatgaacagcgcttaaattctttaattagtctctgaagaaggtcaggtctcctctgccactggcaaagggcagcatccgaaaaccccatgtgaccatgattgcgagatgtcgatgaatcataagacgatgttagtggccaatgagattgcagaataattcagggcgtgccacgtgtccctaatcagcatcaagatttttagagtacagcagagatggtgttatttcccgataacttgtatgtcggcgagcagggatgcaagtatgcaactggaccgacccattgctgatgcatcttatcataagtttgaattggaggaattttagacatttttctttctcgtggatatttacgcctttcttgacctcttttatgtgaaaacgcttgtagcgcagtggtagagccttcagtattggggacaccgaccaagctagggttttgcgagaaaagaaagaaagaaagaaagaaaaacactcctgttagtagaagtgtgctcatatggcttgtttggcaactcgaaggaaggagattgggagtttacatgaaaaaattaatggtgagattaagaccaaaatttgatttttaatcccaaaagatttttctcgactcgtcggtctgagtttttttaatggagcacatgggttctaccgttttttttctttttttttttacaaattttatccattccaaatggaaggcctaatgtttgtagcgtggatcttttatattttgttccaaaggattggtcaaagaacttaaacagcaaaggatgaaaaaaaatcctaatttaagagaaagagttacaagtgggaacactttttttatttactggttctctgtgttgttcattattttttcatctttttggagaaaaagtttttcattcgtatatttagcatgacatgaagaaaacctaagtattcttaggcccatacctatatttagcccatcgaaacgagtccatgaatggccggaatttccggtccatgcatagttgggcaaggaatacggccatctaacaggcccaatatgagcccattaggcccatctggcccacagctcatctgcatataaaccctcacggccccgaaatgctgcggcttctccgttccaagggtttcctcgcgccgccgccgccgccatggtacgcacctcggttcatctctcctgccgctcttctcgtctcgggatttgtttactcctctgattgattgggtgttcggcgcagccgtcgcacaagacgttccagatcaagaagaagctggcgaagaagatgcgccagaaccgccccatcccgtactggatccgcatgcgcaccgacaacaccatcaggtaacctccgccgtcgccgccttgaatccgatccgtctatggaagggagagacaccagtttccgatccgatccctgagctgctggtgtccttcaggtacaacgcgaagcgcaggcactggcgccgcaccaagctcgggttctgagcttggggaggagaggaggacgaggcgccggacgccgctgccctgggaagaagaagaagaaggagaagctagggcttatgggttgcgtcgtgttcgtttcgaggttttgcctgtcctgaagagactatcagtagctgtgtgtatcttggagcatcataattttgctgattaaagaaccactttcttatcctgcctaaagttgtctgaattttatctcagctgcagtggattgatcagttgaactcccttgttagcataatctgaatatctgattatctgcatattgcctgaatccatttctgctttagtttttggtactgtaaatagctacaccgtttagggtgtagatgaatgacctgttgagattttggtaggggattgggctggtgagtttctctatacttttacccttgatttaacagtgacctgctgtagccatttgtaatcacaggggttgcatgtttgttcttagtcagagagcaaagaacctttgatagcatttctacggggacattagaaatctttggaggatttaacttccgaagcacagctgcttctactccagtgagtttaaccaattgggcatttctggagttgtagggaatttgtcactagattgatgattgaatttccagaaaaataccatgggctggttgaatacatgctaatgctgcaatccagtttgaagctacttcctccgtttcatattataagaccttctagcattgcccacatttatatatatgttaatgaatctagatatatatgtgtgcctagattcattaacatctatacgaatgtggacaatgctagaaagtcttataacctaaaacggaggtagtagtaaaaacttcaccctgcctattgcttgaatccatttctgctgtagcttttagtaccgtaaacagttgcaccatttagtatgtaggatgagatagctgctgagatgttggttggtttaggttgggttaatttagccgtgacctgctgtacccatttgtaatcacaaagggcacataagttcttccttgttggttaatttgtgtgctgcatcactttggaggagacatgcttatacttcaatgagttataaaccaatgagatcttaggacaatgatgcttttgcatgcttctaaatatcagtcttcatgtaggcctccttggagcaatattgttcgatcgtgtgctcttttgattagatttatgaattttgttagtaatatgagatgacagattcataggatgttggcatgatatgtttgctaagttggtgctcgttttgtaagaaaaataaaatgctgcccctgtcctttctgggtgtatgttgtttctgtccccttgttgcagagttcttttgctttcatgcttcctacgaattggtgagttaagagagggactcccttttgtggtaccttggccctgtttagattccaacttttatctttaaacttttaatttttccgtcacatcgaactttcctacacacgttctaatttcttcaaactagcaattttggcgtggaactgaacgcagcccttattgagcccttttgtgtgtgtgtaggtgtgtgtgtaggaaagttcaatgtgatggaaaagttgtaagttcgaagaaaaaaaaaagttgaatctaaacagggcctaagttagtttaacatttttgaaagtttgttaagtttgattaagtttttagcaatatctaaaacatcaaattagtttttattaaaactaatattgaatatattgtaaaaatatgtttgttttgtgttgaaaacgccactatgtttttatataaatcgatcaaactaagaaatttgattaggaaataaaatgcaaaaacgaactgagggaatatttagcaaaaatctaatattgaatatattgtgaaaatatgtttgttttgtgttgaaaatgctactatgtttttctataaaatcgaacaaacttaagaaatttgattaggaaagaaaatgcaaaaacgaaatgagggagtaaaatttagcaataacatggtactatcgtgaattccgagcgatcatcgctgactccgctgaatttctaaacctgaaaggcaagcagatttgttttccctcctttctcctcggagagactatggattcggcaccccatatttttaaaaaatcaggtgcaattctacccacccgatgcttggtgcatagagtactctccctctctctttccttactgtataaccacctttttttatcaaacttttctctcttaatcttaaattatttatatgatttgtaatccgatcacacggttatatttgttatgattaaatctttaaaacaagatctttattatcacacatgaaacacgtgatacattcagtcgtaactagttgtaactattcaaacatcgcaaaaataaaacgtgcaacttttgcaaatgatctagtgtaacattagaaaataaaaatattctctgcaacttccaaataataccatatgtaaatatgtaatattagtaaaaaccattgcaaaaataaaaataaaaatatgaaacatggtcaacttttagttgaaacattatcttctcacctttgaaacataaaaaaatcaatttgtcaaaacctatacatttttttcgtcaaaatataatcatgcgagctattgttgtaagatttagttgtaataaatacaacgatgtaatcggatattagatcatataaatattttaaaagaaaaaatggtttgaaattcaaatttaaggagcccatttgaatcgcgggaatgaaaaaacgaaggaataaaaaacacaggattctaaccgtaatggaagtgtaaaacagagaattgcaaaatacaggaatgacggtttgattggactatagaaaaaaaaacaggaattggatgaaagagatagactaaaaaaaattcgaagagctttgagctgttgctaagtttccttcaaaaatctctatagtattatccatttcataggaatatcaaaggattagatatgatgcaatcctttaatttaaaggcactcataagaattttttctatagaaataaaatcctctaaattccctgtatttttccttcaaatcaaatggccctaaaatatattatatcttacatgcaattgtacccctctcaccatattacgtcagtggtttttttttttttttggtcttgctgtcttgcgtgtatgcagtactgttgctagagccgatcttgttgctgtcttgcatgtaagccgtattttctccccattttcccgcggaatcctgggcctcacaacgcggcgtcgtggcgaagtcgcgacacgtgcggcggtcgagcgccggtgcgtgcgcgcaggcggaggcgccccgcgaagctcgctcggtcgcccatggcggaaaccggaaaagaccctataagacgccccgcgcgaccgccattgcctcgccgtcttccgccccgccccgcccctcccctccacccacgcggagaaggagaggaggagaggagaggagagagggaggcagcagctcgcccgccgccgcccctccctccgtgcccgcgccgcccaccccgccgccgggcaccggccaccatcgtcttcatcatcttcccaataaaccccccatggcgtcctccctctccctcgacgacatcaacgacgactccgtcgacctggtacgcacgcacgcacgccatgtgttcgtccatcgtcctcctcctcgtcagcgtctaatgttgtgtaaatgttgtgatgtgcagtcgaaggcgccggtggcggaggtgttccagaagctgaaatgcgaccggaaggggctcaccggagcggagggagagagccggctgcggctgtacgggccgaacaagctggaggagaagaaggagagcaagcttctcaagttcttgggcttcatgtggaacccgctgtcgtgggtcatggagatcgccgccatcatggccatcgtcctcgccaacggcggcggccgcccgcccgactggcaggacttcgtcgggatcgtctccctgctcatcatcaactccaccatctcctacatcgaggaggccaacgccggcgacgccgccgccgcgctcatggccggcctggctcccaagaccaagctgctcagggatggcaggtgggaggagcaggaggcggcgatcttggtccccggcgacatcatcagcatcaagctcggcgacatcatccccgccgacgcgaggctgctcgagggcgacccgctcaagatcgaccagtcggcgctcaccggcgagtcgttgccggtgaacaagcacccggggcaggaggtgttctcgggctccacggtgaagcagggcgagatcgaggccgtcgtcatcgccaccggcgtgcgcaccttcttcggcaaggcggcgcacctcgtcgacagcaccaacaacgtcggccacttccagcaggtgctcaccgccatcggcaacttctgcatcatctccatcggcgccggcatggcggtcgaggtgctcgtcatgtacccgatccagcaccgcgcctaccgcgacggcatcgacaacctcctcgtcctcctcatcggcggcatccccatcgccatgcccaccgtgctctccgtcaccatggccatcggctcccaccggctgtcgcagcagggcgccatcaccaagcgcatgacggccatcgaggagatggccggcatggacgtgctctgcagcgacaagaccggcacgctcacgctcaacaagctcaccgtcgacaagaccctcatcgaggtgtgctccaagggcgtcgacaaggacatggtcctcctctacgccgccagggcgtcgcgcgtcgagaaccaggacgccattgacacctgcatcgtgaacatgctcgacgaccccaaggaggcacgcgcggggatccaggaggtgcacttcctccccttcaaccccgtcgacaagcgcaccgccatcacctacatcgacggcaatggcgactggcacagggtgagcaagggcgcgccggagcagatcatcgagctctgcaacatggccgccgacgccgagaagaaggtccacgccctgatcgacagctacgccgaccgggggctccggtcgctcggcgtgtcgtaccagcaggtgccggagaagagcaaggacagcggcggcgacccgtggcagttcatcgggctgctgccgctgttcgacccgccgaggcacgacagcgcggagaccatccgccgcgcgctccacctcggcgtcaacgtcaagatgatcaccggcgaccagctcgccatcgccaaggagacggggcggcggctcgggatgggcaccaacatgtacccgtcgaccaccctcctcggcgacaagaacagccaggtgaacggcctccccatcgacgagctgatcgagcgcgccgacgggttcgccggcgtgttcccggagcacaagtacgagatcgtgaagcggctgcaggagatgagccacatctgcggcatgaccggcgacggcgtgaacgacgcgccggcgctgaagaaggcggacatcgggatcgccgtggacgacgccacggacgccgcccggagcgcgtcggacatcgtgctgacggagcccgggctgagcgtgatcgtcagcgcggtgctcacctcccgcgccatcttccagcggatgaagaactacaccatctacgcggtgtccatcaccatccgcatcgtcctcggcttcctcctcatcgccatcatctggaagttcgacttcgccccgttcatggtgctcatcatcgccatcctcaacgacggcaccatcatgaccatctccaaggatcgcgtcaagccgtcgccgacgcccgattgttggaagctcaacgagatcttcctcacgggggtggtgctcggcacctacatggcattggtcaccgtgctcttcttctacctcgcgcacgacacgaacttcttcacggatgtgttcggggtgacgtcgatcagggagagcgagagggagctcatggcggcgctgtacctgcaggtgagcatcatcagccaggcgctcatcttcgtgacgaggtcgaggagctggtcgttcgtcgagaggcccgggttcttgctgctcttcgccttcttcgctgcgcagatggtggcgacggcgatcgccgtgtacgcgcgctgggatttctgccggatccagggcatcgggtggcggtggggcggcgccgtgtggcagttcagcgtcgtcacctacctcccgctcgacgtcctcaagttcatcatccgctacgccctcaccggcggcaaggccggggacagcgcccagaaaaaggcaagctcgccgccgccgacctctcaaccttagatagacttggagatggattttttctttcttttttttttcctcgagaggggaggggaggatatccccctcgtcttatgtatgtatgatgtttaaaaggttattaaaaaatttgaaaaaaatatttagtaagatagatcaatatatgatatgttattctataaacatgtaaattcgaattcgacttttataattagaaacgaaaaaaactgactacgaattacgtgttatatttagagtcgaatttattattttttaagtaaatttcacaaaactacatatacttaggctaaattattagaactacatgtaaagtgatgtatcacaaagttacagatttaacaataaatttatcacgaaactacatgtcgtaaaactatagatttaattataaaattatcacaaaactatatattttggagttcaaatctttaattctagtgctatgttatagttataaatgtccaagttttatgtttaaattgatattactttctccgtttcacaatgtaagactttctagcattgttcatattcatttagatgctaatgaatctaaagatatacatatgtctagattcattaacgtctatatgtatatgggcaatgttagaaagtcttacgttgtgaaacggagggagtacatttgtagtttatgataacttttttgctaaaatctgtagttttacaatatttcaccttaaatctttagtagtgtaataattttagtggtaatttgatgcatcatattaaatatatagttttataataatttgaccaaaaattacccatgattttatgaaatttactctattttttcttcttctagttatgtaagttgaatttgaacatacattttatgaagtgacatgtcacatattgatctatctagctgattttttaaaagaatctttgctaactttttaagcgacgcgaaaaaaacgagaggacctttcctgaaggaatgaatattgtttcgtagatggattctaatcacttgggtggatgtccacccgtttattatatgtcaactaaatgattatgaaaaaattcaaaaaaattgacaagatatatctatatgtagtatatcactccacatacatgtaagttcaaattcaacatctacaagttgtaacaaaaataacaacttgtaaaagttgaattttaaattgcatgtttgtggagtgatatattacatattgatctatcatgttttttttttaaattttttcataactatttagaacacgtgcaagatgtccaccgggtgattaaaagagttcccctatcgtttcctgtagttttcgccatgattgttgtgaacgctattgatgatgatggttgtgtgtggcgtgcgtcgtctccagtgagggaatcctgggtgtttgtctcgcgcacacggcgttcacgacacaaggaggaggagctcacccagccccgccgacgcaaccgccggccgcggcggcgtttccgaccttctcgccggcggtaaggaggagctctccgagcaggccgccaagcgcgccgaggtcgcaaggtatataggcaaacccttcgaaaaccttaacccatgcatcctttcctccggccggccggacaccggccggctggccggagacggagaagacgacgactgagccggcggctgttgcatgtattgcagatcgactcggtggtgaagctgaacgccggtggccggagagcttgttcatgttgccgtaagcgtacgtctcgtgtttgcgtggttttgagcgggaatgagcttgtgagaaaaacaaaaaaaaccaaaaaaattcagtccatctgctggtatatacatatttcatctgttcagtttttcagtacatatatcttgtcaactgtgtatatttgtgcatgtctatatataccctatatacaagtgttcagttgaaatttgcaaattgtgtagatatactccctctgttttttaatagatgacgccgttgactttttctcacatgtttgaccattcgtcttattcaaaaattttatgcaaatgtataagatataaatcacacttaaaatactatgagtgataaaacaactcataacaaaatctatatacctaattaaaaaatacgcaaggtttccggtagtaaatttcgtccgtcctccggtttatccacgcgaacgatccgttttgaccgtccatttaacgagtccgattggaagttgcctcactaaaaatattcatattattaaattttagcaacgccctatgacacaagcatcacaattcccagttggttagccaacgaagcttctgaatggtaggtttggagttctactgccaccaccccttagttttctgctgcttatcctctcttctatttttcctttttctctcctaagctgattatatttttttaaagtacatccatatatttaaaatccatattaaaccaacaatatatgtaatttcttattgtgcttttctacactttatcacctcctcttattaattttttttgaaaagtatgtcctattttttcactactaaaaaaaatcatttgttgccatgaaaaaaatcgtggcatcaatactaaaattgtggtaatagatacatgttgccacaattttaaaatcgttgctagccgtggcaataaatagcgtagtaataggttattgcaacgatttttatttagtgataataaatttagatcttgccacggaatggatgtggcaaaaagtcatattgcaacacttcacatcgttgtgataaacattattgccaccactccatatgtggcattagttttacgtaccaaattaaaacttcaaatattaatctagcatcctatctatttatctatttattttttttatatcgtgtcttggctagaattcgaaccccagacctatccttcatgcgtgctctcctttatcaactcacctaggcatcaattctgttagaaaatacatatcgttccatttaagcctacctaactgagatttgaatcataattttgaatatctaaaagatttcaaatgaaaaacttatcacctacaaaattgtagatatcgttgaaagctataatttccacataaaatttgtctcaatccttgtccatatgaaaaaaattaagttaaattatgagacgataattttttattgtaacgaatttgttgatcgtggcaacaaaaaatagtgaaaagtaccaagtactatgtaaattgccacaaaaattaaaattatggcgatagaacatgttttttgtaacagtacgattttttgtggcgacatcttactttctattgcaacaaaagtactaaataaaacaacgattgtagatcattgcaataaaatataattatttgccacagaaaaattatcattgcaatagtgcaatatattgctacgaattattttttgttgtaataatttggtggcaatagctcaattatcttgtagtgttttttctctcttctaagcttgattatatttttttaaagtacatccatatgtttaaaattaatattaaaccagcaatatttttaatttcccactgtgtttttttaccacctcctcttattaattcatttggaaaagtacgtccatgtgattgcaattaatatgaaaccagtaatatatgtaatttcctactgtgttgttttacgttttatcaccaactttgtatttttttttcattgataacataaggaatatctttcaaatgtcaggatgaaattcatgttaaaccggcatacatacatacatacatatatatatatatatatatatatatatatatatatatatatatatatatatatatatatatataattttctactatatttttctatacattatcatcttttttataaaaaaaaacctagcattttatcatcgataacacaaagaatagttcttacaatttgaaggaacctaatttgatgaaaattctaatgcaatttttttaaaggtatacatataatagcatacattactttttaaatatgtatgatcaaattagatttatgattggctacaatgcaatcctgatcgaattggaatacagatctggtggcttgtctttctcaatgcctaggtggatccttggttatcttcatattagtgttatcattaacaaatttgaattgatattatgtttctcctcacatgataaatcatattcagctttagtaacacaccatttattagttcgaagagatatttgcaattaagtgaagcaagcgctaggagatagcttccatgtgggtcaacatcatgatccatgatatcaaaatactacgcatgcaagaggtcatgaaactaaacaattagttttcccgatgcaacgcacgggcattttttctagtaaattataattacgtaaattttttgaatagacgaatgatcaaacatgtgaaaaaaagtcaacggcgtcatctattaaaaaacggaggtagtatatcttaccagcaatgtgacttcatggcttcatcgactaaaaaaatacagggtttattgaaaatgaacagagtttgcgacatgggcaatatgttacatgcaaaactcacatcttcgggcctgttccctttgatgcaaaaaaaaaaccttaccaaattttgtcattggcatagttgccaaaattttggtagaatttcttatatagttaccaaaatttggagcctgttcactttgatgctaaaaaaaccttaccaaattttggcaattttagcaaatgtgccaaaattttggtaacttgccaaaattttggtaggatttcttatatagttaccaaaatttggcagcaaactaaatgtagccacttttttggcaactttaccaaaatttggtaaggttgaaaatggcatcaaagtgaacaggctcttggtagcaaactaaatgtagccacttttttggtaaatttaccaaaatttggtaaggttgaaaatggcttcaaagtaaacaggcccttcattccctgaagtttacagaagagattcgaattctttgtaagagtacaaattgatggccggaaaaataacgacgaagtcacaacattcaaatactagtattcaactacagtactaaaaatctaagatgtcaggagaagattagtaggcctgaactatgtttcctggaatgagagataagctgctaattgggagatggcgtctgaagatatccaggcatttgagacgctcactggaagtcctacggaaggcatcgctactccactgaattctttgtttcctacgttatagctcatgccatgtggattgacccagattagcttcatatttcgatatgctgtagcactttatctgacattccaaaacaggaacaggatagcacttaaggatcagttcgactaccaccatcctccaagttcctttgctcatttgaagttctaaggttctttccagcaagtgaattcaggaggtattaggttttcgtcgcaggaaattacagccttggcagtaagctttccagccaaaccatggaacagaagacccctggcaccaaggccaccaactagcaaaaactacagttgctcctcttgcctatcacatcattcaaacaacccaacagcggcaatgatccgttggctgtcagtggaggcattgctcttatcccagcccttgcttgtacaaatttccatttagttattcctggataaacagcagaggcttttgggagcagctcttccattgcattgagagcttcatcatcagatacagatgaagaatagttttctgacttccactgccaagtcgacccaatggaaacggtacgaggaccttggaatgccagccaagcatcagataagattgaaggactttgactgccatatgtttctctgcaggaatgaaacacaccaattagataatcccagttgatgctgtaatgacttaagttcaattcttaaacacaaagaatttcccttacattgtatctgatggcaactggaattcagctataactcctcggcatgttctaagaggtagcttatttgtgagttctggaagtgagctagctctagcaccaaggcagataattactgaatcataatcacctgcagatgtttgataggatctttaggttagaagaagtccatactgaagcagcttcagtgaaccatacaagtgttgcattttaacatttttcttaacagaggtctctgaaattaacaattgtaaattgacaagaacaaatctttgcttttgcttcaggagtagacactgtgtgcactttcagtttaatgttaatggaaaagccaaaattgaaagcatggtataacaaggtccatgtttgtccttgctcaatcaggtgattgagcgagaatttacctgccaattgctgtagatcatcgacgtgttcgttgtacagcttgcactctttctgttcgctggatgataatgatgcttcatcagacatattttggcatgcgaagaacaaagcctgcagagcccccaagaatgggtatcaagaatagatgacaaatcattgacaacgagatagcgtgaaggagcacaccacctgtaaatatttcttagggttgatgttcagcgctaatggcatgtaaactgcaaagttcaacggaacacataacccagggatcagacactgtgcctcgtctgaatcaagaacttgaaggctgcaactctggagggaactctgagcattctaacttggataggtcgaagcagtcaagatcgtacaccagaaacaaaaaaggaagcacctgagcatatcagcacaatcttaattcagcagtacctccagcaatatgtcagcagttttctcgcttgtaggcggccgtataattcccctgctcagttcagttaaaccacttctcataatgtgcacacacaaatacagcagcccacaaaagacatgccaaacagaagcaataagtaaatccataacaagtctatctacaaagaacaaggaattgccttctccagataagggtctcatcttggctagctccatctgccccagcggctccattcgcttgctccgcgcaacgcagcagatccatgcataactactg

SEQ ID NO: 20790 - DNA, 688 bp, Oryza sativa
cctcactctcatctctattaattataaaaccgagctttccatacggacctgttaaatatgattgtaattgtctatactcagatggacctaattcttcaaaatttttagcatcaaaaacaacttgtcttgttttatagtcctccaatactcgtttccaaaaatcagatttgccaccattggtgcctataatatctcgtctctgaactgcgttaccatttggatgggacttgatgtctgttaggtgggatgcaaatactattcttagtgcgtctaaacaccattgttcaaattcagtggcaccttcatttcctatcggtatctgatctagatgagtagttatttgacctattgttttatttctaatggctgaattatctgaaataatattaatatcatattcgtcatttatctcctctgcttcctctggagcaagtgcattacgatttagattcaaaccaagccagtaacatggatgaattaataatttctcattactttcaaaacctttatctggagttcgcccgtcatggcaaaatgaataggatgaggtgtttttatcacgaataccaacaaatcctacactatacaaactttggagaattccacttgcctttaacaactgtatttcagacgttattttaggatctccattttcttcgattaattcgaaagatgcttctattttttt

SEQ ID NO: 20791 - DNA, 806 bp, Oryza sativa
attctgcagttatgcatacgagcgagtgccaacctctttatcttgaaatacaggaattttatgaaggcctaaatatgaaagtggaacaacaagttcccttgcttcttgtagaaagacaggctttaaatgaagccatggaaggagagaagactgtatgttgaccaaagctggacaatccatgattctcctgtttttcactatactaatgttagtaaatattttgtttcctgtggaaaccagggtcaccaccatcttccagaaacaagaggtttatgcttatcagaagagcaaactgtcagcacggtgagaactattctgagcatgagatgaatggatcttttcataatttaaattctatttcaattgtattggtctgctgtgttctgacttctgactgagttccagcatttatttttaatattttagatattgaggagaccaagaatggctggaaataaagttatggaaatgataacggagccatataggttgactcgtcgatgtgaagtgactgcaattctcattctttatggtctcccaaggtgaaccacttactatctgtttcataatgccattgttaccttgttgctactcttttaatatcaacaaaaactaggaggaatattcgaatttataactgatttgaaataatatttctttctgtgttggagaatacattcttctaaaaaatgttatggattcactgaagatattctggactgcatgctgactctacagagttaatgggaaaagatattactcttgtgccttgtcactgtagcttctgcagtacaatatgcaaattt

SEQ ID NO: 20792 - DNA, 1144 bp, Oryza sativa
ggtgcaatagctgcctgtggtgaacttggagcgctgaagcatggaaggcagctccacgcacatcttgtacagtgtggatttgaggcaagcaattctgccggaaatgcacttctaacaatgtatgccaaatgtggcgctgtgaacgatgctcgtcttgtgttccttgtgatgcccaatttagactctgtctcgtggaatgccatgatttcagctcttgggcaacatggacacggtagagaggcacttgagctatttgaccagatggttgctgaaggcatagatcctgaccgaatttctttcctcacaattttgacagcatgtaaccatgctggtttggtagatgaaggcttccattattttgagtccatgaagagggactttggcattagtcctggagaagatcattatgcacggctgatagatttacttggtcgctctggaagaattggagaagctagagatttgatcaagacaatgccttttgagcctaccccgtccatttgggaggcgattctctctggctgtcggactaatggagatatggaatttggtgcttatgcagctgaccagctgtttcggatgataccacagcatgatggaacatacatcctactgtctaacacatattcagctgctggacgttgggtcgatgctgcaagagttagaaagctaatgcgtgatcgtggggtcaagaaggagcctgggtgcagttggatagaagtaggaagtaaaatccatgtgtttcttgttggtgatacaaaacatccagaagcacaggaagtctaccaattccttgaagtgattggtgtaggatgagaaagcggggatatgttcctgatacaaagtttgtgttgcatgatatggagcctcatgaaaaggaatacatattatttgcacatagtgagaagctggcagttggatttggacttctaaagttgcctcctggagctacagttactgttttaaaaaacttgagaatatgtggtgactgtcatactgcaatgatgttcatgtcaaaggcggttggacgggaaattgttgttagagatgtcaggcggtttcatcatttcaaggatggagaatgttcatgtggtaattattggtgaatatttttttctgcggggatcctctagagtcgacctgc

SEQ ID NO: 20793 - DNA, 692 bp, Oryza sativa
tcttgaatagaactttgctgttcataaattggtatatatccatggttcttttggatatatggagaccttcataacctggatgtgaggggaagaacagttcctcattgaaaacagcttgatcccatgatttgggttcacgagaaaggcggccagctactctatccaaaagctcaatagaaggaattgttggccttatgaagaaaaatccggaattataaacccatatgcgcattgtgtgtgcgtatcttgcccagcccattaagggctcatcaaatacatcattgaaaccataagctgtcctattgtcatgaccatcactcattgactctacatcagcatctctgtaaagatgatcaaacggattctggaagaaaataatatcgatatctgataggagcacactatatccaagctgcaagaattccctcaatatgcgaaactttagtccagacacagcatggtttccacctacctttccaatattgtcaactccttcgtcaggatcccgcctataaaatggaacacctttagacttgcaaaaggtttcagtgctgtcatccaatgcaacaattaaataatttgaaatcccaactcgtttgatgttagtaaaccacatctcaagcatctctctcacattggagtttgccaacgcaacaattagttctttgggtaccgagctcgaattcgcctat

SEQ ID NO: 20794 - DNA, 687 bp, Oryza sativa
tcaacattaccaagatagatgggggaatagaaagttcgagttaaaaaggtatttcaaaattttgttagcaacctatatcgggagagtcgctcaacaatgttatccacggcgatgttagaagcagcacaagcaagaatctttgatccacgtttcacctcctgcaatattatctcaatgatagttgttgtcttcccagtgccaggaggtccatgaagcaagaaaacatcccttgacctgagggccttcgagatagcatctttctgcagaacaaagatatgggccccacaaaaaggaaatttatttcatttgaatacatattgaaactggtatttgaaggcgatacaaaaaagaacataacaagtagatatacatggtaaagacaaaaggcatcaattgtaatttttttatttttattaaacaatcaatttctagcaaagaaaataaaaaatgtggaggccaaacaccagtgccagcataattagctgtggagttcaccgaagcaaaagcaacaccattaacagaagtattgcaaatatatgctactactcaggatgaggtcttccaaagccagtattagcaggtgcaagaattatatgtaatcgatgacggtgttgacacatttggttgtaagttgtaatgccaaaagtgatggaatgtccacagtctgaaactgcaggtgctggtgtt

SEQ ID NO: 20795 - DNA, 1133 bp, Oryza sativa
gcaggccgtgtatttggccacctttccggccagagccaactcggcctgctgtttgttgccccagaggaggacaacatggagacgatcgtcgcgcaggatgcgcttgtaatcacgtggaactcgtcgccagacaccgcagatcttgcccgtggcattctgatagacactgagagtgcccgccaaggtggtctccagttgatgctcctccaggattacacccgcatcatcaacgaattgaatggcacgcggacgaccgattcgcgatgaggtgtagaaggagtagtatagattcttcttgtggaacaggaaacgggcggtggccaccacattctgcggattgtaggtggtgtacatggacttcatttcctcacccttgaggaaataggaggtgcggcccgttagcaacgcagcgtaatctataaatagggatcaaatgaaaggtggagataatccaggtgttagataaatacaatagttctcttgttaattaaatgtaggagctggtgaatgggattacaatttcccgcaggatttggcggattctattgggatctgggtgggtgtccggtacttttgtacttacgtttcatgttgcgctcttcctcttcattgggcacgggcacatccaaggctacatccgtatctgaaagatggagggaatacaaatagagaataagatgatgctgggcgataaggtacgaccttaaatggaatttagatagcaacaaatgcttcaaagcaaccgaaccgccgccagccattcaccatccatccagccagccatccagccagccatccagccagccaaccaactatccatccacaatttgtggacacaattccggcattcaaccaaaattccagttgaatgggtgaatggtgaatggctgaatggacgaatgccaggggatcatcatgaatggcaatgcaactatcaggtagagatcccacctccgactaagaccttccatttccacctctcgcttccacccaggtggcattcattaatcgtgcataaattgagggcaggtagaaggtagagtttctcgaacgggaagtctaacctacatctaactagggaagtgctttgtatttgaggatgtgcggactctggggttctgaattcatgggta

SEQ ID NO: 20796 - DNA, 1531 bp, Oryza sativa
aacttggattgatccatgacaagccattcgataggaccacaatgcttcagccaaccttgtatgccattgtcgagggaaatctaaaatcttcctattgatcagtttaatcaaactcttgttagacgcttcggcttgtccattggcttgtgcataatatggtgaagaattcaacaatttgatacccatgctatcggcaaactgaacaaactcgtcagacacaaagacagacccctgattggttgtaatagtctgaggaatcccaaatcggtagataatatgttccttaacgaattgtatggcatctccagaatcaactttcttcaaaggaattgcctccacccacttggtaaagtaatcggttgccaccaatataaacttgtgtcccttgctcgagggtggattaaccataccaatcatatcaattccctaacctctaaatggccaaggcttgatgatagggttcatagccgatgctggcgctctttgaattgctccaaacttcttacaatcttgacaccccttgtaatatctgaaacaatcctctagcatcgtcggccaaaaatatcctgcgcgccgaagcaaccactttatcttgtgagccgattgatgaataccacaaataccttcatgaacctcacccatcacaaccttagcttgatcggcactcaaacatttaagcaacaccccatctattgtgcgataatataactcatcatccaataaggtgtacttcaaagccttgtgacacaaccttcgtgaagccgattgagatggattatgcaaatattgatacacatcatatctctaatcatcggctatgatcgcagctatctccacctcgacgtcctttaacatcggcttgtatcctgatgcccctgagccaaatcatttgcttcaacattttgctcccgagacacatgttttagagttaccaaccgaaaactattcatcaattctcggcacttctcattatagattatcaatgtatcatttttgcactcatattctcctgccaactgactgatcaccatcaataaatcacccataatttcaattgcatcggcttcaacttccttgagcaactgcaagcctttgagaactgcttcatattcagcttgattgttagttgcataaggcttaatagtataggcaaactcgaaacttggcccccgaggagaaattataactaagccgataccacaatcatgagtgcacactgatccatcgaaaaataaagtccaagccacaatttcgactgagccgattgagtcatcacgatgatccacaataaaatcggctatagcttgtcccttaatcgccttcggtgactcataccgaagatcaaattccattaaagcaaatatccactttccaacccttcctttcaaaattggagccgacagcatgtacttaaccacatcggctttacatatcacagtgcattcattggacaatagataatgccttaactttgtgcaagagaaatacaaacacaaacacaacttctccataggagaatgccttgtttctg

SEQ ID NO: 20797 - DNA, 2203 bp, Oryza sativa
tcaactcctgtaacttctttttgtcctccggaagtttaatctttttaattgcattaatactcctttgagttacctcaatccccctctcatgaacaaaaaatcccaaaaattggctagctgacacgccaaaagcacactttgttgggttcatcttcaagctatattttctagttctctcaaaaatcttcctcaaatcagctatgtgattttctatttcatttgacttaatgaccacatcatcaatataaacttcaaccaaccagctgatcagatcgtggaatatgtagttcatggccctctgatatgttgctccagcgctcttcaagccgaaagtcatcacaacccactcgaacaagccgattgcaccgagacacctgaaagcggtcttgtgaatgtcttcctctgccatgaaaatttgattataaccttcattaccatccataaaactgataatcttgtgccctgaagcagcataaactaattgatcagcaaccggcatttggtactcgttcttaggggtagccttattcaaactccgaaaatctatgcacaccctaagcttgccgttcttcttgatgactggcactatgtttgaaacccactcggcgtatcggcatggtctgataaagccagcatcgtataatctagttacctcagccttgatagcatcatacatatcggccttacatctccttggaggttgctagtgcggtttgaatcctggcttgataggtagccgatgttcaataatcgatcggcttagtcctggcatctcataatactcccaagcaaagcaatctctatattccttcaatagctctattaacttggctctgaactctgccgataaattcttactgataaatgttggccttggcctatcccctggaccaatatcaacttcttccaaatcatcagccgacatgaaaacttgtccttgcttgtcatcgagatcatctaccgtgtccttggtgtagacgtttgaaccctccacgacgcactcaaaataataatttggggtctccatcttcaattggctgtatatcacaatcgaacacttttagaaaatatccatcccaaacttttacagacaggcaatcaatcccatccatctcccaaagagttaaatcggcactagcaacattaactgacctgtcggctggtacgatctcaatcttgtcatcttgccattgaatcaagcactgatgcatggttgaaggaatacaacaattagcatgaatccaatcccttccaagcaacaggctgtaagaacctttcccatcgatgacaaaaaagattgcaggaacaatcatgctgccaactgttagttctacgttcagaactcctttggtctccgatggattgccaccaaagtctttgagaaccatgtttgttttgatgagatcatctgaatttctgcccaactttctgaatgtagcatctggcatcaaattcacagcagccccaccctcaaccattatcttggacatcggctttccattgacataaccattaatatacaaaggcttgagatgccgattctccgtcccttctggcttctcaaaaacttcctgttctggcgacaaaaccaatctagtagaggcttcctcaacttcatcaacattggcttgtttggcttcgtattccgtaggtaacagaaacaccatgtttaccgatgcagttacaacactttgtcctttggccaacctttttgctttgtcggcttcaacttcatcggccattgcaaccttgctcttaacgcgccattcttgcttaggcttcgctttcttcagccgatggttgatttcttgctccacttcctgaaacgctccctgttccccattcgttgaaccctccttttctgattcttcataaaaataccagaagggcaccattgtgttgctctatcttcatcctcactttgatagtattctcgattgaccgggcccaacctttgatgaacgggaaccctcttccgactcagccgattacctctgttgtatgaccggcttgaacttcctgtgtcattactacatccagggcaatcttcgatcgatggcagtctcatcccctcattccagtaaaacctgaaaaactcacaaccccaatgaggatcgaaaccatcaccttcttgctcgtagtacctctcctgctgcttatcatgcctcctttgatatttattgataatcttggtcgaattcaa

SEQ ID NO: 20798 - DNA, 6872 bp, Oryza sativa
tgatttcttgctccacttcctggaaacgctccctgttccccattcgttgaaccctccttttctgattcttcataaaaataccagaagggcaccattgtgttgctctatcttcatcctcactttgatagtattctcgattgaccgggcccaacctttgatgaacgggaaccctcttccgactcagccgattacctctgttgtatgaccggcttgaacttctgtgtcattactacatccagggcaatcttcgatcgatggcagtctcatcccctcattccagtaaaacctgaaaaactcacaaccccaatgaggatcgaaaccatcaccttcttgctcgtagtacctctcctgctgcttatcatgcctcctttgatatttattgataatcttggtcgaattcaactgagagccttgagttttccctccattggctgatcttcctgctgtatgtaccatgttgacgggaaaaggattaccatcaactttcatcggcttcttggagtcatcaaatttgatctttcctccctcaatagccgcttggatctgctgcctaaagaccttgcaatcattggtggaatgggaaccagaattgtgccatttgcaatacttcctttttcccagctcctcagccgatggtattatgtgactggcaggaagctgtatctgtttctcccgaagtaaaaaatcaaaaattctatcggctttagtaatatcaaagtcatacctttcttcttttccagaattcttcacccattggcacggtataacattgcttcttacccactcagctgctgctacttcggaatcatcctcctcatcggaatcacatatataaggacacacgtgattgatctttttgaaattcttcttagcctccgcgaacctttgttcatgcaaggtcaccttctgtgcatgatgagacaaactttcaaattcctgagacaaaaacttctccttgatcggagctatcaagccctggaacgcgagatcggctaactaagagtctgtcaaagacaaactataacacttgttcctcatatctctgaacctctggatctaatcttgcacggtttcatcatgcctctgcctaaccgctgtcaaatcggagagtttcatctcatgagttccgttatagaagtagctatgaaattgtttctccaaatcaacccaaccttgaacagaattgtaaggcaatgaagaaaaccatgtaaatgctgaaccagacaaagacaaaggaaacaagcgaacttttaaagcatcaacaaccgatgccaagagtcggctgacatgctcataggtcgaggcaatgtcttgtcttgagaattttgaaaaatttggaaccttgtatcggttaggcaatggaactctctcaaaccacacagtgtaaggatgccgatacaaatttccagtatcttttggcttaagtgcaaactgctccctcatcacatctgcaatcatatcagcccattgtctctgctgaggtgccccttgcacttgctgctgtattgattcaaactgattgaactgaggagcatactgagactgaggtgatcctccttgctgatactggacatgaggcgaaggaggctggtattgataattcaaattacccccttgatagttctggaaattcggctgaatattacgcaccaagtgctcagggataacttgggctgcaaccgactgatctggttgtacagatgcacgagatgttcaggaaagacttgagtcacattttgatgtttgccgactatcgggtgtcctaaatccagtcggcatctgttgcaccgtctgttgccaaatcggttggattctcagctgccttggcggcgtctgctgaactggtccaccagtcggctgagttggcaaaaacaatgaagcaatttgctcctgggacagccgattgatattctgaccaggatgttgcgtttgctctcgggacaagagacgaggattattaactgtctgcctttgtgccgatgatggtgcagctggtgttggagtcgaagctgctgccatcggctgaacttgtggtgcattgggagtactgtgttgattacttgtcgccaagctcctgtagtttgggaaaacaccccctggcaaaaagactggccctgtggtctggtgttcagctattgtaccatcaatcacagacttaattatattggttaatgtattgacaggcactccggactggttaatcaaggcatgttgtacggcgtaatcaacttggtcttggaaattcatgcgcctaggaggttcttcctgtacttcagtgccatcttcaccaagatcttcaattgcaccatcctgaaggccgtcacctttatcgcctgaagcatcttcagcacctttaccaccttgagatgagcttgttccgacctcatcagtagcaacgacctttactttgtgtttttgaacaacttttccctgtcgggttgctgcgaacgacctcatgaactgctcctgagcgttcttcatcattagctcaaactcgttcttttgttctggtgataacttgtctatggtgactggaacaatgtttccttcattaagtacggacctagtaggttttggaatccttgtttgaggagggaccacaggctttcctgccgatgatggtgactgtggtggtttttcagccatgaggaaatgttgttgaaactcggtcccaccaggcgtgccaaaagcgtgttgatgtgaaaaacacacactggcctggaagatctgctaaacttcagtgcgggtccaaaagcttgcctttaggttcatgagcatgccagttgatttgatcctgcaatcaacaagaaataaagacaaaagaaaccgcggttaaatccataaacgatagccgatcggccagcagacgatgacatatcatttattctcgagccgatgtcatatgtgaatcgatcggcaattataagtaagcaaaataagactaaatccactcgatcggctatagatattaacgctatataatccttttatcgatgtatatttaaaccaagtgattgggatagatcggtcgccatgctgagacagtataaatcacttagatcgaagtatacattaacatgaagattataaactcttatagcatagctgatcagatagatctagcatgtatcagctaatactccgataccactctacgttaagatattaaaacatatagaatatatcaaatagaagcctaatatactttattgcaataagatcttaatataaagggcggatttagcatatcaattaagcatgtaagtcataagactaaatcaggtaagatcggctgaaaccccgatactatctctctagatgatcataaaaccagccagatatcataattataaatactactcaataaatcgaactcaaccgatgcaacattaagcataaagacaactatgagatctaagcaagatgatgaaaatctacaaaagatggtagatacacgacacaatctagattaataacaaaacataactctaccgattacttcctaacaataagaaccagccgctaacaagttatatagggcaactaacatagattgtaccacgtatatgataactcgacggattacataaacagggttaaagtgtcataaagatggaagcattaaccccgagaacgcaagccaccataacaagctttacctctagttgaagatcgaatcgatgcagctcaatcgaaagcaagaactcgtcgaaataaacgaaagtaaaatggtggcgatgcgccgagattgtattgaacgattgttaattgattacatgggttcgggtcatatttatacccaaaatacaagatatgtccttgccagacatgacgcttatttctaacaaactctaagataccataagtctttgcggcagactcttgcccaaacatttctctaaggaaattacataaaatatcctaattaatagatacaattgcctatctgagagccctatctccatcgcggcaatcttcgggaagcatcttgattgattctagaaacgtctttgaaaccgccattatcagaatcggctgcatcatcttcatcggctgtatcagttatcctctgtccgatccatctcagccgatgcagactccagctgatgccttcacagccgatgcatactctgttttttgaattaatctctttatcgaatccgcctcgatcccaatgtcgaacctagttcatgacttcccgaatttggttgtcaacagttggttcttcaaggtccaagttgcttaagcaaataagacaagacgagcaccgacataaccatgtcccacacgacactgcaagaagacaaacggaaaatggaaacacacgtgcaactactaactattcgtctactgctgcgaagggccaggacagaaggtgagaaacagcatgccctctgtgctgccactgccagaggctccatcctcctgaggaaccactagcgcaggctcggcgcggggagtctccaagaagcaggtccaagccagagactccaacaagctcgagcctggaggtactcttttgacagaggtagacgaggcgacgcttggggtggcagatctgctcctaggcgatcttgagttgacgtagctgctcctccatggcatccaactccttcttcagctgcaggttctcctgacgcagctccagaatcttcacgttgttctcgaccaaggcacgacgcaccaggtgatggaagtcgatgcgggccatgtcatacgcctccaccatacgtgccaggtgcacgatggtggtgtcgtcctctgagctggcatccttgaaggtggcgtagtcatgagatctgccatgacaagggtggtagcggaagggcgagtgctgcaactcgttcgggtaatgctgatggatagagccgatggcgaggtaggcaacgctcttacaagactccgggaaggaaccctgcctgccatgacagacagtgatgtcctgttgggagagccagtgataatcactgcggtgacctcccaagcagcacaaggcgtgtcgtcgtcgccgtcctgctccggtagcttcttgcctttatagtccactccatgaggatacccagagcaatgcgcaagctctgtagctttaaagcaaagccggtcaagttcagaccctggcggtcgaggttacgatggtatttcttacgatcacagatagaatccgcaagcgcatggatataccgatgtagcacttcccctacgaagtattccaagggtattgaatccaagggaacgtatgtgtttaactctctctccggttcatccaaggacaccaagtgaagataggcaaaggatatcgaggatttcctagtgagaaacagtttctagggaaagcttaattttaatcctaacgcaatacttcaggcactggcaacctgctgttcctagatgttgctctagtacgtacccgaacagggaggacttaagtgctctcgagagctgtcaacacctctacacccacctcaaacgtactgtggtatacactgcaattactagatattaactacctaaacacctaaacgcaatacttcaggcactagcaattaatatctacttcagtgtttataactcactaacgtaatcactatattttagttgattatagtgacaataatcccgtacgctgattaggaactaaccaagaggtaattctcacaagataaatctatattacttaggaagattattctattaatatcagagtaataaacagaataaaagaaacaagagaggattaccgacagctctagaattcctccgacttcttcaactctactctcttcctaattctagtatacaaatagtacaatacagcctcttgtaattcagctcaagcttggaagtgtgtgaagaagtgagagaagtgaagtctatttaaagggcatgtatgacgattattggaaggggaattgtcggaaatgccacccaaacgccatcagtaacgcatctgggacgtccacgccaaaccacatgatcaacggtggagatatgggttcggccgaaccgtggcctggcccaacaggcctaggttttggcctatggactccccatgatttgccttatccatttctgcaaattttgggccgactgtctagtgtttcaatgaagtctaaagcccatccttgatatggatacattctttcttcacttttagtctgaattttgtcccaacttctgggcttatcagcttcatacaaatatacaccaacacttgtggaatatgtgagatttaacacctatcactatgttggatgttttattatctaagttttatgtagacattggcagttttattatctcaagcacataaattattcaaaaccatacatgtacttgtgaactttatcagtggctaacttaccatcttgggtaattgataaatggaacgaccctgattccagtccttcttgctccttcttgctccctctgccaaattttatataaattttcgcaaaacagctctttccctcataatgactttctctctatcactctagtgtctctgaattttgtgggttctcaccaaggcattttgtgccataatttacccctattctacaggctgttatatgtagagcttgatagggataaattataacatacctgctgtcgcgtctcaaaacgactctaaaatacatcctcgaaattatgcctagaataattaaaatcgatgtgaaagcctccaacaattaaaatgtgcaaagttaaaagtcaaataaggcatggaggatttttgtatatttcctaaaagcctaaaatgcgtaaataaattttagtggaattttcagagcacaaataataattattaagaaataaacaaagttaaaatggttttataaaaagaaaagctctaaaaagtcctttcccccccc

SEQ ID NO: 20799 - DNA, 5679 bp, Oryza sativa
aattaaaatttaaatgaagaaattcgcaaatattcatttaaagagcatataaacttcaaatggccataacttggccatttgaactcggaattggaccgttcaagtctctaatttttccttaagaagtcaagaacccatttttgtgctttgtttctgcttgttatatggagtttattagagtaaaagccttttcttttccgttggtcgtgtagacgctgcagcttcggaagatccgctcctcgtggaggttgaagccgacgtttgggaaagcgaacaaggcaagtcacatcatccttgaacagattgaatcccagtttataaaattattttgatttaaattattgcattatcgctttatttaaattcccgcgttatcactgttttatctagccatgcctatttacctttgttatgaccttattattgttattgttattatttccttgttcaccctagaataaacaaaaccccaactagtggacactctactcatggtaccactagtatgattttaggtagatgcttcgctggttaattaggcaacattaggtggttttacaactctagactttgggatattcgtatcacctggacaatatggaatggtttgattattgtggaattggattcacacctccccctctattcaaaaccctcaaaatggttttaggctgggctcggggtgcatggttttgatagtagcacctcggccatataaggaccggtcttcgggcctctgttgcaaagcactaccgtacttctacatgtctagtgggtaaggcttagtttgtggctcagtctggttataaacaaaagtacacggatggagatggaagaagtcaggggtcgatggacatctctaggacaaatgaaggctacacgagatgcggcccggtagtcgagatgtcatggcacagggccggtgtcctgctgctaggggctcagtcctgcctacctgtcccgggggttccggccgtaggtgggattgggtcggtactcttgtctatggctaggatgggttggaaactatgtcacgtcttccgtccgtataccgtggtggtatatggcacgtggttacacgtgaggaagatgtgtcttgtgggtaaagatgtacacctctgatcagagtataatctattcgaatagccgcgccctcggttatgggcaagccgagcaatgtacccaagttagtgttttaattcttaaaacctgcttaacaactaaaagaaggaatggttggcctgggttggcttgggacgagctgggacccagggtcgggttgccggttcggtctgaatcatcgtaggccttgggttaaggcaggttcgtgtgggttcacggccttgataaataatattgtatagttctagaatcgtgtttacaaaatagctttgagcaactaagtgtcttttaatgctgtttactgcaaccctaaccctttatattataactcccttgtactcccttgcatttattatgcacttgtgggtgtgtcttgttgagtacggtggttgtactcagtcttgctcaatttttcccaaacccagaagaggagtctccgaaagatgaagattttggtgtctagctcgtgcctgccgtcaagcgcctgtggtcgtcgccctagtcttccgctgtttctcgtttgtctttgtgtgtgctgggccttcgctgcccatgtaataaattaactttttacgcttccgcttgttgaactctgaactgtattaacttttggtgtaccttgcctcctgggacaaggaataatgcacgcacgtaaggaacgcccgttgggttatttccggtcgtgacaagttggtatcagagccaggttgaccctaggacgagccttagatcccaagccttagcaatattttcaaaactaaaaatcctgtcttaattgtgaaaaccctctagtctctctctgtcctgctgcttcatttatcgccaaaatctgacttttaaatgttgcttttctttttgtttttgtttgtagatggccggcagcatcagccgtcgtggtctggacctgattggtttcgtcttggagctgcggggcatgtgcgttgtcctggggtatccgcatggagtggactaccagggcaggccgctcccggagcaggagggtgacgatgcagagccccacgctgcttgggaggttactgcagtgatcctcactggctcacccgagaggacttcattggcagtcaccgcgggtggagattctttctccgccgcttgccagaatgccgctctcctcgccatcggcactcttcaccagcgctacccggacgagttgcagcactcgccctaccgctaccaccctcgccgcggaggagcccgcgactacgccaccttccgggatgctagctcggaggatgacgctaccatcatgcacctggcgcgcatggtggaggcgtacgacgcggctcgtatcgacttccatcagatggtgcgccgtgggatggtcaagaacaacatgaagatcctggagctgcgtcaggagaatctgcagctgaagaaggacctagacgcagtggaggcgcagctgcatcagctcaagatcgcctagggagaggtctgtcgccccaagcgtcgccgcgtctgccgcagccagaagatcaccgcccgcaagagcacctccaggcccaagcttgttcgtcagtccctggcgtggacttgcttcgttgagacccctcgtgccgagcccgcgcccgtggttcctcaggagggggaagcctccggcgttggtagcacggaggatgcgctgttgctcaccttccgtcctggcccgtcgcagcggtagacgagcagttagtaggcttgcgcgtgtgttctttctcgtttgtcttcttgttggagtcgtgtggggcatggttatgccggtgtgtggcataactgtgtcggagcctgtctttattttatttgcttaagcaacttgaactttaatgaaccaatttaatagcagtaataaattcaagaattatggtagtcgtgggtggttagctttaattgtcagctctctctgtttgctggttctgtgtggggttttcagatggtgacgaccaggagaagtgctaacaccggtgatggcaaccaacctgaaggcagcaaccacaacaaccatggcagcccacctccacctcctcctccgcctccaccaccaccaccagacaccaacgccattctcacccaaatcctcgcccagcaggccaacatgatgactgctttcctccaccacctccaaaatccgccacaacataatgctccaccaccacccccacaacactctaaactcgccgagttcctccgcatccgcccacctaccttctctagctccaacaaccccgtggatgcgttggattggttgcatgccgtggggaaaaagctagacaccgtgcagtgcagcgatgaggagaaagtcatcttcgccgcccaccaactgcaggggcccgcatctctatggtgggaccatttccaggctacgcagccagaggggcagcctattacttgggcccgcttcaccgccgctttccggaggacccatgtgcccgccggagtcatggcccttaagaaaagggaatttcgagagttgaagcaaggcaaccgctccgtgatggagtatttgcatgagtttaacaacttggctcggtacgccccggaggatgttcgtgaagatgaggagaagcaagagaagttcttggcaggaatggaccctaagctgtccgtgcgtctagtctccggtgactatccggatttccaacgtctggtggacaagagcatccgcttggaagccaagcacaaggaactggagtctcacaagcgccgcttggcgaatttccgcaatcaacagggtgctaaccaaagggtccgctacaccaatctgatgaggacatcaacaccatcgatacatccacgtccccccatatacagcatgatggtcctattacccgcgctcgtgcacgtcaactaaattatcaggtgagttctttcttgagttcatattcctcgtctttatacctcggagacgcgtgcactcgtgttttactcaggaacgatggagaggatccaaagggaagaggattcgcgcggggtggattcggactgcagggcagcgccaacttctgacggccgccacgacttcatgcgaactccgatttgggcgtgcaagtacttcatggaaagcttatcaagtctaccttcaaatggatccagccacatgtccatatctgttctggagcggccgcaattgtcattttactcccgactattttttgtccatggtgctgcgtcacctcttttggcccaatgggctgtgtatccatgttggtcccattaggggcgcgtcctagggttggagcatgaccctatggtcgttcttcccctctttttatacctctagtcgccgccaagaacaggcgggttttgatgatagagatagcttcttgctaccggctcgcagcgcgcgtgttggctaaaccgcccgtctgcctgtaatcggaaccccaccatattgtgtttgatagtgaaactttcatctttatctagcaatctcagtgcttgtcctacttgttcttgcttgttcttcgattgcttgcaggacgagtgccctcgtggccgggttgacgcgcaccacaagttcgcggcgaccattggagacggtgtatcggttgctaaggcgcggcgtctttggacagttgtagtcgggccgtgaacgtcgacttcatctaatcgagttatcccttacctctcatcgaaagatcgggccacaaaccctagcgggttcacatcaggtggtatcagagcgtggttcatcggtgagagaatttacccttccctccgtcattaatttttttttcctatagtccagaaaagaccaacaaaaaaaatagtagattagtttttccatgatcctatagaccattgtgccttttcactagtactgcttagttaaggcttgttgagttttcgattgcatcggttgtgttaatttgctggtcttagtgttaggcgattagagtttcgagttcttgccaccaccgcacatcgccaccttcatcaattttgccgtcatcaccaccgtcaccaccgtcgcagtcacccaccaaatcactttctatttgtgtttgatctgttgccgatagcttttgttagttgccttgtatcctgccgccactagaaaggaaatagaaccctgattcgagtgaccttccttaaaacagtcatatctttttcatacggactcgaaattaggcttataatatatccacggacatctacaaaaaaagttacatccgattctcccccgcttcgccgggttcggcaaatttagaatcgccaaattcctcttgcaaaattctgtttttgtggcgagaagcttcgggacctattcgcatagaactttaaaaaaattctacaagcttcatactttgtccgtttgagataagattttctgtggttggttctagtgtgctcctggttgtgaaaaaaaaaatatcaaaaaaaaaaagttgtgcctctctcctcagcactagaaagagcaagcaaaaaaaaaaaaaaaaaaaaaaaaaggatccagcgagcacaccacaccattccccctttgtcaccaccttctaccaccggttcttgttttcgttgctgtttgggtttgtgttttgtggcgtcctttgtggttaggct

SEQ ID NO: 20800 - DNA, 1804 bp, Oryza sativa
tccccacgcaccaaaggcatcatccaatactttacaaggcaagtgaagcagcacacagaaggacttgatacagatttgcaggtgacaaatgagaagattggacaattggagtccacgcagatctccaccaacactaagcttacagggttggagacagcggtcgcccgcattgacactagccttgctgctcttgtgaggcattttgatgctctcaatgctggaggcaatggtgggggtaatgacgatgacattgacggagagtacgtcgaggataatttagaggatgaatatattgctgacactgaacaagatgatcgagatgctcaagatcgtcgacggctacacaacaatcgacgaggtatgggtggtcgccgccgacgcgaggtacgcaacaatgatgatgctttttctaaaattaaatttaagattcctccttttgatggaaaatatgatcatgatgcgtacctctcttgggagattgctgttgaccaaaaatttgcatgccatgagtttcctgagaacactagagttagagctgctacgagtgagttcaccgattttgcttcggtttggtggatagaacatggcaagaaaaatcctaataacatgccacaaacttgggatgctttgaaacgggtcatgcgggctagatttgttccttcttactatgcacgtgacttgctgaatagattgcaacaattgagacagggtgcgaaaagtgtagaggaatattatcaggagttacaaatttgcttgcttcgttgtaaattagaggaaactgaggacgctgccatggctagatttttgggtgggttaaaccgcgagatttatgacatcgtagactataaagattacactaatatgacccgattgtttcatcttgcttgtaaggctgaaagggaagtgcaaggacgacgtgctagtgccaaggctaatttttctgcaggtaaaacttcatcatggcagacacgcaccactcctccggccggccgtactgcttctccatcttccacacccacaaccagtcgagcagcacctcctacatctagtgacaagtcagcgacaaaggccgctcagccagcaccgagtgcttcttcaatggcatccacaggccgaatgagagatgttcagtgccaccgttgcaagggcttttggcatgtgcagcgtgactgccctagcaagtgagttttggtagtcaaaaacgatggtgagtactcctctgctagtgatttcgatgatgatacacttgctttgcttgcggctgaccttgcagataatgagccaccggaagagcacattagggctgcatttgcggatcactatgagagcctcattgtgcagcgtgtccttagcgcacaaatggagaaggcggagcaaaatcagcgacacacgttgttccaaacaaagtgtgtcgtcaaagagcgttgttgtcgcatgatcattgatggaggtagctgcaacaacttggctagcagcgagatggtggagaagcttgcacttagcaccaaaccgcacccacatccatactacatccaatggctgaacaacagtggtaaggcgaaggtaacaaaactggtgcacattaattttgcaattggaaattaccatgatgttgttgaatgtgatgttgtgcccatgcaagtatgtaatattctgctaggtagaccatggcaatttgatagggattctatgcatcatggtaggtccaaccagtactcttttctgtaccatgataagaaaattgtgttgcatcccatgtctcctgaagatattttgcgtgatgatgttgctaaggctgccaaat

SEQ ID NO: 20801 - DNA, 1309 bp, Oryza sativa
tctgctaggtagaccatggcaatttgatagggattctatgcatcatggtaggtccaaccagtactcttttctgtaccatgataagaaaattgtgttgcatcccatgtctcctgaagatattttgcgtgatgatgttgctaaggctgccaaatccaaatgtgagagtgataaaaaagcccaatctgatggcaagaaacctgagacaatcaatttgaaacccaaatgcttacttgctactaaatctgatattaatgagttgattgcatcaccttcagttgcctatgctttggtatgcaaagatgctttgatttcacttcacgatatgcaacattctttgccccctgctgttgctaacattttgcaggagtactctgatgtgtttcccaaggaagtgccaccggggctgccaccggtgcgcggcattgagcatcaaatcgacttgatcccaggtgcttccctaccgaaccgtgcgccataccgaaccaaccctgaggaaaccaaggagattcagcgtcaagttcatgagttgcttgataaagggtatgtacgcgagtctcttagtccatgtgcggttccggtaattttggtaccaaagaaagatggttcatggcgtatgtgtgttgattgtagagctattaataacattaccattcgatatcgtcatcctattcctaggttagatgatatgcttgatgaattgagtggctctattgtgttctccaaagctgatttgcgtagtggttaccaccagattcgtatgaagttgggtgatgaatggaaaacagcatttaaaacgaagtttgggttgtatgagtggttagtgatgccttttggtttaactaatgcacccagcactttcatgaggttgatgaatgaggttttgcgtcctttcattggaaaatttgtggtggtctactttgatgatatcttgatttacagcaagtctatgggtgaacattttaatcatttacgtgctgtttttaatgctcttcgtgatgcacgtttatttggtaaccttgagaagtgcaccttttgcacagatcgagtttcttttcttggctatgttgtaactccgcaggggattgaggttgatcaagccaaggttgaggcaattcagagttggccgactcctaaaacggtctcacaagtgcggagctttctaggactcgcggggttctatcgccgctttgtgcaggatttcagcaccattgctgcaccattgaatgcgcttacaaagaagggagtgcctttcacttggggcacatcacaagagaacgccttccacatgttgaaagataagttgacccat

SEQ ID NO: 20802 - DNA, 13215 bp, Oryza sativa
tggatgccgattgatggaataggtgttttttccattctacccaccatcggtcgaaggctgtacttctcagcatcctaaacttgatattatcaatactgcctagaggtggccctgacagatttagcagccgatccatcataaggaatgatgtaatctctcctctattttgaatttggcaaagaataagctaatcggcagttgacccatgccgaattgccttgcaacgcttgtcgggtggtagaatttgtaagtcatcttgatgcttttgccttggtgaatgccgacaggaatgatacaagggctgatagctgccgtaaagacttctctggatttatcgtatttttcagaattgactttgtcaaatcgaaaatcatctggcagttcaaaaataccatgtccttcgtatgcaaaccagattcttgaattcctgggaaacccgtcatagaagtgattgaaccactctccaaagggttcagtcgatagcttggatacagtactgaccgatgctgcttctccaaacgatctgcattggcgtgtattgattacttctccatcatcactggtgatcggctcaaatcttgggaagcttacatcggctaaaggtggtcaattggcaaccagtctagtatgcaagtttagccaagtctgaagtaaccaccatggacctcctgtaccgatcgtttttccagaggctatcttgtcagttgcagtattgagggtttgatatagatagccaagtagatacttggcaagaggaaagtgtttcttttctaccaggttttcagctatcctttgccagtttgcagttggaccacaacttgggccaccgaataagaatttttctaaccacatcatgataaaagctgtgtgttctctttgggttactggcccagttcccatatacttagccatgtagcaactccagcctccaatgcttctggttttgaactcatgggtgagttggttgttgaggctggacaggttagctgatgaggtgatatctaggccagtaatcatggtaacatctagcagagttgcggtcatcagtccttgtgagaataagaaggcattcatagcagtggaccagaagtaggtggatgctgccatcatgggttcatcccttgccatattagctgcagttaatgccaaagcttgggatatgccgatttcgtcccagtgagtggatttgctggccgacatcctcttgtaccaagcaggccaggtggtttcggcatatggccaagatttgaaggtacctttccactggctgagatctgggttagcaaatctgaaggggatccgattagtttcgccgtttataaactcaatggggtctaagttaccgattggaccaaggaaaagctgaagattatcggcaatgcttgggacagcaatttgatgggcaagatgctgcgaagaaggtagaatcgaagattgagaaaggaagtgtggagattatggatatcccatatctacacggcgacggtatttggactgggtacaggatacctaatgtagatagaatatcttatctgtatctcgggtttgtttcttaacttgtgtatcaaggaaacaccctgagacttagtcggttacgactatatttcatctgtatttgcatattccgttagggatatagattatcttttgtaacacggactccttcccatatataaggggggtccgggcgcctctaggggcggatgttgattttctctaaatcatacaatcaataacacactcggcggattcatccccggacaggagtagggtattacttcttttataagaaggcctgaacctgtataaaccctttgtcttcaaacccatacactttcctagcttgatagccacccccttttattattgccgaaatctagtttcgacagttggcgcgccaggtaggggtagcgtcaagcttttcgccgatcagtgcaatgggttccatctccggcatcgacgacctcgtcttcccacccgggcagacgtttcggttcggcagcctcgacttcatcaccaacaacttcggcaagatttctctcctcgactcggaatcagaccagtcgggagagaaccagatttcggtcccgtttggattcccgaacgcggctgaaagctacttcaagaccatctcaaccgagtcggcttcaaaccactcggccgagatcgcatcttctccaacgacaccagatcaagatgatggggcttacccaccagtcctgatgaagctccccgacgatttagcggccgtcttcaccacgacagcgtcttcatcctgtaggcctaggcggaagtcggcttcaacaccgatttcgcctagcttcagggaagtcggcgtcatcctccaaccactcggcacggtttcgacagatcagctggatgactacaacagctctcccaccgtcgactcacgtcctactgacatcgtggagtacgacgaatttagttctcgctacaacgacttcgacgacttcgacggaagcctagatgacaactacacccctctctactttggcgttttcatggccaataatgagacggaggtgcaacgccaagcccgggagaccgaagaacgtcgctgactggaggaggagcatcaagcacaagaacaagaacggctacggcgcgagcagcaggaccgtgagcggactgcgaaggaggctgaggatcgacgtcagcgagctttggaagcagggcgccgagcgcgtgatctcatcggtcagcaagatgtcgaagggacaccggttttccgcacccctcaacagaatgcggttgccgcgatcacccttctcgacaccctcctcaaccaaaacgagctcaatcgatccgaccacgtcgtcaacatcttgaaccagacgaagaccatgattgcggcctcggtcccagttaactccgaaagcgtccacacgccgactggcagccgagttccccacttccgatctcatgactaccgtcatccaagcctcagcatcaccggcgcaggatccaaccgcaggagcaggggtcacgacgtgcggtctgttcactcacctcccgaccttcatagggagcgccgagtggaacggcctcgctcaccacctcgtcgccgccccatcgatcttcgcgacacaatcatacagcgccgagcagctcgaggctaccatcactcgccggaccgccacgacgacgaccttgacggagtagcagccttcaccgacgacctgcgtcgagtggattggccagccggcttcaaaccaactggaatagagaagtatgacggcaccactaaccccgaatcgtggcttaccgtctacggtctcgcaatccgcgcagcaggaggagacaacaaggccatggcgaactatttaccagtggctttagcggattccgcccgatcttggctccatggattgccccgtggcacaattggatcttgggccgaactacgcgaccacttcatcgccaacttccaaggcaccttcgagcgtcccggcacacaatatgatctctacaacgtcattcagaagtccggagaatcccttcgagattacatccggcggttttctgaacaacgtaacaagatctccgacatcaccgacgacgtcatcatcgccgcgttcaccaaagggattcgccacgaagaactagtcggcaagtttgggcgtaagcctcccaggacagtcaagctcatgtttgaaaaagctaacgagtacaccaaagctgaagacgccgtcaccgcatcaaagcagtcgggtcccagttggaagcaaaacaagggtacgccggctacgggaggaggtggaagtaacaatcataaggaccgcaagcgtaagcctgcggaacttgttgcaaccgccagtcactcttctcgacagcgttcgcgcgtcaacacgttcgacaagatcatgaactcccaatgcccgcaccatcctaactccaaccacgtggccaaagattgtttcgtctacaagcaattcgcggatcaatacaccaagactgcacggaagaactctgacgaagagcaaagcacatcaaggaagaaggatgacggcgacaccccggcaggttttcaagatcaccgcaaggagctcaaccatatcttcggcggccccctggcttatgagtctaaacggaagcagaagttgactgaacgggagatcaatgctgttcagcccgacacgccccagtatcttcgatggtcagagatcgcaatcaagtttgaccgctcggatcatcctgaccgagtggtccacccggggcggtaccccctggtactagacccagtggtccgtaatgtcaagcttcgcagaaccctcatcgacggtggcagtgcactcaatatcctctttgccaagaccctggatgatatgcagatccctcgctccgagttaaaaccaagcaatgcgccttttcacggagtgattccaggattatccgcaactccactcggccagatcaccctcccggtcacttttggcactcgggaaaactttcgcacagagaatatcagcttcgaagtcgccgatttcgagacagcttaccatgccatactcggacgcccggcgttagccaagttcatggccgtcccgcactacacttacatgatgatgaagatgcctggtccccgaggagtgctatccttacggagcgacatcaagcaagccgtcacatgcgacaaggagagttgcgacatggcccaaactcgcgagatggcgtctgcccgagaggatatccgactggctgcagccacggcgagcgaaggagaaatacctgctaccaagacttcaaaaagtggagaaagcgaagccaagactaagaagattcccctagatccctctgatcctactaaaactgctgtaataggcgccgagttagattgtaaataggaaaacgcgctcatcacctttcttcagaacaataaagatatctttgcgtggaaaccatctgatatgcccggtattcctagagaggtgattgagcactccttacatgtcaaagaagatgccaagcctatcaaacaacgactccgccgattcgcacaagacaggaaggacgcgatcaaggaggaattaaccaagctgttagcagcaggcttcatcaaagaagtccttcatcccgactggctggcaaacccggttctagttcggaagaaaacagggcaatggcgcatgtgtgttgattatactgacctcaacaagtcctgccctaaagatccttttgggttgcctcgcattgaccaggtagtcgactcgaccgccggctgtgagcttctcagttttttggattgctactcggggtatcatcagatccgactgaaggaatccgactgcttgaagacttcattcatcacgccctttggggcatactgctacgtcaccatgccgttcggactaaaaaacgcaggagcaacttatcaacgtatgattcagagatgcttttcaacacagatcggccgcaacgttgaagcctatgtggatgacgtagtcgtcaagaccaagcaaaaggatgatttgatctcggatctagaagaaacctttgcgagcatccgtgctttcaggatgaaattgaaccctgaaaagtgcaccttcggagtaccgtcagggaagctgcttggctttatggtgtctcataggggcatccaagccaacccggagaaagttactgctatcctcaacatgaaaccgccaagtacccagaaagatgttcagaagctgactggatgcatggcggcgctcagccgatttgtttcaagacttggcgagcgggggatgcccttctttaagctgttgaagaaaacagataacttccagtggggacccgaagcacagaaggccttcgaagatttcaagaaactcctcaccgagccaccaatcttagcctcaccacacccgcaggagccgttgttgctgtatgtatcagccacctcccaggttgtgagcacagtcttggtcgttgagcgcgaggaagaaggccatgtccaaaaagtccagcgaccgatttattttgtcagcgaggtcctagccgactccaaaacgaggtaccctcaggttcagaagctgttatatggtattctaattactactaggaagctatctcactactttcaaggtcactcggtaacggtggtcacatcatttccactcggtgatatactgcacaaccgcgaagcaaacggacgtattgctaagtgggctttggagttgatgtctttggacatatcattcaagcctcgaatttcaatcaagtcccaagcgttagccgattttgtcgccgaatggaccgagtgccaggaggatacccccgcggagaacatggagcactggaccatgcattttgacggatccaaacgactttcgggcactggagcaggagtggttttgatttccccaactggagaaagattaagttatgtgctttggatacacttttcggcgtcccacaacgttgccgagtatgaggccctccttcatgggctgcggattgcaatttccctagggataaagcgtttaattgttcgaggcgattcacagctggttgtcaaccaagttatgaaagagtggtcctgccttgacgacaacatgatggcatatcgacaagaggtacgcaaattggaagacaagttcgatggactcgagctcagtcacgttcttcgacacaacaatgaagccgccgacagacttgccaatttcggatccaagcgcgagatggcgccctcagatgttttcgtcgaacacctttatacaccgactgtacctcataaagatactactcaagatgcggacactcatgacgtagctctggttgaagccgactggcgagagcccttcatacgatttttaacttctcaagagctccctcaagataaagatgaagccgagcggatttcaaggcggagcaaactttatgctatgcatgaagctgagttatataagaaaagcccttcaggaattctgcaacgctgcgtatctttagaggaagggagacaattgctgaaagacatacattctgggatatgcggaaaccatgctgctgcacgcaccattgtcggcaaagcttaccggcagggtttcttttggcctactgcagtgtccgacgccgacaaaattgtgcgcacgtgcgaaggttgccaatttttcgccagacaaattcacttaccagctcaagagttgcaaactatcccgctgtcttggccgtttgcggtttgggggctcgacatggttggcccgtttaaaaaggcagtcggcggttacacgcatctctttgtggccattgataagttttccaagtggattgaagctaaaccggttgtcacaatcacagcagataatgctcgagacttcttcatcaacattgtgcatagatttggagtgcccaatcggatcatcactgataatggcacacaattcactggcggagtttttaaagacttttgtgaggactttggaatcaagatttgctatgcctcagtggcacaccccatgagcaatggacaggtggagcgagccaatggcatgatacttcaagggattaaggcacgtgtttttgaccggctaaaaccctatgccggcaaatgggtgcaacagctgccatcagtactttggtctttgcgaactacacccagtcgggccacaggccagtcaccttttttccttgtctatggggcagaagcaatgttgccgagtgaagttgaattcgagtctttgcgctttcgaaatttccgtgaagaacgctacgaagaagaccgagtggatgacttgcaccgattggaagaagcccgcgaagcagctttgattcggtcggctcgatatttacaagggttgcggcgctatcataatcgcaatgttcgatctcgtgcctttttagtcggtgacctggttttgaggaaaattcaaactacacgagaccggcacaagttatctcctctatgggaagggccatttattatctctgaagtcacccggccaggttcttatcgactcaagcgcgaagacggtactcttgtcgacaactcttggaacattgaacatcttcgtcgtttctacgcttaagtttatcattgtacttccctatcttgactgtcaacatcaagttttcttcttgaagttgtcagtcgggggctatcatcataataatggagtgtgattttttatcaatttaatttgcttacttggtctatcattgccttgtttggttttttctacttagtttgcgaggactgaaagtttctaatagcttatttgggttttaggctcaacaaagcttgataaaaacttttaagaaatcaaagacttggctagaactatcaagcacagcataaatacaccagtatagtacaaattatgcctccatttgttccaatcatactcagtcagaatcagtcctttcatcatcagagttatcgttactcggctgaaggtcattgttgcggaattgatctaccacatcgcttgcaatcttgtcagccgcattttgagcattgttgataagatcaagagcagcttcttcgcttgtcccatctgcaaatccatcaatggtgtcgatttcaattctcgggtacaaggatttggtcatcgctaatgccatgctagctcccatgcttccagctttcttgatgttcttgaagtatacatccggtgcaactcttagcttgtcaaagatttcggttgcgtcaagtgcactcggaccactgttattaaggaacatagcttggacgagtggtgtagcgacattggcgacttcgtctcttgctccttcaagcttcttgatcttaccaaccaggacatcaaactgagcttgagatttgattttacggtctacaaaatacatttataataagaatctgctgcattaaagagaggacagttcaaattgtcagttggcagtaccttcaacctccttcaaggctgagtccctttccgcagccagttctaccttgtctcttttcaaggcttcaatctgtttctccatctgagccattctggtggcttgcgctgtttgaaatccaagtgtttgaggatgcaattatgacagcataaatcaatggaacagatctggatgattaccttttgatgaaccacttagctcgaagtttgaatcctggagctgggcaattcgatcccttaactccttctctgtctttttggcgcactccttggcctcatgcagctggtccctaactgcttctagagttcccaaatgaggaaccagcttttccaaagttgtagtcttggcctcattgcgaagatggattctctgcatgatggatcatggttcagttctgctaaagagagaacaaagttattaaaggtagtcacccggaagatttacattcacaatgcgagtggcttctccaagtgctttcttcagttggcacacttcctcatcttctttttgacgatttataacgatgccggcgacttgcgagttctcgtcccaccatttgagcaagataggaggacgggagtcatcagccgcctttatgcgaggaattgtttcttcgtcatcgcctagtgttcctgatgtatttccaagacattagacgagtaagctgaagttatttaaatcggcatcacttgataagatatgttacctgaggatgttcctggctgaacatgaggtggtccttgttctttatttagagacccaatcattgagtctttaccagcctctggtccttgggaagttgtcgtttgcgcttcaacttcagggatttcttcatcgggacctacatccgactggtttccagtcgggggctcttgtgttgttgcagtttcagctgttgccgactggtctccagttggcggctggtcactcggatcggctttgtcgtccgaatcatgggtgccagtcggctgcctttcggcagtcggctggctttcggcagtcggctggttttcggcagacggctcagcgtctttggataaatttggctctgtcacagccggatcaggatcttttccagttggatctatgtcggacggtttcctgcaaagtgttctttcgatattcaacgtaatttctatgagagaagcatatcaaagggagatggtaccgagaagtttatacctggaagatgttctaatctttggcatttgacggccagccagttttttcctgggcatggtatgctttgggagtttgttgggtgtgcccttgtccccagatttgttgctgtcatcgccctcatcgtcattaagcaccagctttctcttgcgaggacctgtctgcccagccggtttggaggtttgaggttgtgggtctgacctgattgtcggccctccacttccctgaacggtgtgctggcgaggagatcggcgctgagcaattgggggatcagatttcattaatacgtattcctgaatgagatgcttccacggttagctaactcaacatgaagatgaaattatgttttggtcatgggttgaagatttcagatacatacctgcggaggcggattgaatgcgttatatggcacaactggcagctgatgtgagtagctaacgacgatggcatttgagaagattttatacattctctccttcatgattttgaaatccagagagtctggttcttcgcgattaggatcatgcttgccgtcaaactcaaaagctgtacgggatctttctttaattggcgccagtcggcatttgatgaaatgccgagtgatctgctctccttgcaagccttgttctttgagttttaacatgcgatccaacaattccaaggcttgggcagcttcatctccgattggaagagagttccaagtatcttggtacaccgggggaagacaagagtattcgggaagagcaggctcaggattctgaacataaaaccagttcgcatgccatcctttgtttgaagtcttgaagggcattgagaagtatttctggctcagagttcccctcagctgaaatccagcccctccgactacacatggcttactcttgtttggttggggtttaagaaagaagattcggcggaacagggcgaagtggggtttgattcctaagaaggcttcacagacatggatgaaattggcaatgtggactatggaattcgggtttaggtgatgcaagctgattccatagaagtttaatatcccgcggaaaaatttcgaggtcggaagagcgaagccgccatagaagaaatgcgagaagactacgatctcatgtgtatcaggggtcggaaaagcctcaccgcacgctggccgccacccgatgatctccttggctgggagaacgccgtgcgccaccatctccttcaggttctcttccgttgcgtcggacggcgcccattggccttcgaagctttccttctcttccgccatcgattttatccgaatgcgctgatttgattcgagggatggctagggagaaatgagggattaaggcggtggatcacgggaaggattttgatgcacttttcgaaggtggatttgagtggagtggtgaaccctagttcgccggcgcagttctgcactgtagcaaggagtggggaaaatggcgagagttccggcggggaagacgaagcgtcgcttggatctcgggatttattgttaagggtatcggaggtgcaaatgggcctaggcctgaacagtacttcagcccaatacttttaacagcgtggcccattgtgttccttagggacttaggcatattttgctttggcaatattatgcgcacaatagtgttgcccaatgctgataaaatcctttttatgcggtcatataattctttggaattattgcaatgcaaattaaaaggtgcccgacagaaaggtgttatactgctttttgttagctttattaggctacagaagctgtctgggttaatttggaatgacttgtttttatcatagtcacttccttggtatgttatatacctattttcattatggtaaatagtcatagcctaggctattagacttattcattaccataatttttataatacttggtgggtaatctttagagttttatattcggatgcctgtccagtgtgttcattcgtgaaccttttagagtgtaaaccactcggactcttttcattatggctaaaaagcagtcggctggcatgcctatctaggcgccgtgtatgcttttgtcatatgatgcacaattgtgttattattttgtttctcaactatatgtttagttcgttaactaatcacatagttgggggctacacctaattaggtgcatctattcgatgcaccatatttttatcttttcgccctttacagtcttcgtcttcgctactcggcaggccttggcatgataagttttgaagcactcggattattatctttgagaaggctctgatggttgactgcaaaggtctcgggggctactgtggagattatggatatcccatatctacacggcgacggtatttggactgggtacaggatacctaatgtagatagaatatcttatctgtatctcgggtttgtttcttaacttgtgtatcaaggaaacaccctgagacttagtcggttacgactatatttcatctgtatttgcatattccgttagggatatagattatcttttgtaacacggactccttcccatatataaggggggtccgggcgcctctaggggcggatgttgattttctctaaatcatacaatcaataacacactcggcggattcatccccggacaggagtagggtattacttcttttataagaaggcctgaacctgtataaaccctttgtcttcaaacccatacactttcctagcttgatagccacccccttttattattgccgaaatctagtttcgacaggaagaagaaccaatccaataacagagagaaaggagttttagccgatggggacatacctcaacatatttcgcggttgacgcgctcagagggctggcagaggacgacatgatcgcgaacagaagttgatgcttgcgagaattgcctctagatcaccggaaagctcgaaatcgtcaccggagagttcgaggagaaggattggggaaagttttggctagagcgctgaaaacgggagtaacgccgtgaaaaacaagaagagcggtggttattatttaaaagggagcgcggtaacggccaaaacagagtcggtaaagaaaaccctagatcggctcggagaaggagattaagcaaatccgccacactacaaatatagcggatttggggggcatgtgttgacaaccaaatttggtaagtcatgaaccgggttcgacattaggatcgaggcggat

SEQ ID NO: 20803 - DNA, 819 bp, Oryza sativa
tctaagaaaggtttcttaccgatgtcacatggcattaatcttggcaagaattagtgtcctcaaacaactgatgagcgaaacaagatgagtgtgattccatatgcctcggctatcagatccatcatgtatgctatgctatgtacacgtctagatgtttcatatgcacttagtgcaacaagtcgataccaatcagatccaggtgagagtcactggatagctgtaaagaatatcctgaagtacttgagaagaactaaggatatgttcctagtctatggaggacaggaagagctcattgtaaatggttacactgacgcaagcttccaaaccaacaaagatgattttagatcgtagtctggatttgtgttctgcctgaatggaggcgctgtgagttggaagagttccaagtaagatacagtggctgattctacaacaagagccgaatacattgccgtttctgaagcagcaaaggaggctgtttggataaagaaatgtttctcaactaagtgtgatgactagtgcttctagccctatggacctctatttttgcgataatagtggtgccattgtgcaagccaaggagcctagatcgcatcaaaagtccaaatacattttacagcggtatcacctcattcgcgagatagtgggtagaggagatgtgaagatatgcaaaatacatacggatttgaatgttgcagatccgttgacaaagccattccctcagcctaagcatgaggcacacactagggcaatgggtataagatacattcatgattgactctagtgcaagtgggagactattagtgatatgccctagaggca

SEQ ID NO: 20804 - DNA, 2023 bp, Oryza sativa
atcaaatatcatatgtggaacaaatatgattagatgatcagcacatgtattaattgatgatcatgtctcatggatcatggtatagagataccaaattaataatgtggatacatgttagtgaacatgttgttggatagacccaacatgagacactgtaagagccatatgtgttgtgtaatcaatgatctcatttagtgttggtattgaatccttacacctgagattatcatggttcccaacatgtgtagtagcttacttagggactgctaaacgctactctgtaattgggtagttataaaagtagttttcgggtatgctatgaaacatgtagtgggatatgaataatcaagatgagatttgcccctactatggagagatatctctgggcccctcgatgatgtagattatggaagtgcatggccatgccaaaggtgattgaggagtcaatcacaagttatataatctatcaacaggttcgagtgaatgattgagctattagaagatggcacatatctagccttgagcttaatcgatatcgtgaggcaaaggggttcatacaagtatacactagaggttcagccgatatgatctttatgtatgcccggtgggtcaatacgttctgataggggccgctgttgacgcgtggaccgaaaaggagttttcgggtcacagccgagtatacatgaacctacagtgtcgcacgcttaatgggccggaataagaggattggatggagatctaatatgagcttaattcggatagggatccgaatagtagtcctacgggccttggaggcccgagtgatggatcctatatattcgtgaggggtatgaccggcggaggtattgcatcacgtgaaaaaccctagccgtcacttccctccccgagcaaaaccctagccgcgcagatgtgctagtgctagcacatctgcgcgtggcgtttcgtccctgtacgtgtggataccggtagaggtgccactgatttgcggtgctgatcggcatgggagtacggcgaagagaacacacgaggtggagaaggtcgagccagtgcgatcgactacttcctctatatcgacgcgcgctaattcgcgagaattccttcgacttcttagcgcctttttccgctgcacagcgcgtcgagtggtaacgatctatgatctaatacttgaatggttcctggtttacgcgatagaaaattttgatttatgctatcgtagcctatgcgtatcccaacaataatcagaatgtattcttcagcatacataaataaaattctctgctttgtcgtgcagtgagtttttgatgctaagtaagatgttcatatgtgcatatatatatatatatatgtgtgtgtgatgttgcagtgacaagcctgggaaccatgacttcaatctactgattgtcgaaacatgaattcggcaataataaaacgggatagcacacgagacctaaaagtggatggatgcggagacaaagggtttagacaggttcaggccctctcgatgagaggtaataccctactcctgtttggggatttgaatccgccgggtgtagtattgatctgacgatcaggttgtgtcatgccccctagagggcctcctgcccaccttttatagggtggggggcaggattacaagatagaaaccttaaccaatacggtatcggtttcctaaatctactttacaatattatcaaaccaggactttaggctgttccgtaatatataaggaaacgtaatacccaagtcatgatctgttacatattccatacatataagttatcccctataactagtcggataaccatgccgtgtgggtatggggtacccataatctccacagtagcccctgagaccttcacagtcgaaaagataatcttctctcgaaccagattactccaaagccgagtacttcaatcatctttgccatggtctcccgagtacttttaccaaatctgaagactgtggagggctgaaaaataaagtcaggtgcatcgactagatgcacctaataggtgtagccctc

SEQ ID NO: 20805 - DNA, 12078 bp, Oryza sativa
aaagcttgtatgttgtgaataaagaaatttccaaagtattgggcatacgccatgcgcacactgctttaacagatgtgcttaagtccctagaagacacatggttccaccacacctggaaatatatggcatatgtggtataaaatccgagtaaataaactcataaaggatttaccaaccgcctgaaaaatgaccacaatatataatcagcctaagccataatattggtcaataaaaatgcacacttacgtggcaaaaagcaacgatattgtatccaatcaattgcttaaaaacccaaacagcaccatgactatattaaaaagtcagcggggcagctatataaagctttactgtttgacaccttttaagatgcattgtaccaactcctaaaaagttgagtaactgcggtataaaaggattttaaggtattgggcacttgatcacgcgcactttggcctaagcaaaaagtgcctaagtccctaaaagaacgtgacaggccacacctgaaaatatgggctgcagacatattaggcctaggccaaaaaatatgccttcgataccctttaaaggatgacgcatgtaacatgctcccgggtgatatagaccatgtgatctgagtgattatcccttatgggatactccaaaatagatataaaaattgaatcccgactggcgcaagtattcggttgataacccttacggggaataataaatagtccagtctttgagcatagaaaatagacccatgatcataaattcatgttgcatgtatccggaacaagtccaaattggagacataatacttgtgtttgaactagtaagcccctgagcatatagcttgtccttatgtcgtagtcacaattgtctattgatggtagctgacgcagttggcatagagacaagacgaccaatatagagataatattgcccagcagaggtgacaaaaatattgatggtagtgaagatagtgataccaatcaaaattactgaagtcgcatagccatggaggcgaagaaaccagtcagcgacagacagatcaaatgatgaagataacgatgtcggtgatccagtcaatagcagtgtagcaaccaatgataatgacaaagacgctcatcagcatttgcatagtaggtcaaccgtgaaggtgaaataataagtcggtgaagacataatcatccattagcaacagcggagatgtcagggccgatgaagcaaaggtgctggtgatgatgtcagtgacaataatccttcaaattaatgttatagctgttgtagatgcttcacttggagttgttgaagtagattgtctgctccgaagtaaagatgaagataatgactcctggagttgactcgttggctgattaattgattgctccatctttgacataaagcttgtcgaattttgagccatgtatttgtgtagcccccgactctttgtttagttgggaaacaactgaacatagagtcgagaattatagcttcttatcgtcgagtagtcattgcttgattgaagataagtgttgaagatgtccaagtagaaatccatgatgacaaagttgcattgccatgatgaagtgacagaagcaaactggtagtgaagacgcgcaattgtgacgataaaagcgccagtcggcggcagacgtagacagcttgcgttgaagatgatgacgcatattagcggtgacggcgacgtagccaaccgtgaagaagatagcatcagtcggcgtcataacaggccagctatgcaggcggaaacaccagtcggcggtggacgaggcggccggtcggtgaagacgtagacgcccaacaacggcggcataataggccagccgtgcaggcggaaacaccagtcggcggcagcgaaggcaagccggtcgatgaagacgtagacgcccaacaacggcggcataataggccagccgtgcaggcggaaacaccagtcggcggctgacgaggcggccggtcggtgaagacgtagacgcccaacaacggcggcataataggccagccgtgcaggcggagacaccagtcggcggcgacgaaggcaagccggtcggtgaagacgtagacgcccaacatcggtggtgtgaccaatcaaccgtataggcgaagacaccagtcggcggcgatgacggcaagccggtggtgatgttctgactgatccattcctggagcgtaagagataagcttaaagccatgaatccgtcgcaagcaatcaagataaatattatgaaaattgtttaaaaaatacaatataacatctatagcccccgactcactagtcaacggcgaaccagttgatgtagtgaggcgaaggaaaagacaaaatatcatataaagaataaaataaatgatgacttagctttgtaatattccctcggtgacagcaaaagtagccgatgtgggaacgaagcagtccatcaatggtgacaaaaacaccagtcggcgccagtggaaccaagccagtggtgtagatgatgaagcccattaacagcggcgaagtccgccaaccgtataggcaaaaacaccagtcggcagcggcgaaggccagccggtcggcgaagacgtggacgcccatgaacggtggtgtgaccaaccaaccgtataggcgaggacaccagtcggcggcgacggaggcaggccggcggtgaagtcgtagacgcccaacagcggcggcataataggctagccgtgtaggcggaggcaccactcggcggcaacggaggcaagccggcggtgaagtcgtagacgcccaacagcggcggcataataggccagccgtgtaggcggaggcaccactcggcggcgacggaggcaggccggcggtgaagtcgtagacgcccaacagcggcggcataataggccagccgtgtaggcggaggcaccactcggcggcaacggaggcaagccggcggtgaagtcgtagacgcccaacagcggcggcataataggccagccgtgtaggcggaggcaccactcggcggcaacggaggcaagccggcggtgaagtcgtagacgcccaacagcagcggcataataggccagccgtgtaggcggaggcaccactcggcggcgacgaaggcaggccggcggtgaagtcgttgttgttatcagcaatggcggtggcgaagacaagccggcaaagtggactcgcggccgatcgaccggaaagctgagacgcctcgactccatgaccagcattaatcgcctcaatagtgccgcgtaattatatgcgaacaacaacaaaaaataacaagagattaatctgagattaaaaatcaatatgataaataatgataaaactaggcgtccggcgctggacgagtagttagcatgagtagatataaaaaaattgctcaatggaaaatatcacataaagaggaaaaataaaggcacttagcttttttctcagtgtcctccgtatatatgtgttaatgggtggacaggagatcatatcggcagcttgtgacagacatgcaatacatgcatgagtgctgcacttccctgtgtgaaaattgctcctattgattggctcagattccacgtcgactccaatttagattagtaattgaatatcgccaggagatttgacatcatcagatgatggactcggcatgtcaaacgatcaagttgacgactgacgtcccgtcggaatttccggcggcggcgatgcaagccgaactccagaagaaaagaaccggtccgaagatgaaggcggtgctgacggcagccataggagattgaatctgaaacttgccgcggtagattgttgtaatccctcgattgagtttccccttgactgatttggatcaagtcagagaagaggagcttgaagaagtggtcgacggaaaggaagtgaaaactcccgaagcgaaaacgaagtcggcgactcatgaagttaattccatcgcgctcgttgataggaaactcgacgcagcccctacctggcgcgccaactgtcgaaacatgaattcggcaataataaaacgggatagcgcacgagacctaaaagtggatggatgcggagacaaagggtttagacaggttcaggccctctcgatgagaggtaataccctactcctgtttggggatttgaatccgccgggtgtagtattgatctgacgatcaagttgtgtcatgccccctagagggcctcctgcccaccttatatagggtgggggggcaggattacaagatagaaaccttaacccaatacggtatcggtttcctaaatctactttacaatattatcaaaccaggactttaggctgttccgtaatatataaggaaacgtaatacccaagtcatgatctgttacatattccatacatataagttatcccctataactagtcggataaccatgccgtgtgggtatggggtacccataatctccacactgatgaagctggttcttcctgacggatcgatcccgtgagccaaacttcctgagatgcaagacgatccagtccgtcgtcggtgcggtcatcgtcgctatggcgtggacaaccatgacgttgctgagcagctgcagcgcgccgcgcagtcctcaatgacgtacgggcctctgccgctgctcgcctgctcctgcggtcgcgggtagtttgggtcacacgacggcgccatttccgattgcacgcgcgtacgcttggctgcgggcggagtcatgtgtcgtcaacttctacttctccccgccggtcgccgcatgtcgatgacgtcccggcgccactccccttccgccggccgccacgcgctgaaaatgaaaaatgaagaagtcatgctagagtcctctcagcataaatgcacgtcctctcagcgagatccatacagatattgcgtagataagtcacgcataaagtattaatcatattttatcatctaacaataatgaaaatactaattataaaaaaatttcatataagatggacagtcaaacgttggcacgaaaacccacggtttgccttaagtatgttagctactacagtactggagtagttcagtgctacagtagttgtccgtactcttttctccatttctacaaatattgtgcctctacgaatactatgctgcgccagtagtacagactactactagtacacatcgtagcggtattcggcaatttactgcactgccagtctggcgcgaattcggagcctcgacgcaggtcaagacccgatcgtgaacgtaccggacccgttaagcacagggtgcggataagcgtgcgatggtagtaggtgcagacaaaggatagtggaaggctctggagggccgtcacatcaaccaccaattattgcaggagcactcaaacaacatgagcagcagcacaagcacaactactacgcgatgcttgcttggtgattaggacaccattaatctgacaactgtctcttaatcaactctggaggaaatgattgtcattgccacaccaaggcaaagccaccggaacaacggatatagttagaactagtaccaactaacggataatactagaatcaagctgatgctcgcactagcaatacatggaaaactgcaatccaacagcaacaaaagcagatggcaattggtggtggaagttcttacagcggttttacaagggtggtcgactgaacttaaaaagccgaagcagtttgtatctctaataattactaacaccggttacacaaacaagcgaaactaaattaatcaaggtagtacatacatacatacaacaaatcccaccggtttgattaacaacagtaacggtgatgataatttaagctggaaacaacaaatcatgcacctggctgactggcaccccccaccctctctcacacacactccctcacatgcaaacgatatgaccaagtccaaccaggccagcagcagcagagcagccatggccatctaagctcagttgctggggttgctccggaaggagcccagcgccttgatggctgccgcccggaggatgtactggtgatacgccgccgccgccagcgctccgatgaacggccccgcccagaagatccactgcaattaagcatatgcaggcataagcacttggtgaaatgaacacaagaacagagtgttgcagtgagaggtgagcagcttacgtggtcgtcccatgccttcttctggttgtagatgacggcggcgccgatgctccgggcagggttgatgcccgtgccggtgatggggatggtggccaggtgcaccatgaacacggcgaacccgatgggcagcggcgcgagcacctacacaaacaagcatgtaagctacgtagtactagtaaagctggctagctgagacggaccctggagagtacaaaggtggcgtggtgtgattataaagatacgtaccgggacgtgggagtcgcgggcattgcgctttgggtcggtggcggagaagacggtgtagacgaggacgaaggtgccgatgatttcggcgccgagggcggtgccggtggagtagccgctggccaccatgttggcgccgccgccgttggcgttgtactggtgcttcatgatgcccttcacgatgcccacgcccacgatgccgcccaggcactgcgccacgatgtacatcaccgcgcgaatcaccgacaccttcctcgccagcagcagcccgaacgtcaccgcggggttaatgtgccctcctgcacgccacgcatggccaaatttagctcaacgtacgggcattgtttcaagctatttagtaacaaaagaaaacattactagtacggaccggagatgccggcggtgcagtagacgaggatgaagatcatgccaccgaaggcccaggcgatgccgagggtgccgacgccgccgcactggtcggcggacgactgcactttgtacccaatgacggtggcgacggtgatgtataggaacaggagcgtggcgatgaactccgcaatgagcgcccggtagaaggaccacagccggagctcgccgacgtcgaacagcggcgccggcggcgggtcggtgtagtccttgggccgcacgtgctccggctcctcgctcacctccttcgacattgccgctcccttcagcaagctcaacacgctactcactctgagctagcttagctctgctctctcttctctacctctctcttctctgatggatgcggagaggaggggagcgtgggactggccggttttattgagagcgcggtgctgtcattaatggaaaaaaaaccggcccaggtacaagagaagagaaggaaaggtgtgtgtgggcttgtgccatcgaagcacttcttgtctttacaacctggagtagattagcttgcttgctgttgctgttgccgttgcttctccatgattagaagccaaacttagcacttgataatgatcatgttagtgatgaagtcatggataagtttgttggttctatttaaatgattttagtgctggtataacacaacattaaatacttgacaaaattctctctatgtggaacatgcatgaaatatattcccagtatgcatgctttgcggctgtagttggtgaagctaaagcaatggggggtttataagtcgaggacaagtatcatatcttaatataaagttattctccactaaattcttaagcttaacatgcaaagatgctatatcatcatccactaacaagatgtcacatcatcatccactaattaacaagatgccacatcatcatctactaacaaccatcacatttaaacatcatgcaaacatgccatatctttatagtttttaaaacttaagagctttttcaaatatgaacatgttaaattatcattcaacataattcacataatgttttaatgtatatctttattatgttttatgatatcatttatacttatatagttcatcctcacttagttagtgcttaaatgattaatttatggtccaaattatctttctcattgtttcctctaattaagtcatatcacatcaattgtttttatcctttagatgattaatctaaggtccaaactatctcccttcatttcttcttccatgaagtcataccaccttactttttacgtttgaatcaccattctacatactatttaaatttaaattattataaaccacattaatttacttaatctgatgttatctagctattttacacattatttttttattattatcatactaaattcccacaacaatgcgcggggtttcacctagtgatgaaccctgagttcctctcgacactcaaggctgttgttggcccgatctttcggtgagttgtgataactacgatttgggagaaacgttgatgatccgactacaaccgtacgagacgttgtgttgcgccttagcgatcgatacacctctccgtgggttgctgatcttgccggtgcagatcaaccctattcctgcaagcaaatcgaagaaacaagcaagaacaagataaaagcaatctgatattgcaaataggaatttaatacaaatgataagttggggttccgaagaacaagcagacggacggtctagccgacacgcgcgctgcaagcaagtagcaatggctaaactttaatctaacaaaaccccagaaaccctgaaggggtacctaactatttatagaggtgggaggacgaccaagagggtccaagggtcgtgctccaccagattggggcgcaccccacatgggccccacatgggccagggtcccaaacaaagttacaagcccattggcccaatacaggagacgcagcaccttgcttttgtgattgcggccaaacgagatagatttccgagatgaggctggatccgttggaaggaggacttcgagagctttccatcaagtactcatgggcccaaaacggagcacgtatgtagatttggcggccgtttgaagtcagcaatgtaacacgtggccgaatcagattgcagcacatggaggacttgatcttgatgtcttcttgttgattcatgatgtgagcaatggtcgtatccatagtagccatggtcacatcatcctccccttcttcacagaaaaccgtcctcgttttttccatatggtgctcttcgcgcagtccactgaaaacaacctgtttcttgcaatcaaaacaagacaaactcgagacaatatgactagcagtaacatgtctctctagcttgcatattttatccggaactacaagatgttctaaatctgaacaaatgtaaactctatgtaccaaaaatattcctctatcattatattcgccaaagatatgaaaaatagcattagttggacatggcaaatcagatttagcaaataatttctccttcaaattatcgagctcacaaaaatcatcaaactgaacatagcccaaagtatttaaagaagatagcaattcgcgttcctctacttcattagcaatgtgaacaacatgcttagaatcagcacacaaagaaatagtagaactaacatgttcattcactagttgtggcatggatataagtgaaacattatcacacaactcttctttatcacaaggaacagcaagtaaatcaacttgtgacaaaggcaactcagtaattgattccactaatggttgctctactatagcatgaaaagtggacaagtgtagctcaccttgagaatactcaccttcatttctctcagcaccatttaatttaccttgcgaactttcttcagataatgtagctgcatcagccttctcctcattcgcgagtgatggaagtgacatctcaaacatatcgttcttctcattttggagacttttctgaacttcctgcaaaacattagtgataggaggcacaagcatatcttgttgctccattggattctccaaaattttgcgctcaacaatgcaagcaagcatgaacaattggcctatatgattatatgtcacattaacaagcccagcctgaatattgaaattaagccctctgaaaaatctagtcattgtgttctcattagattcttgtaaaccactataagtgatacaaattttaaaatcataaaagtactccctaacagttttgtcaccttgttttagatgttcccatttctcaaggagagcacgtctatagtatgaaaacacaaatctttttctcatcagtattttgcattcatcccaagtttcaagcttattccccacagtatgccaccaaaaagatgcagaaccggtacacttattactagcagccttaatcatttgagcattagaaaaatcatactcatcaaattgtttttctactgctagctcccaattaatgtatgcagcggaatcatactttccatcatagactggtaacttacatgcaacttgtgcaaaattatagtcatgtacctcatatgcatcacgtgaagaagtcgtcatatctcgtcgaaggtgtagatgttgacgttgagcatgaccatcttgtttccccttgcgcaatcctgccatggttagcagcaaacaagaaacatacacaagaatatacacgctcctatcaactactaggtactggcagctcaaatctcacacactcaagcttttaaccaagctcttacaagatcttaccaatgcaagtggaatggtgacatacaccgactcaaccaagcaccccaatgaaggttggatgtatcaatgccttggcaaacacttgcggtacggctgtaatcaaatatgtggagctctaggtaggcttaaatatgtagcaaaggaatagcaaatgctcaaatcagataatgcaaagttgaataattgttcaaagtcgagtaccgtgctggtcctaggctagaacgtactagagacgcgagcctagacacaaacgataccacaagatagcactaggaacaactcatgcacaactctgatatatgaagttcagctcaaacataacagtattttctcttttctttctttcttctttcttcttttcttttttttttctttccttttcttttctgtttttttttggtgcggctttttttttctttttttttgcacctttctgcctttttttttcactttttttttgattttttttaacaaaaactgactcaaggcccttaatgtaagattacagggactcaaacataaatataaaatttacagggactcaaatgtaaaagtctaaacccaaaattaaaattatacaaaaaatggaatgctgaatttatgccggttccgtttttccaaacagatctcgaaaccgacaccaaacaaaaattcgccaaggtgtttgacacaactcggaaccgtggaagagagggagggagtcggactcggccaaaggggcgagtgggacttggccaggaggtggagtggatggcagccgaatttggtgtatgggataaaaaggaaactgatttttaaccaatccaatctactgtatctttccaaaacaatcttgactacttccaaaatcagatatggtaattcaccttcctcctctcgtgcacgacacaggcacggccaaaacaaacacacacaaggatcggcaaactctagatgcaactcaagaactccaaaactaaccgacagaaacttctgaaaactacaaaaatagaaccgtggcagcgagccgattccgttttcgtaggtcccgacaacaacagagacacggtggcagcaacgactgtggtacaaaacgtgaccagaactcgaaactctaaacgaactagacgctaagaccagcaacacgacgtgacgatgcaacacaaaattcaacaaagcaaaaactgaaaagaacaatgcaatggcacaatatggctaggtaaatgatacgaatttttttgtatggctattttctggttataggaagataaaaactcaccgagcaacgaaagctctgataccacctgatgaaccctgagttcctctcgacactcaaggctgttgttggcccgatctttcggtgagttgtgataactacgatttgggagaaacgttgatgatccgactacaaccgtacgagacgttgtgttgcgccttagcgatcgatacacctctccgtgggttgctgatcttgccggtgcagatcaaccctattcctgcaagcaaatcgaagaaacaagcaagaacaagataaaagcaatctgatattgcaaataggaatttaataccaatgataagttggggttccgaagaacaagcagacggacgg

SEQ ID NO: 20806 - DNA, 13765 bp, Oryza sativa
ccgcccgccgctctcggtcccatcccaccgtcgccatcacctgcctccggtggatccgcccgggctggatccgcgacctccggccgtcgagccctctcatggctgctcccgcccacgacatacctcttctgagcccactaccgccgctctcgaccgctctcgcccaccgagggcccaggccacccaccactcgcctctcacctctcactgtcgaccagtgagagagaggagaggagttgagaaaggcagagaggatgatgaatgagagagaggatgtgggtggataagaatgagaaggtgagagatagagatagagggggataaggatgaaaattttcaaagtgttgagacagaaaagatctagagaggagggagcttatttttgcatgcggtcctcctaaacgggcgcatgcgactccttaggaggaccgcatgtgaaaatatgctatatttgcatgtggctagttaagagatccgtttgtgaaaatagtttttttacgtgggtctcttaaaaaactgtatgtgaaaatacgggtctcattcaaataattttgcctacctgttaagttacccttgctcaacaaataaggttatcacctatggaatgcgcttcgttcatgctaggcgtgcgcgcataatggtccaacggcacacatggagatggagtattgggatttgttggttcagatttcagagtaggctattattgggttaacatcagttgctttgtttattatactgtacttatatactctctgttctaaattataacatctatattttttacacaacttataatgatattgtttgaccactaatttatttcatattataccatcaataactacaatattagtgtcacctgaaagtattttaaaatataaatctaattatagaatatatatgatacttggtatatactgtatattgttagtccgaatttgaatttttaaaaaataagtgtttataatttagagccgagggagtacatttaagagtataggaaattttttcagagctcaaattgaacgagctttttgttttaaaaaaatgtagtactccgctactctctttaaaaaaaactcaacttttagagtttaaattttgtcccacgaaaaatcaatgagaagctttatccctttaataccttgatctatttatcactttcactattttttaagtgattaagggtattttagttattctcactgtccactatttttaccttacgatgttagcaatagattttttttttgacgagtgagcagatatatctgcttcattgtttttgcggagactctggacatgaaagtgatgcctatacctgaccgcctgtcagctttgtaagttactgtgctccgtagccatacagcaggactggctttcacgttccctacgggttcttttgtttgcgctggggcaagcttggtaggtagcgacaacatcataggagagagaaggatgaagatggggcaggtctgggcccgaggtacagcgaggccatgtgagtgacctggcgacgagaattggagcgggccgccgtggatataatcaaagcaatgaatgcatatggctccattggccgttgcggccgcccacccgactgtcttcttcccaggtttctcaactcacctgtcatgtttttcacacgcgctcattttaaattgctaaattatgtgtttttaaaaaaattgctatataaaagttgttttaaattatattaatttatttttttaaaaataatacttaattaatcatataatgatacgtgtttcgttttgcgtgcccaggagaaggggttcccaaacacaacccaagtggaagtggaggcgccgcgcctcgtgcgcatcggtaggaataggttcactttggttccttaaacttgatgacagtaagtgatttgtatccgtgaagcacaatatcattgtcacgtcccaaaacgactctaaaatacatcctctaaattatgtctagaataattaaaatccgtgtgaaagcctccaacaattaaaatgtgcaaagttaaaagtcaaataaggcttggaggatttttgtatatttcctaaaagcctaaaatgcgtaaataaattttagtggaattttcagagcacaaataacaattattaagaaataaacaaagttaaaatggttttataaaaagaaaaactctaaaaagtcccctttccctccctctccctcttgggccggctcggcccatctccctccccctccctctcctctcccgcggccccatacggcctctccccgcacgcgcgccactgacgggcgggcccgcccgccacccgagctgacgggtggggcccacccgtcatcccctttctcacgccgctcccgccgtctacacgtgcaataaagagggggaaatcactccccgtgatcccctctccctttcccccatttttccctctctctctcgcgttcaaacgggcggatttgcccccgcaaatctcgccggcgccattgatggcggccggacctcccgcgccggtttcctcccttccccggccaccctctctcgacccggctctatttaaaccctccccgctcctcctccttcagtttccgcctctcgccgcccttcctcctcgccggaatcaaggtcgcgccgtcgctctctccctccgccgtcgccatcgagctccggtccgccgccgtcgtcgtcccggatcacctcccacctcggcgccgcctccttcggctttgccgcatcctcgccgacctcgtccacccctccgtttcggtcgccgaccgccggaacgccgtcgaccccgtcgactcgagccgcgccgccgccttcctccgctccggccgcctttttcgtcgtcgccgtcgacctagggtgagccgtggaccgccgcttcttttcccccttcccttcccctctctcggccgccgctccgccgtgcctatggccgccgccggcgaccataggggcgcgggcgccgcctcccgccggccgcaccggcttggccgccctcgggcgcaccgagtggctgccgcgtggggcccggccgtcagccgcccgcgcccttaggtgcggctgacgcgtgggacccacggtgccggccggtgtgagcccgggtgcacccggtccaccgtggaccgtgaggctgccgcgtgggccccactcccgtggacccggtccgcgcgccccctcccctcggctgacgcaataaacccttttaaaattaaaatttaaatgaagaaattcgcaaatattcatttaaagagcatataaacttcaaatgaccataacttggccatttgaactcggaattggaccgttcaagtctctaatttttccttaagaagtcaagaacccatttttgtgctttgtttctacttgttatatggagtttattagagtaaaagccttttcttttccgttggtcgtgtagacgctgcagcttcggaagatccgctcttcgtggaggttgaagccgacgttttggaaagcgagcaaggcaagtcacatcatccttgaacatattgaatcccagtttagaaaattattttgatttaaattattgcattattgctttatttaaattcccgcgttatcactgttttatctagccatgcctatttacctttgttatgaccttattattgttattgttattatttccttgttcaccctagaataaacaaaaccccaactagtggacactctactcatggtactactagtatgattttaggtagatgcttcgctggttaattaggcaacattaggtggttttacaactctagactttgggatattcgtatcacctggacaatatggaatggtttgattattgtggaattggattcacacctccccctctattcaaaaccctcaaaatggttttaggctgggctcggggtgcatggttttgatagtagcacctcggccatataaggaccggtcttcgggcctctgttgcaaagcactaccgtacttccacatgtctagtgggtaaggcttagtttgtggctcagtctggttataaacaaaagtacacggatggagatggaagaagtcgggggtcgatggacatctctaggacaaatgaaggctacacgagctgcggcccggtagtcgagatgtcatggcacagggccggtgtcctgctgctaggggctcagtcctgcctacctgtcccgggggttccggccgtaggtgggattgggtcggtactcttgtctatggctaggatgggttggaaactatgtcacgtcttccgtccgtataccgtggtggtatgtggcacgtggttacacgtgaggaagatgtgtcttgtgggtaaagatgtacacctctgatcagagtataatctattcgaatagccgcgccctcggttatgggcaagccgagcaatgtacccaagttagtgttttaattcttaaaacctgcttaacaactaaaatgtggaatggttggcctgggttggcttgggacgagctgggacccagggtcgggttgccagttcggtctgaatcatcgtaggccttgggttaatgcaggttcgtgtgggttcacggccttgattaataatattgtatagctctaggaccatgtttacaaaatagctttgagcaactaagtgacttttaatgctgtttactgcaaaccctaaccctttatattataactcccttgtactcccttgcatttattctgcacttgtgggtgtgtcttgttgagtacggtggttgtactcagtcttgctcaatttttcccaaactcatgtcacatcctaatttttgtttcaggatttataaattatttaataaattattattagaagttatattaaatgttcattaatttacaagtgaagttaaatatgggaaataaaatttcctaaatataaagcatggatggatttaatttttattaaattctccatgattaagtatactttctgaaattttctcggatttttcggagctcaattcctaaatgatacaaagaacagttcagtaattatttgatcattaatgatctaattataattgttaagagcttttcttgtttaaaaatccttaaattataaattgttgtttaaaaggagtaattagaaatgatcttaaaagcctaaaagagaagatctaattttaatttgctaaatttcaatataaaattgggctagataaaattttgttaaatacttctcttgaatctttagttcctagatttttctgggatttatttgagccaaggaagtatttttaatcaatggaatatcatttcatgaataatttaaatagaaaaaggttttaaaatctttcttttggttttgggccgaaagtcagcccaagtctctctttccttctgcctctctcctccccggcccagtcggcccagtctgcgagccgccgctctcctctctctctctcgctgacaggtaggtcccacctgtcagtcttcgtcttcctcgcgccgccaccgccacccgaaccctagcgccgcgccgccgtcgtccccttccaaattcggccgcgcctttccttctccggtgaaatcaatagaggggaaatgatctccgggatctcctccaccttttctcttttggaatcatcatctttttcgctttggaagttcgtggattcgaggtcgaatcggatcggtctctttcctccgaaccctaacctttccttctcgtcgccggtcgccgtgggcctctgtcgccgctcgctagcccctttaaaaggacccccgagctctccgctacccgccgccaccctcgccttcatctctcgccgtcggaagcgccctagcgccgtgtaaccttgtgccgttgtcgtcgccgccgctccagccgtgcttcgccgtcgctccagtcgtcgccgtcgctcgggaaggttgccatcgtggtcgccgtcgcgtcgctgtcctcgtccgccccttcgccgtcgctgaagaccgccggagcatcgccgtcgtcgtcaagccgaaggactccgccgccttttcctcgacgccgccgccgtccgttcatcttccaccgtcgttttggtcatcggtgagttcgccgcgtcgctctctacgtccaggtgccctccgttcgcgtcctcgcgccgtcgttcgccggcgagcttgcgctcccgagccgccgccggtgatgacgtcatcgccgacgtcatcgttgccatccgtcgtagaccggtcgtggaccgttcgatctcggccgtccgttttggataggatcgatctcggccgttcgtttccttagaccgtcccgtgcacccggtccaccgcaaaccctagccgctgacgcaataattcccttttccttttcaaaaataattcattattgcgtcataattcaattaaaatccatataaatgctttaatccgatttaatctttgaaaattcataactaattcattgtaactcagtttaatgtggttcaagttgcaaaagttgtataaaataaagatctacatattaaaattatccataaattgaattaaatttatttaattctttttaaatgggatttaattagatttaatctagtaaaattcataataaattcatttgaagtcagaatgaggtcgttcaagtctcataattcatctaaaattatgatctacatgtttgtttactttttatgtattgtttatttggtttttattagtcttttccttgttttgcgtgttagcttgtcgtttccgtcgttgcgaaggttcgcgagtgcgtcggaaatgttcaagaagattaattgaagaccgattattgcaaggcaagtcacacagatcctaaacacaatcctttgagcatgttgatcctatatttaaattctctatttatttcaactgtgcatttattttcgaatgtcactgggtggtgtgaatctattcctttgttatggcctgtttgcattgattactttattccttgataccttgggttattataacttgactagttgagctttatatattggttcagctagatattagctatgattgcttagccatgcttagaaacattagcacactattgggataacttatgactcactattatttaatgatggcttaataatagttcacgatggtcaatcgtgattggttaattaattacttgccaactaaaacttgataatggtgggttgtgagcacatggttttgagtgtcgtgctcatgacaattaaggaccggttcgcgagctactgttgtgaaacattaaccgtgccaaccacaagccagcgtgggcaacagctttatcttttgtacagcatgattcattgcggagcaccagactgagaagtggtggagataagcccacgggggtcgctagggagtccatgccttgtttataagggggtgattatgatccaggaaaggtgcgctgtggtggattgtgttgtgcaaggggtattgtcacagctcctttccgaggtaccgtggtggtattgaggcacatggtgacatgttgtggggctgtgtcttgtgggtacagtggtacacctctggccagagtaaaactattcgaatagccgtgcccgcggttatgggcgggttgagcaatgtttttcgtgattagtctcacacctctcacaataattatggatgttatacctagtaataatttgcttagctcctggtttggagttagatctgtacagctgggcatggttgttcaggatggttgggcctgtgcagcatgggtgtgctgttaagtgttgattaaaatttctgattaattactccactgttttacttctcttaaatgttttgctaaatgctgcttttgcaaatgagcctatattatgccatcctttggtatccttgtgcacttgcatatttgctgtgtggcttgctgagtatgtcatatgctcaccttgcaataatcaatcaacctcagttgaagaaaaaggatccagaaggagaagacgtttggtttataccccagttgagctgcctgtgggagtggagccggagcttcgttagattttattttccgctgcagttttcttcatggtgaggactaagtgcctcttaagtaagtatttatcgttttagttaatttgatgaatctgtatattaaattgtcagtttgtgtacctcggctgattcctggacgaggattttatgcacaaataagttcggaaattactagtgaatttccgggcgtgacaactcataaaaggagttcctggaagatgaaggctttggtgtctagctcgtgcctgccgttaagcacctgtggtcgtcgccctagtcttccgctgtttcccgtttgtctttgtgtgtgctgggccttcgccgcccatgtaataaattagctatttacgcttccgcttgttaaactctgaactgtatcaacttttggtgtaccttgcctcctgggacaaggaataatacacgcacgtaaggaacgcccgttgggttatttccggtcgtgacaagttggtatcagagcccccttgaccctaggacgagccgtagatcccaagccttagcaatatttttaaaataaaaatcctttcttatttgtgaaaatcctttagtctctctctgtcctgctgcttcatttatcgtcaaaatctgatctttaaaatgttgcttgtctcttttgtttgtagatggccggcagcatcaatcgtcgtggtctggacctgactggcttcgttttggagctgcggggcatgtgcgttgtcctggggtatccgcatggagtggactaccagggcaagcagctcccggagcaggagggtgacgatgcagagccccacgctgcttgggaggttactgcagtgatcctcactggctcacccgagaggacttcgttggcagtcaccgcgggtggagattccttctccgccgcttgccagaacgccgcactcctcgccatcggcactcttcaccagcgctacccggacgagttgcagcactcgccctaccgctaccaccctcgccgcggaggagcccgcgactacgccaccttccgggatgctagctcggaggatgacgctaccatcatgcacctagcgcgcatggtggaggcgtacgacgcggcccgtatggacttccatcagatggtgcgccgcgggttggtcgagaacaacatgaagatcctggagctgcgtcaggagaatctgcagctgaagaaggacctagacgtagtggaggcgcagctgtgtcagctcaagatcgcccagggagaggtctgtcgccccaagcgtcgccgcgtctgccgcagcctgaagatcaccgcccgcaagagtacctccaggcccgagcttgttcgtcagtccctggcgtggacctgcttcgtcgagacccctcgtgccgagcccgcgcccgtggttcctcaggaggatggagtctccggcgttggcagcacggaggatgcgctgctgctcaccttccgccctggcccgttgcagaagtagacgagcagttagtaggcttgcgcgtgtgttcttctcgtttgtttttctgctagagtcgtttggggcatggttatgccggtgtgtggtatgactgtgtcggagcctgtctttattttatttgcttaagcaacttgaaccttaataaaccaatttaatagcaataataaattcaagaattttggtagtcgtgggtggttagttttaatagtctgttctctctcttggctggttctgtatgggatatttcagatggtgacaaccaggagaagtgctgctaccggtgatggcaaccaacccgtaggcagcaaccacaacaaccatggcagcccacctccacctcctcccccgcctccaccaccaccactagacaccaacaccatcctcacccaaatcatcgcccagcgggccaacatgatggctgctttcctccaccacatccaaaatccgccacaacataatgctccaccaccacccccacaacactctaaactcgccgagttcctccgcatccgtccacctaccttctctagctccaataaccccgtggatgctttggattggttgcatgccgtggggaaaaagttagacaccgtgcagtgcaacgatgaggagaaagtcatctttgccgctcactaactgcaggggcccgcatctctatggtgggaccacttccaggctacgtagccagaggggcagcctattacttgggcccgcttcaccgcctctttccagagaacccatgtgcccgtcggagtcatggcccttaagaaaagggaattctgagagttgaagcaaggcaaccgctccatgatggagtatttgcatgagtttaacaacctggcccggtacgccccggaggatgttcgtgaagatgaggagaagcaagagaagttcttggcaggaatggaccctgagctgtccgtgcgtctggtctccggggactatccggatttccaacgtctggtggacaagagcatccgcttggaagccaagcacaaggaactggagtcgcacaagcgtcgcttggcgaatttccgcaaccaacagggggctaaccaaagggtccgctacaccaatccctatccagggggatcctcctcgcagcagcagcagcagcagcaacctcgctccacgtcccgacctcaattcgtggtgcatgtcccacagccgcagcaacagcagagtcagcaagggactcgtgcgccccgtcctcctacgccagccgtgcagcctgttcaaggccgcagggacgctcaaggtcagcagcgtctgtgcttcaactgcttcgagcctgggcactttgcggataaatgcccaaagccgaggtgccagcaaggccaagcgcctccccgctccaacaacggtggtaaggatgtcattcggggtcgtgtgaaccacgtgacggccgagaacgtgctgacaactccagacgtcatcgttggtacgttcctcattcattccatccctgctaccatttttgtcacgtcccaaaacgactctaaaatacatcctctaaattatgcctagaataattaaaatccgtgtgaaagccttcaacaaataaaatgtgcaaagttaaaagtcaaataaggcttggaggatttttgtatatttcctagaaagcctaaaatgcgtaaataaattttagtggaattttcagagcacaaataataattattaagaaataaacaaagttaaaatggttttataaaaagaaaagctctaaaaagtcctttttccccccctccccctcttgggccagctcggcccacctctctccctctctctcctcttccccgcggcccattcggcctcctccccgcgcgcgcgccggtgacgggcgggcccgcccgcctccctcgctgacgggtggggcccacccgtcatccccttcctcccgccgctcccaccgcctcgcccgcgccctagcgccgccgccgccgcgaatcccgccgcctcccgccgtctccgcgtgcaataaagagggggaaatcactccctttgatccccggtgcctttccccccatttttccctctctctctcgcgttcaaacgggcggatttgcccccgcaaatctcgccggcgccattgatggcggccggacctcccgcgccggtttcctcccttccccggccaccctctctcgacccggctctatttaaaccctccccgctcctcctccttccgtttccgcctctcgccgcccttcctcctcgccggaatcaaggtcgcgccgtcgctctctccctccgccgtcgccatcgagctccggtccgccgccgtcgtcgccccggaccacctcccacctcggggccgcctccttcggctttgccgcatcctcgccgacctcgtccacccctccgtttcggtcgccgaccgccggagcaccgtcgaccccgtccacccgagccgcgccgccgccttcctccgctccggtcgccgtttccgtcgtcgccgtcgacccggggtgagccgtggaccgccgcttcgtttccccctttccctcccctctctcggccgccgctccgccgtgcctatgtgtcacgaccggaaataacccaacgggcgttccttacgtgcgtgcattattccttgtcccaggaggcaaggtacaccaaaagttgatacagttcggagttcaacaagcggaagcgtaaatagttaatttattacatgggcagcgaaggcccagcacacacaaagacaaacgagaaacagcggaagactagggcgacgaccacaggcgcttgacggcaggcacgagctagacaccaaaatcttcatcttccggagactcctcttctgggtttgggaaaaattgagcaagactgagtacaaccaccgtactcaacaagacacacccacaagtgcataataaatgcaagggagtacaagggagttataatataaagggttagggttgcagtaaacagcattaaaagacacttagttgctcaaagctattttgtaaacacgattctagaactatacaatattatttatcaaggccgtgaacccacacgaacctgccttaacccaaggcctacgatgattcagaccgaaccggcaccccgaccctgggtcccagctcgtcccaagccaacccaggccaaccattccccattttagttgttaagcaggttttaagaatttaaaacacttacctgggtacattgctcggcttgcccataaccgagggcgcggctattcgaataggttatactctgatcagaggtgtacatctttacccacaagacacatcttcctcacgtgtaaccacgtgccacataccaccacggtaaacagacggaagacgtgacatagtttccaacccatcctagccatagacaagagtaccgacccaatcccacctacggccggacccccgggataggtaggcaggactgagcccctagcagcaggacaccggccctgtgccatgacatctcgactaccgggctgcagctcgtgtagccttcatttgtcctagagatgtccatcgacccccgacttcttccatctccatccatgtacttttgtttataaccagactgagccacaaactaagccttacccactagacatgtggaagtacggtagtgctttgcaacagaggcccgaagaccggtccttatatggccgaggtgctactatgaaaaccatacaccccgagcccagcctaaaaccattttggggattttgaatagaaggagcggtgtgaagccaattccacaataaccaaaccattccatagtgtccaggtgatatgaatattcccaaagtctagagttgaaaaaccacctaatgttacctaattaaatagcgaagcatctacctaaaatcatactagtggtaccatgagtagagtgtccactagttggggttttgtttattctagggtgaacaaggaaataataacaataacaataataaggtcataacaaaggtaaataggcatggctagataaaacagtgataacgcgggaatttaaataaagcgataatgcaataatttaaagcaacataattttataaactgggattcaatatgttcaaagatgatgtgacttgccttgctcgctttcccaaacgtcggcttcaacctccacgaagagcggatcttccgaagctgcagcgtctatacgaccaatagaaaagaaaaggcttttactctaataaactccatataacaagctgaaacaaagcacaaaaatgggtttttgacttcttaaggaaaaattagagacttgaacggtccaattccgagttcaaatggccaagttatggccatttgaagtttatatgctctttaaatgaatatttgcgaatttcttcatttaaattttaatt

SEQ ID NO: 20807 - DNA, 2177 bp, Oryza sativa
atttttccctctctctctctccctcggattcgtttggaactttccccctaaccttgccggcgccattaatgacggccgggactcccgcgcccgtttccccctcctccggccaccccttccctctcttaaccctatataaaccctccccgtgcctccctccaccgtttccgccgctcgccaatctctctccccgccggaatcgagctcgcgccgtcgctctctctccgccgtcgccgccgagctccggtccgccgccgttgtcgccccggaccacctcccacctcggcgccgcctcctttggcttcgccgcatcctcgccgacctcgtccacctctccgtttcggtcgccgaccaccggagccccgtcgaccccgtccacccgagccgcgccgccgccttcctccgctccggtcgccgttcccgtcgtcgccgtcgacccggggtgagccgtggaccgccgattcgtttcctccttccctcccctctctcggccgccgctccgccgtacctatggccgccgtcggcgaccataggggcgcgggcgcgccgcctcccgtcggctgtgccggcgtggccgccttcgggcgtgccccgcggctgccgtgtggggcccggctgtcagccgcccgcgcccttaggtgcggctgacgcgtgggacccatggcgccggccggtgtgagccctggtgcgcccggtccaccttggaccgtgaggctgccgcgtgggccccactcccgtggacccagtccgcgcgcccctcccctcggctgacgcaataaatccttttttttttctttaattaaaatttaaatgaagaaattcgcaaatattcatttaaagagcatataaacttcaaatggccataacttggccatttgaactcggaattggaccgttcaagtctctaaattttccttaagaagtcaagaacccatttttgtgctttgtttcagcttgttatatggagtttattagagtaaaagccttttctttttcattggtcgtgtagacgctgcagcttcggaagatccgctcttcgtggaagttgaagccggcgtttgggaaagcgagcaaggcaagtcacatcatccttgaacatattgaatcccagtttataaaattattttgatttaaattattgcattatcgctttatttaaattcccgcgttatcactgttttatctagccatgcctatttacctttgttatgaccttattattgttattgttattatttccttgttcaccctagaataaacaaaaccccaactagtggacactctactcatggtaccactagtatgattttaggtagatgcttcactggttaattaggcaacattaggtggttttacaactctagactttgggatattcgtatcacctggacactatggaatggtttgattattgtggaattggattcccacctccccctctattcaaaaccctcaaaatggttttaggctgggctcggggtgcatggttttgatagtagcacctcggccatataaggaccggtcttcgggcctctgttgcaaagcactaccgtacttccacatgtctagtgggtaaggcttagtttgtggctcagtctggttataaacaaaagtacatggatggagatggacgaagtcgggggtcgatggacatctctaggacaaatgaaggctacacgagctgcggcccggtagtcgagatgtcatggcacagggccggtgtcctgctgctaggggctcagtcctgcctacctgtcccgggggtccggccgtaggtgggattgggtcggtactcttgtctatggctaggatgggttggaaactatgtcacgtcttccgtctgtttaccgtggtggtatgtggcacgtggttacacgtgaggaagatgtgtcttgtgggtaaagatgtacacctctgatcagagtataacctattcgaatagccgcgccctcggttatgggcaagccgagcaatgtacccaagttagtgttttaattcttaaaacctgcttaacaactaaaatgtggaatggttggcatgggttggcttgggacgagctgggacccagggtcggagtgccagttcggtctgaatcatcgtaggccttgggttaaggcaggttcgtgtgggttcacggccttgataaataataatgtatagttctagaatcgtgttta

SEQ ID NO: 20808 - DNA, 675 bp, Oryza sativa
ccgatataaacgagtgggaagctccagagtcgaacaaaatggtagcagggatggaatgaatgaggaacgtaccaatgatgacgtctggagttgtcagcacgtcctcggccgtcacgtggttcacacgaccccgaatgacatccttaccaccgttgttggagcggggaggcgcttggccttgctggcgcctcggcttcgggcatttatccgcaaagtgcccgggctcgaagcagttgaagcacagacactgcggaccttgaacgtccctgcggccttgaccaggctgcatggctggcataggaggacggggcgcacgagtcccttgttgactctgctgttgctgcggctgtgggacgcgcaccacgaattgaggtcggggcgcggagcgaggttgttgctgctgttgctgctgcgatgacgatccccctggatagggattgtgatgcgaacccgctagggtttgtggcccgatctttcgatgagaggtaagggataactcgattagatgaagtcgacgttcacggcccgactacaactgtccaaagacgctgcgccttagcaaccgatacaccgtctccaatggtcgccgcgaacttgtggtgcgcgtcaacccggccacgagggcactcgtcctgcaagcaatcgaagaacaagcaagaacaagtaggacaagca

SEQ ID NO: 20809 - DNA, 1194 bp, Oryza sativa
agagtttttcaatcaagcgctatgttgtggatcaattgtagctaggaaaagggtatgtaagcctataaaaaaagtgacaatgggaatcattgatctcagggaaaagaacaaagctttattacccaaacatttgtacaagttcaattacaaatgcccttatccttcggtgaatttgatttggactacatattactcctcttcagttccacatgctgccagattatgtggtcgaatttggtggaaagatataacgcaatttgatatcattttcaaaggcatgactaaacctattgtggacacagtaagggtatgtttgctactcagggttcccaacccttctccctcgttttccgtgcgcacgcttttcaaactgctaaacggtgtgttatttgcaaaaagttcctatacgaaagttgctaaaaaatcaaattaattcattttttttaaaaaataactaatacttaatttatcacgcgttaatggaccactccgtttttcgtgcggaggggaagagttcccctccagatctccaaacgcagcataagttctgttttgttctgggtggacttgtgggaaggccaagttagggcacaagcatatccaaaaatgttttcctttgtgagacataaagatgattctatccagcagttcatgacaagacaggttcaagaccaattcctctatctgtgcaggctcatgatgaatacaataacatgaattgggaattggtaccattcactttgtccagcaaagatgctatatggacttatataagctctaaagtgtgagttctacaagctctaaagtgagttctacaaactcagtaattatgaaaataaaggttttcacatatatggttattgttgatggacataatcaattaatactagggagtagggacctactacctgataagaagaaatgtaagcctccaaatgtaactattaattgctccttttgtgccagcctgatactagatagaccggataacacctcttttttttttagtgagttcagtcagaactgttggacaaagattagttttcattggaacctaaaccaggagatccatgggatggttcaacagcgaaaaaaaaatctcttttggaggttcatattttatggatgtttttcggcttgctgcatggaatattgggaagcaacacaataagaatatcttcaataatgtccaac

SEQ ID NO: 20810 - DNA, 1633 bp, Oryza sativa
gatgcataaggttccctacatatggatggttgttcaaaataacaagttcagttgaaaataaaatatatataagattaatcataggaagaatttcatcggttggaaattttatcttttcaattatgcttgaaccaaatattttctgaattcccagctcctgtactatacaatggtggcgatattcaggcagtggacgtgctcacctgcttacatgtgaaaactgggagtgattggggcaaggggttcggccgaacccttctggtgcccaatcactgcaattttcttcagagtttagtgcacatcaggtgttcagatattcagtcacagttttagaatttgcacgtcagaaagctgaggtatctcccccacacttattttgaatgctaaactttattaatcatcaaaagacaaaattggcgatcattggggttaaaaccaatgagccacattatttgacaataggtgcttacaatgataaaaataaaataaaataaaataaagaaactaagaacctattagctacattattaatggaagaggagacatctaatattctaatttgcataatatttgttctcctttctcatctctacaaatgcacgcttgatcttagcgcaaaaaccgcgactaagggtatcgaaattgcctctaagctcagcaagctctacctagttccgtgttgcgatccctaagctcaatattctccttgcgaagcttcttcacatggcttactagcttatggaccgagggcgcgggctattttacttcttcttcttggaatttgcccgggtgccgtaatgataggagggggcgtcaaatgacgcttccaattcataagtggagggctacgggactccgttgccccctccttctccgatggtgtcaagggcaggagcaagcacttaccatacccaccgccgggagttcgcactccccgaatgcaaaaagggtccccattaggggttgatggagtggcggtgggcgtggtgtacttgtggagcacctcatctcttgcctttgtatagagcgtgcccatatattgctcggtgggcagcggagcggcctttacttgctcttggaagagccgccttgtcgtcaacggattgagctctccagttgtcggctgtcgcgcagtcgaattcccccaaattttggttttggtcacatggcgaggggagagggatcgcgctgctgaacggggggccgattggggccgtgatgggttcggccgaacacctagttcggctgaaccatggtgctcgccgactggatgcaaaattgctagggagccagacaccatcgcaagaggctgcgtccacacaacgtttacctcttccatcgtgtaatcttcaatggggatgagttggttcaccggagtcggctctgcgttgaggttgcaagtggaattggaggaggagccaatgtagggcatgaaggacttgctagccatgggtggtttgagtagggggaccaaggaattgagttgagatggagaggagagctttcttagtggaaagaatgaagaggaaaggttttggtaatattgacggtcgaaactgatcgataacgaccgtcaacaaaaccccccaggcttgaacccttgctcgtcccgagtgaaggatgaaagggaaca

SEQ ID NO: 20811 - DNA, 12607 bp, Oryza sativa
ctttggcacagtggcttactcttacccctgattcccacgagacactgcttctctttgctttgggctgttgaaagacagaacagtaattagagcaccaatcacccgatctttattcaactcttgttccggaagttttcaaatgattttagaaatgaaaaccaagttcctcaattgattcactcaatctctctaagtgtatcattttgaattcctcaccaagagatgcctttttgattcctagtctaaggtttatatgtggagctcggtatagataaaacatggcatacttgcattcacatttattactaagttaaaaacttagactagagcagattactaaacatactcaagatcaagatcgtgcataatgtgtgtgtggtatatagtggaaatggtatatgaggaaaaataaaacaaaaaatgcttctcctttgtgcttactttcttctcccaaaaatccttcttttatttattaggagagggcatgattacatttttttttcaatatcacactcatgcttgatggagcataactttattttttttcataaccatgcctttccctcgtctctttttttttcaaaaggatatatttttttctttaggagaagaaagcacatgaaagcatggagaatttattttggtggtaatatggaaatggagtggaatattgcttagctcccagtgtaggagtttagcatgtgcataaatgcggttgtatgatcttaatcatagagcatgagaagtatctacacaagtcacaagagtttgacaaagttcaatggaatggcaagcaaccaaaatgtatatggtttaatcatgatagcacatttttggctctggtaggaatttataccaaatgaggaactttcaattttattattttgaaaaacaaaacatctggaattcaagccaaactagtatcaaggtcatagctactcatatttactatctcgtatctcgcaacaacctagacttagattaggaagtgcagcccatttacctccggttcctggataattgttggctactcatatttaacctttgatagagtatataaaagatataaaacagagcaactattcatcatttcaacaaagagaactagcttgtcttacctagcatgactcaaacctatcctatttttttggtattttctattttgcaaatttttatgttgttttgaagttttataagatgcaattggaaatcaaatatgcaattggaaagggaaatatgcaatgtgatacaagttacctcattggagggagcgatgtctccccccaagcttggctttcgctcagggtccttgataaggattgaacccctgaaagcggaagtacgcctgaaggtcatcatgctgttgttgcatcatgttgttgatgttggtgaactgagcatcagcagattgttgccatcttgcgtttgtgctatgtgttccgtgaggtcgtactagatctcccccgtctgcatctcaagggtgtccatcctcctagtgatttcacccaagtcccaacgagaggaactcgagcgccattcacttggagctggaggcacaccacttgatctggagggttggttgtcccccctagtggatgtcatgaggcgcatgccaccggtcctcactggcgcttgcccaagttgagactccgatgctatggcgtggagcttgggtccatctgggtgcatccccagttggtgcccaacctgcctcatacatctgcacaagtgtcgaggatgatgaacttccttgttcgttccttgtcatgttgcgcgtctccctgtatgttccacctgcacgagattcttctatggtctgcaggggaatggttagttcatggcagttgtacaaatgataccccgcatttggcaatgggatttcatttgtacaaccggggaaaaagtataccaaagatccatctactccacgtttcaaaatatgcctttgcactagataggcctcatcaatacgcggacgagcggctgagataaaagcaatttggtcactaacgatccctagcccttttgttatccgagtaatcagagaagtgcactcaacaggagcagtgaactttgtactttctaaccattgtcttattatacatttcacaggagaaattttgatctttctaaccatggcaaacatgataattaattcatctcccctaatgggtctcagatcacttctaggaaacaaagtcatagcaatccatttgtgcatgagcctaagtgtaggattatggatatcattcgttctaggtatcttgcaaattggagcaccagaaatatcttcccaaaacctatttttctcgaacccagaaattcctttctggagatcgattttacaggaatcatgaaaaccaagaagtgtacttaagcctttccatgtgagcgtgaactccttacggaaaaagcgaaatgaaatatcatcttctatttctttcaaagtgtacagaaattgcaaagtaagcaaacaagaactgggctactctaccacagcaaatctctgccaaccaacagctttccaaatagaacgaaattcaacatccatacctattttttcagcaactccggtgagtattctcgcgtgtgagcatactcccggtcgctcagcatgtagtaggcttgtctctcccgatcgctgacaaggtcaaggtcagcgtcgctcaggagttgtcgcggagcgtcggcgtcttctatcgagacatcagctgaggaacgagtgctagactcgtcatgacgactttatggagagcttgaccccttgaacagacgagacagtcgcctcctcatactacacaatggagaaagaacaggctaacttggctggggttagaaatgacaagagtttcacccgccggttagtttcaccaaagcaacttgtatgtatgcaactaaagatttgaactagaggaaaattatcaaagcatgaatgaacttgagagcaaactttggagagggaatgaaaatgtgttgaaatggggtgaagtcccttctcccagccggttggcttaagttgtgcacccacaacggtcaaaactaacctgtggggcccactagtcgttgcctcaaaaagtgaggcagctgaccgttgcctggccggttcggccgaaccagggtgttcggccaaacccttggtgggaccaaccagccccactttcggccgttggattccaacggtcagtgtggtcatggcacaatgaattttcgttgaaaattttactttggtttgctctgaaaaattcaattgaagaatttcctccaaattcaataaccctaaaagcaattttgaaattcaaacatgtggtgatgcaaaaattcaaattgttgacagcaaatatgcggatacataccaatttacctgttggcgaaggtcgtgtcatttaaaatccgacgtgcaagaccgtacctcctttcgatttagttcgtggattttccacccatttccggaggtgatggagcgggcgtttttggcttcttcctccacaccttctttgatttcggtgcggaagatggcttcgtctgagccggctgttctagcttcttggctggtgcaggtgattttaccagcgtcctccaataacggttcctgggcattgttgtttccttttctaggaagttctacataaaccttaccaggctatccgtcttgggtggctccacatcgacaacttggatattctgtgggtttggcctgtactttattctgaccatggtgcattgttccatcctcggttgaaactcaaacttttcctccttcccgttggtatggaaacggatactccccgttcccacgtcaatgttggctcctgcggtgctaaggaacggacggcctaggatgagcggcgtctctttccctgtatccatgtccagcaccacaaaatcaaccgggatgaagaaatcccgtatcttggctggcacatcctccgctatccctaccgggtaatggactgacgagtcagccagttggaggcgcatcggtgtcggtgctaacaccgtgaagttgagcttgtcaaagacgtcttttggcatgacgctgacgctggctccaaggtcgcacaaggcctggtcgaattgttgtgccccgatcgaacaggtgatcgtgggacaccccggatctttcttcttctctgggagtttgtgcagtatcaggttgctacagtgttccgtcagcttgaccacctccgttgttgggagtggtctcttgttgttgagtatgtccttaaggtaacgggcgtacgttggcacttgcatagcgtccaacaacggcacgttgatgtggatcttttggattacttcaacaaaacaagcgaactgcttgtccactgacggtttcctactctgttgaggaaatggcagcagccgtgtgtcgcagtactcctgcggcactgttttgtctggctggatctccttgtcatccgagtcagtagatggcgtttcttttgacatcccattagttcctgcagggttaggatacggcggatcacgagtggacttacctccccttgttgtgatcgccttaacattttcaatggaggagtcgggttgccccggaatcctcccggactcatttgcagggactaaagatgccaactgagctaactgggtttctatcatcttattaaagctcagctggttttgaaatgcagaagcgaagccatctagcttgacatttatgttctctaagatcttatcattggcagcaagcttttttcttagtgcatcagtggttttagcttgcgcaaaaacaagatccatcaaggagggctggttagagaagttaccgttattgttgcctcctggataatatgggcgtggttgattccacccctcacctccttgtggacgatactcgttgtttttgcccatgtacatcgcctcctcatgggtttccaggcagtcgttcccagaatgacccgtgcctccgcagacttcacacgtgacgtgtgagtccaaggccttgacggtgccttgtggccgtttctcgtggtcgtccaagcatttcatgaggaggtccagcttggcagcaagtaactccgtctccttgacggtgtgcatgcctcgctgacgggtctggagtcgttccttactccaacccgtattggagaccatcttctctatgagttcaacggctccttgaaccgttttagagaagaaggctcctccagctgccgcgtccaggtgatcgcgggacattagggtgagcccattgtaaaagttctgcaggatcaaccagtcgtccatcccatgatgaggacaggcggccacgtactcctgtagtcgttcccatgcttcaggaatggactcgtcccttgtctgctggaatctggaaattcgtccacgaagggcgttggttttgcctatcgggaagaacttcgagaggaatgacgtcgagcatttatcccaggtgttgatagcagcacaattggcatagaaccactgcttcgctctcctgaggagggagaacggaaacagccgcagcctgacagcgtcaggactaacgcccttgatggtgtacatgctacatatctccaggaattgtagcagatgagcgttggcatcctcattaggcttgccacagaacgggctagcctatgccatcgtaatgaggttggacttcaggtcgaaatccacatctcctatgttgatttgtggcccgacggccacattcagcagagggagcagcgaactcgcgaagagtcttgctggccataatcttgaaggtctgtggcgctggtacggctggtttctctgtcggtagagttttctgcggagcaacgactcgcggcctgacgcttcggaagaaagcttttggattttctttgaagttttccggcaagttgaaaccagccatgcactaccctgttttcacaacaaaaagtgaaaacaaccaaggttagcctgcaaaggaaattgactatacaaaggtaaatataaagtattagttttaagtaatctctattatgaatcttccccggcaatggcgccagaaatgcttgttagtccttttatagctgaactatgacggttgtgacggttggaatggtcggtaataccctccaaccgtcattggggcttcatctcaaccgtccagccaaaacctggatccaacagaggcgagggaggttcgacagaatcaccaggttcgaccgaacctggtgctggcccaatccagcccaatttcggctggcggcctcctctgctgcttcacttcgtagacttgtgaattttggcctgattcttcgtgtcaagtctgtgttcttggcccattcatacacaagtctggttctcgacatcgtccgattgatttattgtctgagttgatgttgattctccttcactttattgtcattctctacaaaaggttagtagacttaatactagtggaatattattattcttgcatatttatgcattgcaagcatcactagttctctcttgttttggtaatattgacggttgaaactgatggataacgaccgtcaacagttacctgagtcgttgtggagtgtgatcgccccgtgcgaagaggtgtcgatgatgtcgaattgtccttcccatttgctgcgtagttttccatggccgaagagcttaactctggagttgaacattagtaccttgtctcttggcttgaatttcttgatttttatctgtttatcatgccagcgcttcgttctttctgtgtatattttggaattgtgatacactttctctctccactcttctagctcagccaactgcatttttctccattctcctgctccatcgaaatccatgatccagtttctgatggtccaatatgctcggtgctcttgttctacggggagtcgacatgacttaccataaactatatgataaggggacattccaatgggtgtcatgaacgctgtccggtatgaccatagtgcatctggcagcttgtccttccatcctatgcccattttgttgaccgtcttctgtagaatatttttgatttgtttgtttgatgtttctgcttgaccgctggtctgaggatagtaaggtgtagcaacattgtgtttggcgcccatatctcgtaggaggtgtcggaaggtttcgtcgatgaagtgcaagcctccatcacttatgaccaatcttggggtgccaaatcttgggaagatgatttctaagaacatatttttatcatgcttcgcatccgcggcgctgcacagcttagcctcaacccacttagatacatagtcgactgccaccaagatatactcgcaattacgggactaaagaaaaggtcccataaagtcaataccccacacatcgaatatctcgacttgtaagttatatgtgaggggaattgcatcgcgagcagtgattcctccttgcctcaagcagcttgggcgccttctgacaaactcttttgaatcttcgtacattgtcagccagaagaagccgcattgccaaatctttgcctgcatgcggaatgcaccgtaatgtccatcataaggcgaggagtggcatcgttctatgatcttaagtccctctttagttgaaacacatcttcttagcagcccatcaaagcaaatccggtataggtatgggtcatctcatatatgacgatgactctcatatttcagcttcctctggttttctcccggtagtatgtattttgacaccatataattaactatattggcataccatgggctggagtcgtgcactgtcatcagcatgtcatctcttaggaagtcatttatcggctgttccagcatattagtaatttgcagcctagacaaatgatctgttacggaattttctactcccgttttatccttaatttctaataagtcaaattcttggagtagcaatatccatcgcaagagacatggtttagcatctttcttagtgagcaggtattttagagcagcatgatcagtgtgaacaatcaccctagcccccaccaagtaagatctaaacttatgaatagcaaaaacaaccgcgagcagctctttttcagtggttgcataattcagttgggctccgattagagttttgctagcatagcagattgcgtgatgcctcttgtttttggtttggcccaggaccgcaccaacagcaaaatcgctggcataacacataatttcaaagggcagcgtccaatcgggaggttgaatgattggagctaagacgagtgcctttttgagaatttcaaaggattttaggcacgcatcgtcaaactcaaaaaggcgtgtgatgatgcccattgaaccgtacgagatggcgggtcgatgatggcagcagccccgttggcggaagtggccggattcatggcgccaaagatgaccagatggtccagatcttcttggcctcggcggctatggtgccggacgtcgacagttgggggaagagcaagcgcggcgtaggtggcaatgtgggcaaacaccatgggaagaccctcgtggtagccattgacggaagagagatctgcaagcatgttccctatcgacatctcaggcgccaccgccgatcctctcccgccacatgctatcaaggtcacttatcgaatgcaccgccgttgctggtgtccatctctacctcccgtatacaccgtcagctcagcttgtccacctgatttggctcgatagcggcggcttgatcctcaatcgcgggtgctgttgatgggggatcggctgtaactctccatcgaaggcatggaaggattggcgatggcaaggccgcgagggcagcggctagggaggggatggagtcacgggcaaagagagagagagagaggggcgaccggcgaaggtggaggaggagatttgtatgggtccgagtgggagaagaacgatatggcggcggctctggcgaggacgtggcatagcgccggcagtggggccgaggagaagtccgtgaggaggacagccgtggcggtggggaagaagaaggacggccgcgggctgaggtcgatgtcggttccggcggcggagaaggggccaaagtcggctccgacggcggctccggcagctgatccgagtgggagaagcacgatctgggaagaaggaggtggggaagagcggggcgcggcggtggggaagaaggaggacggccacggcggctccggctagggcgcggcgtagcggcggcagcggggagcaggagcagcgagtgaggaggacggccgcagcggcagcggggagtcgctcctgcgaggacacttggaggagtgagcgaggaagagaggcgcgcggtctccgcagctgcgggtggaggaggagtgatgtcttcgcgcgtggaatcctcggctgtgaaatcatgtggtggaggaagagaagcacgcggatggacggttcagattagtccggatgatttgacctgtagcattggaggggggcaactcctcctttttatattagtatagatgaagggtagcggaaaatgatccattttttagccttgttaagcttcctgtagtccatgcacatgctccgtccggttacagttcgttgtggaatgagttcattttgggcatttataacgaccgtcatccctcctttcttcggcaccacctggaatggactaacccactcactgtacggtacgggataaataatcccggtgtgtaggacttctagaacctctttctttacgacctcacgcatcgcattattgagccgtcgttgaggctccctggaggaagtactctcgggctcaatatgcatgcgatgagtgcaaagggcaggattaattcctttgacatcctggagggaatagccaagaacagagtgatgtttctctaacacagctagaagacgctgagtctcgtccttagaaagcttcctcagaaagcttgtcacttatgatgacaggagcttccttatcgccgtgcagaaaagcataacgtaggccttggggtagaggttttagctcaatcggaggtcgaggcggtggttctatgcttggaagctcgagagtctcacctggttctgcttcatattccactagtattcatgttagaataataatattccactagtatttggttcactaaccttttgcagagaataaccataaagtggaggagaatcgacatcaaactagacgataaatcaatcggacggtgtcgaggatcagacttatgtatgaatgagccaagaactaagaattgacacgatgaactgagccaaaattcaaaagtctgcatatgagaacaataaaggaggccatctaccgattttggaccatggcggcccagcccatggttcggccgaaccgcctgcagcgccattagatctaggtttctcctggatggctgagatgactccccaatgacggttggtgggtattaccgacctttccaaccgtcacaaccgtcgttctcaagctataaaaggagctctcctcctcacttcactcacacacctcaagcaaagctctctcatattctctcaagtttagtctagtgttttcaagctagtggagtaagaatagagtagaaatcggagtccggaagccttcggaagagttcgggtatggctctagtagctttcctttcctcttttgtaggctttatacttttattagaatactcttctttatacatttatggtattgaaatactttccgagtatatgaatgccaactttactttatattcatattatactgattatactgctagcttatctgggagatgcatcggtatgggtatagtgtttgcttatgcaattactctatgtcatgacgatgatattagagtagtatctggtagtttaggcgtggtgtctagattacggaatatcattatttgaggttatatgctgcggatgagagatgggccgctgatggtgacagcttagtatgggtattcctccgcgcgtgtatatagtcctaagttaatttcctggggagggtactcctccgtatttagccccggctgtatagtcatgacgggctgtcgtaaggaactcgacagtcaggggtgtcttgtcgaagtaccaagagggcattggaaagagggtattagctagttaatcatataactagaatgtatgtatactaggagtataggaatagattatcgtttctattttcttttcacttagcttagacattttagtatgagaatgagtagctccctgcttgtgtgtcactctaccctcggattattttaacccctgcttagactctgattattacaagtaacatataaattattagtccggttctctctactatgatcttcccacgagattaaataaatacgatacccttggaatactctcgggtgaaatgctacaatggtatatccgtgcgcttgcagatgacctctgtaaccataatgtaccaggattatttctgcaccattgctggaaattatatttctagtaatgacgttaagaaataccaacaacggtcaaggcgaaatttgctcgagaaaaaggaactgaaaatttgttccctcccaaaactatttcggggctatctaatcggggtgtatttacgaggagctgttctattgggtgcctgattagaatgttgaagtcttggatttcaaagacatgaagatccaagatcgcctccctgtcttcatagtagacatgcacgtcttgcacaatcccaaatccttcaatgatatttccattgggatgcttgaagaatttgtttgtcgggattattgctttatcgcttagataagctaatgcaaaggactcgaaaatgagattaaccccgacagttggattatagagaataccaacgttgttcccttctaaatgacatggaataactcagggatcggtatttatccgaattacgtcagatgaaagctctgcctcccttagccattcgtcacccattatggttgtcagctcccgaacagtttcccttaggaacccaagttccatagtatcgggaggtggcaaaggaacaagcggccactttttactgaaataattcagggtgtcgccgtaatcttcatcaaggccatccctgaatagaactggagcacgatccggagtctgaatttcttctttcgcaatggatgacggctcgggaactacttcgtcagtcgaataagttgaattagaaagttcaggttctgattcgactgttgaaggctcctttatcttagacacaaatgcctccaatgggggttcattgtattgtgccatgaagaaagtgttttccagaatgtgatctagaattacttttccttctgacggtgttttatgcatgaatgatcccccgacagttatgtccagataaaatgcagactcctaatctaggcccgtatcaaaatgttgcaaaagcacatattcgggtatagacaaggttggtccggattgcacaagattagtgaatctggaccaggctacacctattgattcgttgttaatctgttgaaaactaagaatttctactcgaagggcggtaatacgagtaaccgggaaaaaggcaagacagaacctgtcttgtaacttttccaaactaccgtttacacatcctacggtagatgtgtatcattgcttcatgccacgaatctgaaggcatgagcaaacttgctagaagtctcgcagatgatagtaggggttttcctgatcaagaccagaaaaaggattttccctaaccatactga

SEQ ID NO: 20812 - DNA, 3541 bp, Oryza sativa
attcgtcatcaatgatgggtttgttttcagagctaacaagctatgcattgcagctagctccgttcgcttgttgttgttgcaggaagcgcatggaggcggtttgatgggacattttggtgccaagaagacacatgacatccttgctagtcatttcttttggccacagatgcgaagagatgttggcaggttcgttgctcgctgcgctacatgtcaaaaggctaagtcacgcttacatccacatggtttgtatatgcctcttcctgttcctactgttccttgggaagatatttcaatggattttgtgttaggattgcctaggaccaagagggggcgtgatagcatttttgtggttgtggatcgattttctaaaatggcacatttcataccatgtcataaaactgatgatgcttctcatattgctgatttgttctttcgagaaattgttcgcttgcatggtgtgccaaacacaattgtttctgatcgtgacacaaaatttcttagccatttttggagaactttgtgggctaaattggggactaaacttttgttttctactacttgtcatcccaatactgatggacaaactgaagtggtgaatagaaccttgtctactatgcttagggctgttttgaagaaaaatatcaagatgtgggaagaatgcttgcctcatattgaatttgcttataatcgttccttgcattctactacaaaaatgtgcccatttcagattgtgtatggtttgttgcctcgtgctccaattgatttgatgcctttaccatcttctgaaaaactgaattttgatgctaagcaacgtgctgagttgatgttaaaactgcatgagacaactaaagaaaacatagagcgcatgaatgctaagtataagtttgctggtgacaaaggtagaagggaattgaattttgaacctggagatttggtttggttgcatttgcgaaaagaacgatttgctgatttgagaaagtctaaattgatgcctagagctgatggaccatttaaagtgttagcaaagattaatgagaatgcatataagattgatttgcctgcagatttcggggttagtcccacatttaacgttgcagatttgaagccgtatttgggagaagaagatgagcttgagtcgaggacgactcaaatgcaagaaggggaggatgatgaggacatcaacaccatcgatacatccacgtccccccatatacagcatgatggtcctattacccgcgctcgtgcacgtcaactaaattatcaggtgagttctttcttgagttcatattcctcgtctttatacctcggagacgcgtgcactcgtgttttactcaggaacgatggagaggatccaaagggaagaggatacgcgcggggtggattcggactgcagggcagcgccaacttctgatggccgcaacgacttcatgtgaactccgatttgggcgtgcaagtacttcatggaaagcttatcaagtcgactttcaaatggattcagccacatgtccatatctattctggagcggccgcaattgtcattttactcccgactgttttctgtccatggtgctgcgtcacctcttttggcccaatgggctgtgtatccaagttgggcctattaggggcgcgtcctagggttggagcacgaccctatggttgttcttctcctcttcttatacctctagtagccgccaagaacactcgggttttgatgatagagatagctacttgctaccggctcgcagcgcgcgtgttggctaaaccgcccgtctgcctgtaatcggaaccccaccatattgtgttttgatagtgaaactttcttctttatctagcaatttcggtgcttgttctacctgttcttgcttgttcttcgattgcttgcaggacgagtaccctcgtggccgggttgacgcgcaccacaagttcgcggcgaccattggagacggtgtatcggttgctaaggcgcagcgtttttggacggttgtagtcaggccgtgaacgtcgtcttcatccaatcgagttatcccttacctctcatcgaaagatcgggccacaaaccctagcgggttcgcatcaggtggtattagagcgtggttcattagtgagagattttacccttcccttcgtcattaattttttttcctatagtccagaaaaggccaacaaaaaaaaaatagtagattagttttcccgtgatcctatagaccattgtgcctttttactagtactgcttagttaagacttgttgagttttcgattgcatcggttgtgttaatttgctggtcttagtgttaggcgattagagtttcgagttcttgccacaaccgcacatcgccaccttcatcaattttgccgtcatcaccaccgtcaccgccatcgcagtcacccaccaaatcactttctatttgtgtttgatctgttgccgatagcatttgtgagttgccttgtatcctgccgccactagaaaggaaatagaaccctgattcgagtgaccttccttaaaacagtcatatccttttcatacggactcaaaattaggcttataatatatccacggacatctacaaaaaaagatacatccgattctgccccactttgccaggttcggcaaatttaaaatcgccgaattcctcttgcaaaattttgtttttgtggcgagaagctttgggacctagtcgcatagaactttgaaaaattctacaagcttcatactttgtccgtttaaggtaagattttctgtggttggttgcagtgtgctcctggttgtgaaaaaaatatcaaaaaaataaaataaaaataaaaataaaaagtcgtgtctctctcctcagcactagagagagaaagcaaaaaaaaaagggatccagcgagcacaccccaccattccctctttgtcaccacctttcaccaccgtttcttgttttcgttgctgtttgggtttgtgttttgtggcgtcctttgtggttaggctcgcgtctctacttcaactagtctaggaccagcactgtacactatacccttgagcgattattcaacttgctttggttaacgtggtttctagttttctcttgagcattgctttcagcccaccgacagctccaccacaaacccgactacaacttgacaggtcttgttgctacagcaccgatacacctcgttccacggttgctaacttgtgggttgctgtccccctcctgtgggcaaggtaagaacttgtcacatcctgattttcgtttcaggatttataaattatttaataaattaataatagaatttatattaaatgttcattaatttacaagtaaagttaaatgtgggaaataaaatttcctaaatataaagcatggttggatttaatttttattaaattctccatggttaattatactctctggaatattctcggatttttcggagctcaattcctaattttaatcatacaaagagcatttcagtaattacccacatattaaattaatcattaaatggtctaattgtaatttgttaagtactttgagtgtccaagtattttcaggattttctt

SEQ ID NO: 20813 - DNA, 4319 bp, Oryza sativa
aaggatgagctgtcagttatgttgatctctcatgactatgttgattttcagcagctggttgacaaagcaattcgacttgaagacaagaagaacaggatggataaccgtaaaaggaaaatgactgtatcccaggaggcacaaggtagtagccagaggcagcgtatcaagccactccaaattagtgaatcttcttccgctggtcaaggacaatcgcaacagttgaacatcggtggtgagatcaaatcagagactaatgaaagcaatgaagttaacatcgagcaagcaaatcagccggtgctagttcagcaggatcagtcgaataacagtagtggaagggagcagcaggtatgtttcaactgttacaagccaggccactttgcaagagagtgtccgaagccgaagcatccgcagtcgcaaggtcaagtcaacaacattgtcgtcacaggagccaatgcagtgccagttgcgtcttcaagagttgcgtcttcaagtgttacaactcagccaccagtttcaaagcggcagtagttttctttaaagccttagaataattatcggagttatggaataagatagactgcagtttacctatgcctttttctttctagccgttccgaatctcgggacgagattctttgtaaggggggtagatttgtcacatcctgattttcgtttcaggatttataaattatttaataaattaataatagaatttatattaaatgttcattaatttacaagtaaagttaaatgtgggaaataaaatttcctaaatataaagcatggttggatttaatttttattaaattctccatggttaattatactctctggaatattctcggatttttcggagctcaattcctaattttaatcatacaaagagcatttcagtaattacccacatattaaattaatcattaaatggtctaattgtaattttgttaagtactttgagtgtccaagtattttcaggattttcttgaaattatttgagcattggaagtatttttaacaattcaaaaatcatttcagtgattaatttaattggaaaagtatttaaaatccccttctccttttcgggccgaaataggaaaagttcagcttcagtcctcggcccattctcctttcctttcggctggccttatccctcctccaaagtctgctttgtgtccctctttcaatcgggccaagaagtagaagcccagccaaaagtctagtttgcctccctgctacagtgtcatcttcaatctccagccggctggagacacagccgagccgtgcatgccgagcccgagccgccccttttctccctcaaatccgcatccaatccggccctttttcttccggatttttgaggggttttgatcctctcgtcctcctctatctttcccctcaagaatcggagcaaatggttgagtatattgctcgaatcaaactcgttttcgggtttatctccaaaaccgagtttttgatttctcggatcgatttcttgcgggaggagtccgatctcttcaatccaaggctataaataggaccctctagtcctcctctttcgtttgccccttttcccgagctctctagtgccccgtagcctcgtcgccgcgtcgtccaactcgccgccgccgccggccgagcttcggcgaggtcgcgccgccgcccttgccgtcgccgccgcttgccgccgccgccaagaggtgcgccgaggagagaggaagcccggccgcccgtccttcttcgccgccggtcgccgtagctcgccgccgtcggtcaacccgagccgccgcccgttccccgtcgttgccggccgtcgtcggacgtcgtttgtcgttgtggtgagtaccgttgggttcgtctcgtcgtcctctacgtgtacatgccctccaaatccgcagccggccgctctatctccggcgaggtcgtcatcgtggttcggccgccatcatcatccttcctttttcccttttttctaatagattaaatcttcggaaaatcataactaaataaccgtagatccgtttcaggtggttcaagttgctaaattcatctaaaatcatgatctacatgtttgtttactttatatgtattgtttatttggtttttattagtctttttcttcgttttgcgtgttagcttgtcgtttccgtcgttgcgaaggttcgtgagtgcgtcaggagtgttaagaagattaattgaagaccgattattgcaaggcaagtcacacagatcctaaacacaatcctttgagcatgttgatcctatatttaaattctctatttatttcaactgtgcatttattttcgaatgtcaccgggtggtgtgaacttattcctttgttatggccaatttgcattgattactttattccttgataccttgggttattataacttgactagttgggctttatatattggttcagctagatattagttatgattgcttagccatgcttagaaacattagcacactattgggataacttatgactcactattatttaaggatggcttaatgatagttcacgatggtcaatcgtgattggttaattaattacttgccaactaaaacttgataatggtgggttgtgagcacatggttttgagagtcgtgctcatgacaattaaggaccggttcgcgagctactgttgtgaaacatttatcgtgccaaccacaagtcagcgtgggcaacggctttatcttttgtatagcgtgattcattatagtgcgccagactgagaagtggcgagaagtccacgggggtcgctggggagtccatgcctctggtttttgagggggtgattatgatccaggaaaggtgcgctgtaatggattatgttgtgcaaggggtattgtcacaactcctttccgaggtaccgtggtggtattgaggcacatggtgacatgatgtggggttgtgtcttgtgggtacagtggtacacctctggccagagtaaaactattcgaatagccgtgcccgcggttatgggcgggttgagcaatgtttttcgtgattagtctcacacctctcacaataattatggatgttatacttggtaataatttgtttagctcctggtttggagttagatctgtacagccgggtatggttgttcaggatggttgggcctgtgcagcatgggtgtgctgttcagtgttgattaaaatttctgattaattactccactattttacttctcttaaatgttttgctaaatgctgattttgcaaatgagcctatattatgccatcctttggtatccttgtgcacttgcatatttgctgtgtggcttgttgagtatgtcatatgctcattcttgcaataatcaatcaacctcagttgaagataaaggatccagaaggagaagacgtttggcttataccccagttgagctgcctgtgggagtggagctgaagccatcgctagaccgttaattccgctgctgttttcttttcttttgtaagtgtgtaacgttattattatgatggatttgtatattaaattgtcagtttgtgtacctcggctgattcctggacgaggattttatgcacaaataaagttcagaaattactagtgaatttccgggcgtgacaagttggtatcagagccatcttgactgtaggataagccaaatggtcaaaccttaaggactaattttccgaaaacataatttgtgaaaattttcctttctttcttatctagaattctttgcaaatcgttttgtcattcttcccccttcctctttcaacttgagtagtcgttaatcttgatggagaaactcgaagacgtcgatgttgtcaacttctgcaagtcaagtggatcgaggaataagaagatgatagtcgaatcttaagtgttcagatagagtgaagtttggaacctatcttagaacctatgccgccaaagtgtctttgaagaatagttagtagggtagaacgtttgttgtttgctttgtgtgtaggtatggttgcattcccatcattagagaagttcattgatgagtgtgtgactatactaggttgcttgcttaatcaacttgaacaatataatggtctacacacatcagatcagtgttaacctggttaaggtcttgtctttagtgtaacccctctccttctaccttttctaatctgcatcagaatggtgggatcatttccggatgaacagagcagaacgacaaccaatcacttgggaagagtttaccgaaggattcaagaagacacacgtacctgtaggagttgttgctttgaagaagcgtgagtttagggctttgaagcacaaggatcgtaccgtggcagagtatcttcatgagttcaat

SEQ ID NO: 20814 - DNA, 17091 bp, Oryza sativa
caaatgagcctatattatgccatcctttggtatccttgtgcacttgcatatttgctgtgtggcttgttgagtatgtcatatgctcattcttgcaataatcaatcaacctcagttgaagataaaggatccagaaggagaagacgtttggcttataccccagttgagctgcctgtgggagtggagctgaagccatcgctagaccgttaattccgctgctgttttcttttcttttgtaagtgtgtaacgttattattatgatggatttgtatattaaattgtcagtttgtgtacctcggctgattcctggacgaggattttatgcacaaataaagttcagaaattactagtgaatttccgggcgtgacaagttgaatagattacacctgtgatcagagtataatctattcgaatagccgcgccctcggttatgggcaagccgagcaatatacccaagttagtggttttaattcttaaaacctgcttaacaagtaaaatgtggaatggttggcctgggttggcttgggacgagctgggacccagggtcgggttgccagtttggtctgaatcatcgtaggccttgggttaaggcaggttcgtgtgggttcacggccttgattaataatattgtatagctctaggatcgtatttacaaaatagctttgagcaactaagtgtcttttgatgctgtttactgcaaaccctaaccctttatattataaccctcttgtactcccttgcatttattctgcacttgtgggtgtgtcttgttgagtacggtggttgtactcagtcttgctcaatttttcccaatcccagaagaggagcccctggatgatgaaggctttggtgtctagctcgtgcctgccgtcaagcgcctgtggtcgtcgccctagtcttccgctgttttccgtttgtctttgtgtgtgctgggccttcgctgcccatgtaataaattaactatttacgcttccgcttgttaaactctgaactgtatcaacttttggtgtaccttacttcctgggacaaggaataatgcacgcacgtaaggaacgcccgttgggttatttccggtcgtgacaatcactatgagagcctcattgtgcagcgtgtccttagcgcacaaatggagaaggcggagcaaaatcagcgacacacattgttccaaacaaagtgtgtcatcaaagagcattgttgccgcatgatcattgatggaggtagctgcaacaaattggctagcagcgagatggtggagaagcttgcacttagcacaaaaccgcacccacatccatactacatcccttacctctcatcttcatccaatcgagttatcgcttacctctcatcgaaagatcaggccacaaaccctagcgggttcgcatcaaggtatgacagttattggaaggagaattgtcggaaatgccccccaatcgccatcaggaacgcatctgggacgtctatgccaaaccacaggatcaacggtggagatatgggttcggctgtgtcaaggggtgaccatctctagcaggaggctgtgaggcacccctttgagagttcgaccgggggcagcgggtgagattcgaggatttggtgagcgaaactgtgtgtgatcttgatctcggaggctcctccaagacgatgagacaaaagagatttatacaggttcgagcctctatgaagcgtaataccctactcctgtgtgtatgattcttctgtgcttagaaagtccctgaatccctggtatgcaagctagggttagacaagctttagctcagggatcctccgtccgatcccccctcctcgctaggcatggtcctccttttatactctaaggggataccacatgtgctgcgagtgctacctaggtagacgacaggcctgacaggtgggccccacctgtcagcggcagcgagcgcgcgcgcgggctcggctagacttgggccgacttgggccgaggaggagagagagagggttttgggccgactttcggcccaaagccaagagaggattttaaaaacctttttcgatttaaattattcattaaatgcaattccatttattaaaaatactttcttagctcaaataaatcccagaaaaatctaggaattatagagttaagtaaagtatttaatgaaattttatctggccccattttatattggaatttattaattaaaattagatcttctcttctaggcttttaaaataaattctaataattccaattaaacaacaatttatatatttaggatttttagggtgtgacaaattacatgtcttgtgcctaagcccagaagctatctgcacgtcggttgctgcgcggggcccataaaatcatgcagggcgcccttgtcattcatcatttaacagatgaggacttctgggttctcgttcacaccagaaaaagggaacccgggttagttcagattggttggaccagctctgaccggggtaagaggctgtgaagcccctcatcattatgatgggacgggacggagcacgccgctcgccgcctgacacactgatagggcggggttacacagtcgccgtccaatcggtcattccaccggtcacagaccggtcagatgagcagcacgccgcattaaatgtggcatggcgcggttgcatagaccgctttaaatgcagttaggtgggcgttaggcgcgcccacctaaccctgtacaagtgagctgatacgtggaggggttcggggcagctcgaccccaagcgagggcggcctcctccctctagcttggagtagccgccacaacaccccgggctcgaccctcctcggggagagccacgtgggtttgagggcggcccgaccccaagctgggagggggcaaccgccacaacaccccgggctcgaccctcctcagggagagccacgtgggtttgagggcggcctcctccctctagctgggtgggggtagccaccgctccaccccgggcttgatcccccctcgtagggagccacgtgggtttggtggcggcctcctccctctagatgtgatacccccgggcccatatatccgacagtagcccccggcgttagccctgaccaaaaccttcccccggtggccagggttgacgccactctcctagtctaacgatgtgggcccggtctcttctccattctttgttggcactagggcccatgcgcctttttcgccccaacttgagggagactcgctgtcccgtaccttaggttgtgaacttattttttgtatatattcagcaaacgttgttagattctctcgggcccgcgacatcatgctacgcacctcacttgcccctgccttttgttaacctctgttcatgttctacttcatctattcaaacgattatttttgcgtgagtgtgaggactgaaccttccatagccagcaatcctcacccgcgatcaagccaagctgggtgccatagccagccggcggggccaaagccagctgctacgggagagccagcacagggggcgtcgatggcgtccagagctcgacacggggctaggatagagctaggaatcatagcccccacacttttagcaaagaatcatttgaatgggtgaagtgaatacaaactttttgttaccaaggggggcaaacgagcgtgcgacacgtgggaatcatgggaccgcgaggaagagatgggtgagagataaatataagccatgataattttgctaataagcatgaataaaaaagatatgtacttaaaggaagtattacaaatgttgtgctcaaaaagagtacccgggcaacgctgagctttcccagagtggtttgctttggtccgggtattgtaacacctcctttgttaccgttgtttatccttatttacatgtcgcgacctttcaaacctttggctcgaagagggctccccaccctgggtttcgaaccctttagggaagcctgcgaccacttagaaaacgaggtcaagctcccatgagcctgcgccctaacactacatattttgttcgctctttcctttcggtggcctccttccaatctctcttccttcttcatggacgattactttcgcacgagtttgagagccgaaaaattctagagccagcaatccccgtccacatttgtgccgggccgagtaccgtagccagccggcgggtccaaagccagccgctacggaagagccagcacagggggtcccgggcttcgacggctcccggagctcaacttaaggctaggataagactagaagacttagcccccacacttagcgaagaatcgttcatgaagatgggagagaggttgggctcttaccaccgaggggccaaacaagtgcgcaacacgcgagcgtcgtaggtccatgagaatagaatggggggaaattaaatataagattttaagctaatgaattgaaaaattgaaaatacttgaagcttgaaaggacgatcagttgagccagcccgggcactgtagccagccggcaggactaaagccagccgctacagaagagccagcacaggggtcccgggcttcgacggcacccggagctcaaaactgcaagagtcctcccaagagtgaaccgaggtggcagcaggttcatgggctaaccccgcgcttggcccctgagggccatggggaagacgttcgccatgacccggtaaccacttcccgccgcctctatgatcgccgtgcagatctggagggactcggaggggtcagcgccatcgtcgtacttctcggtgaggcagggctggagctttgggggtcctcagacattccgaagacacgccataaagacctggtagccaagcttacctggtggggatgtgggggaccttgcccccagcctggggtggcgcgacactcctgaggatgctgtgccttccgccgtagcggcggcgcgacactcaccacgccggcgctcaaaagaacctcaaaaattacgaacgcgccccctacctggcgcgccagctgtcgaggggtgaccctctctagcgggaggctgtgaggcccccctttgagaattcgaccgggggcagcgggtgagattcgaggatttggtgagcgaaactgtgtgtgatcttgatctcggaggctcctccaagacgatgagacaaaagaggtttatacaggttcgggccgctatgaagcgtaataccctactcctttgtgtatgattcttctgtgcttagaaagtccctgaatccctggtatgcaagctagggttagacaagctttggctcagggatcctccgtccgatcccgcctcctcactaggcatggtcctccttttatactctaaggggataccacatgtgctgcgagtgctacctagggagaagggaaaatattctctatatcaattacatgtcttgtgccttagcccagaagctatctgcacatcggttgctgcgcagggcccatcaaatcatgcagggcacccttgtcattcgccatttaatggatgaggacttccgggttctcattcacaccagaaaacgggaactcgggtcagttcagagtggttggaccagctctgaccggggtaagaggctgtgaagcccctcatcattatgatgggacgggacggagcacgccgctcgccgcatgacacactgacagggcgggggtacacagtcgccgtcccatcggtcattcaaccggtcacagaccggtcagatgcgcatcacgccgcattaaatgtggcatggcgcgattgcatagaccgctttaaatgcagttaggtgggcgttaggcaagcccacctaaccctgtacaagtgggctgatacgtggagggtgtcggggcaactcgaccccaagcgagggcggcctcctccctctagcttggaggggacactcgccacgccaccccgggctctacccccctcggggggagccacgtgggtttgggggtggcccgaccccaagctaggaaggggcagccgccgcaacccccgggctcgacccccctcggggagaggtacgtgggtttgagggtggcctcctccctctagctgggagggggtagccaccgctccacgccgggcttgatcccccctcgcggggagccacgtgggtttgggggtagcccgaccccaagctaggagggagtagccgccacaacaccccgggctcgaccctccttggggagagccacgtgggtttgagggcggcctcctccctctagctaggagggggtagcgaccgctcgacgccaggctttatgccccctcgcgaggagccacgtgggtttgggggcggcccgaccccaagctgggagggggcagccgccacaacaccccgggctcaaccctcctcagggagagccacgtgggtttgagggcggcctcctccctctagctgggtgggggtagccaccgctccaccccgggcttgatcccccctcgtggggagccacgtagatttgggggcggcctcctccctctaggcctgatacccccgagaccatatcaccgacagtagcccctagcgttagccctgaccaaaaccatcccctggtggccagggttgacgccactctcctagtctaacgatttgggcccgatctcttctccattctttgctggcactagggcccatgcgcctttttcgccccaacttgagggcgactcgccgtcccgtaccttaggttgtgaacttattttttgtatatattcatcaaacattgttagattctctcgggcccgcgacttcatgctgcgcacctcgcttgcccctgccttttgttaacctctgttcatgttctacttcatctattcaaacgattatttttgcgtgagtgtgaggactgaactttcatagccatcaatcctcacccgcgatcaagccaagctgggtgccatagccagccggcagggccaaagccagctgctacgggagagccagcacaaggggccctgggcgtcgatggcatccagagctcgacacagggctaggatagagctaggaatcgtagcccccacacttttagcaaagaatcatttgaatgggtgaagtgaatacaaactttttgttaccgaggggggcaaacgagcgtgcgacacgtgggaatcgttggaccgcgaggaagagatgggtgagagataaaaataagccatgataattttgctgataagcatgaataaagaagatatatacttaaaggaagtattacaaatgctatgctcaaaaagagtccccggccaacgctgagctttcccagagtggtttgctttggtccgggtattgtaacacctcctttgttacctttgtttatccttgtttacacgtcgcgacctttcaaacctttggctcgaagagggctccccaccctgggcttcgaaccctttagggaagcctgcgaccacttagcaaacaaggtcaagctccaatgagcctgcgccccaatgctacacattttgttcgctctttcgtttcggtggcctccttcctatctctcttccttcttcatggacgattactttcgcacgaatttgagagccgaaaatttctagagccagcaatccccgttcacaattgatccgggccgggcaccgtagccagccggcgggtccaaagccagctgctacagaacagccagcacagggggtcccaggcttcgacggctcccggagctcaacttaaggctaggataaggctagaagacttaggccccacacttagcgaagaatcgttcatgtagatgggagagaggttgggctcttaccactgaggggccaaacaaatgcgcaacacgcgagcgtcgcagggccatgagaatagagtggagggaaattaaatataagattttaagctaatgaattgaaaaattgaaaatacttgaagcttgaaaagacgattagttgagccaggccgggcactgtagccagccggcgggaccaaagccagccgctacagaagagccagcacaggggtccctagcttcgatggcacccggagcttaaaactgcaagagtcctcccaggagtgaaccgaggcggcagcaggttcatgggccaaccccgcgcttcgcccctgagggccgtggggaagacgttcgccatgacccggtcgccaccccccgccgtctctatgatcgccgtgcaaataaatgatgaactttgttgaacatcttaaaattattgtgcaagacatgtgattatgtaacactgatgtttatatttatgtatatatttgttatgcttatgtaaaaaattgctaaatatataattgttccaagtaactcggttttgctggttatgattcttaccacttgaatatgttatgtgaaatatgtgaataatatgaatgttatgtgcatggatgtgtaaaatatgtgaatggcatatgtgtatgtgaatgaggatactggggatgtgtatgtgctgggggatgctggggaatatatctatttctgtctttatgcagcgggcatggctagcaaaggcccgaggctagccaaaaagaaaaaaaatattttttttgtgggatatactcatcggtgacgggctttaacttatagcctgattgagttataatcattcgtgacgggcataagtcaaagcccgattgagttatagtcatccgtgacgggctttggttaaagcccagttgagattaaagtcatcagtgacgggcgctagttgaggcctgattaagattagatcttccatgacgggcccttgtttgactggtcgtctgggtcaaagctatcggtgaagggctttagtttaggcccaattgagataacttcatccatgatggccatatgcccgatagagatgatttctcacattagtaacctttacgccgtgacgggcaccatacccgacacagatgggggttgacgcctgattgagatgtgggtgaccgttgtagtgctagcactaggatttgctcatgatcgagctgccccggtgctcatgaacgagtccaggttgttggtccccaatgtctatgctaccatttggccctatagaggattaattcatctctagttagagtttcaactttcaagtggagttgatccagcttgcttctcagctcaatggtgaccatgtactcaacacctacccagatattggcaggactatgactgtggatgaagcaaaccgctatgcagagtatgctgttgctagatttttggaagctagcaggatttctctaagagctcgtgcaaatgaatctgctttggtcaccatgaggcctgcactcaccagcagagcctcaccatcctctgatttatcatctgaactctgatggattgttctgagatttaaccacaattctgcataatgatttgcaccgcatcagcttttggtcgataagaactcatataatgtgctaagcaaacataggtaggttggtgtactacaaagtgtgctagcattatgtaattgttagatcttaaacatggcattatacatagacatcatggtacttcatatctcaagcttttacttcagctgtccactgataaggctgagatatcagctcagaagtatctgataatacctacgtcgcagtacaccttagctgctccgccgccagacaatggcggtacccgaccattctcatctcgccatagctgcttgaaaatgccaagtgcgacatcgtctggccaaccaacttctccaacaccattagcctctccaatggcggcggcagcggcacaacggacagatggaggagcacggtggtgcttggttgccgggttgaaggagcacacgcagacgggttccatcctacttaccgtccgccaccggtctctagggccgccaccaccgctctgccttgaaggttgtcctccaatacacgttggaggcgccagccaatgctccgcttgaggccgtgttgtcgctctgccatgaggtcaggccatcgcacaagccggggagggagagagataggtgaagagaggtaagggtcactgataagtaggccccaccatatgccacgtcaacgaaaccgggggaaattttggtccatactgccaagggacttactatgcatggtttctaataattgaggggtagagattgctggtattggggattagggatgtaatacatactcgatgtaaagttgagagatgtcagatgaacttattccgtttataaatgtgttgattgcaaataaagttgcattctaattataaaatgcgtaccaacttgattgtgaaacaccttgaaattgttattcatattccttgttgcctgagtttattctttattgcgtggtcaattattgacattgcttaacattgcttatttagatgattttacacttgacatttggtatatggatgtgaatacaatgatcactaattgtgagtgattgtcggaggacggctggagacatgagcgccatccgcaacaaaaaaaaatcattattgtaaccaaaaacttaataaaacaaaataattttgattggggcggtatggatagaatatgggtggttctatgaaacgacaagccttcgaccaaggtcagttaaggactgagtcaagaagctatgcaggaaatgaaccaagtacgaccacatttctagaatgggtatagacccggtggactaagtaacccgagtaggggggcacctttcatggtagttctacagttattactgttgtgcggaagatgtgttggaaaaattaaacatcatgaagatatattatgtaatccccatagtacctcagaaacgccaagtagggttgggcgctagggtgcaatggggatccaatagtccttggagagggtgccgcaatgcgagggtgaccgaaaaactgggacgtgacaagtctcatgtgttgggtgcgtcacgaagggattaaaagcatacatccactacagtgtgagtaaacaaatatatccgaatcgccatgctcgtggttaattgagcgttgggtcttgtactactcttgactagcctcatatgttttaatcttgcttagaataggattgagagggaatgtgtgaccttgctcgatgtgcgggaaggtcggattgatcaagaatgtggaaaactggatgcgagggtaaaccggaccaaacgacaacctcaacttaaagttgttttcaattaaaactgctaagccacaagtttgtgaaatgaattgtgaagtgtcgctttatgaaaataaaccaagccatccttgaaaccctgtgtacactaatgcattatgtagtagtggcttgctgagtacgttggtactcacttttgcttaattaattcctttagaagaaggtgttggagtcgacccatacctgtgccatgctaacgagcaggtgccgaagacggtgaagtagggacctaggttcaccagtcgctgcctgtggaataagatgggccgtcgctgtttcgtttccgctaccttatctacctcttttgatatttggtattgtaattgaccatgcttggtctatttaggtcccactctggctacccttgtattattaatgtattgtaaaacttttataacgatgtcagctatgtgacatgtaactttgtcatgtgtgtatcatctattgatcaagagaatggtattgtaaacacatggggattctgatgtataaaaccgagggcccacaaaattgcaatacacgctgaacgacttagaaggggttggtagacaagctaaaactcgattgtttgggacatataatttcatatagtttatctatgcgacttcttaactctcttatgttgggtatatgcgtcacgaatggtttgtgttggtatgtgtctcacgaatcaaaaaccgatggttcagttccttttccattaataaagttgctttctcctcccgctgcaatgtcttccttctccttgcattctttctactccatcttcctacgttttccctccaactagcattcaggtttgtagcgacgttcaaattgctctcagtacgacgtcaaccgatggtgcattatgaggcaaaattgtaggaaagacacaaaaccaacaagggcaatgaaaataatgaaaaaatattcctaacaatatcgatcttccatcaaaagtattcaattcttacccccatttttcaaactttttaataaacaaaactcacgcagctacgggtaataaatcgccctaccataaggcaggccatataaattgtcctacggtaaggtgatttaaactcatctaaccactgtccactgctcgatgttgcattagccatgttcgtgttatttttctctacttctattcaaatctcaataaattttggaagcacaacatgtccatctcgattatgatatagttcgcacattctgttgctcgctgttgctgctctcgttgatgtgttgcttagtggcaaaacagaaatgcgaatttacctttatatgcaactgtttacaccaaaaggggaaaaaaacgggtaccttgcaaaaaggagtataactttgcagtttcaagtcccacttcaactacaacccaatctgcattacaggatgggagtctaaaacgactgcagtttcagcgtttttgaggcctgcagagacactgggctcgcgttgcagcaaaagattaggcggcggcgcccacggtggcgccggcggtgagcctcgacgagccgtagagagtctcctcgaaccggatgatctcgttcttggaaccgtaggccacttgagtccgctcgtcgaggttgttgatcaccttgtccagcaccgactgtttgccgtcgctgctgtacccgccggctttctctatcaagaaacccaacggcgccacctcgaacaggagcctcagcttggccttggctgtcggagacgtcacgttggtgaagatgcccttctccttaactatgatctgcatcataaaagatcccatcaaggtaggcatctcatatttctcgtagcaattctgcattcaatttaccggattttgtgacagttctgaactaattaatgacatggctttaggagttccatattagtgggttttgtatgctgatgtcttaaagccaggatgacgtaaacgtttattttattttttttggcagagatttaatatagtaattaggcacatttttggtttaacacatggttctgacagttgcagattttgtggtaagtacctggttgacatcaggaaccattcctccagtgtaacgcaatgtgtacttctccttgacatagtagttgatgagctgagaaggtacattttgcagtcattagacccatgaaaagcaaaaacttcttgacaaatatgatgagaccagtaccaaaagagttgtaccttgtcatattcaggattatcaaatgtagccctcaggttaccaggagagaacattttcccctctccaatggttgtggtgtccttgacatgctgccattttcctgcaatattggttggaagtctgaatacaggttgtatacttagaataacttaattggtagttccaattgttggaacgcggagcaaccttcatcaagaagaaggaattcatgagttccaggacaatctttgagagcgataatgtaagtagtgcgagggccatagatgcccatggcagcagcaacttggtctccaccggtgacgcctgtcagcttgtcaccaggccagacaccaaatatggttccaactgtgaagttcgtgtcgacaatgctggacccatcaagagggtcgaatgctacactgaaaccacctgcaagatgacagcaagacagaaaattcagaggacacgaatctgcagaaggcaaatttttggtatcctttaaatgttttgtaacaccagtttaaacacattttagcaaaattgaattgcaagataaagtgcttaaaacttggggaaggtggtgatgtggtgagttttccccttgctctgcattaagtatataatctctaatagaattgtgcttcattgaaatattatattatttgcacagataaataatcgttcatatatatccaacattgttttcggtttgtgggggaggatggattaccatcgactggtccacccatgtcttgcagctccgggacttcctcggagcacgcatacttgcagacatgagagtattccagagcctacatggagtggtacgttgtacaaataagtcaagtgcaaaagcatgatgcgatatatgcgtcatatagcatacccggatgaatgaatgaataaccattgcaaacttctaagcacctcgaagaggagcttgtcggcgagcatatcgacggcgagctgctcgtcaccgaaggagttgacgcaggcggtgccgccgcacgacgccgtcctgaccttgaacgagatcgtcctcatcgcctcccccatgcagatgagcagcctgatgaggttcttatccggcgtcgccttggtcaggaactcctcctagcaccatagtcagttagtcacacacacatcagcgtaatcttcacatggcatgtgacacacacagttgcacaacttgtatacgcgtgcacgcaccaggctgtccccgatctcgcaccgggtgctgagcgccgcccggctcgccgccttggactgcctcccagacggcagcgacctcgccgtgttaacccgcagcgactcgccgtagaacgtgctcggcggtctagcggccttccatggcattgcaaacacatacgattaatttatgtcaccgcgttgctacatgcaaagtgcaggctatggcaagtggccggccgtgtttccataccttgggcctgtaggactgcgagaaggacatggcggcgcagcacgctggcgagcgcgtcgccgccccgcgggtgtagctggccgcggccaccgtctccatggccggcctagctagttagttaattcgcaggggtgacgccgccggacgagaaaacttaatggcgagggaaagagaggggcaggcagttgctgagcttgatagtgtacaagtttccgtagtacgtttttacgttgccaggcaaagctgctgcggggtgcaccaagcccgggctcgcggatttgggaggacactgggactggaccagataagtcgtgcgacggggtgaagccatgtggcgctggagaagatagagcgtcatggatgcaccacgaccatccgtggtttgtgtggccctgcggggaggatcgctcaaccgctcaggtctgatcacaagttcagcaactgtaaactggactactatctattgggttcgtccgtagcatcagcaacacagtgccatttgcagtttaggtcgggggatgggtacacttcacacactgtgctgtgtaggggtgtgttaattcgcaagtgcaggatttgaacccatcctcctgcacgcaaaacggagcagccttttaacacatgattaattaagtattagctatttatttttcaagaatagattaatttgattttttaagcaactttcgtataaatttttttttgcaaaaaccacgccgtttaatagtttgaaaagcatacgcgtggaaaatgagggagaggggttgggaacatggggttgcaaacacaaccacatgtgaagcagcagacagtcgggcccgcatgttagatccgcacttggactggagagcagagcatcgcacacaaccgccaacgcagccgtcagcgagctcggccaggagcagaccatcgctgacgagttcgatccgtaccatgccagctgtagaccccgattcggagcttgttgccacagacagaccaagagcacgccgtcgacattctccatgagcaaatcgaagaagcaggtccgctgtgagggagatggaaagagagggatcagttccgctgtgtcgttgccgacctggaagtggaaccggcgtcctcgattcagagcactctactgccgtcgagcttctgtgtctggtggagtggtggatacctcatcgccgttgctgctttttcattgaacaatcagagatctgctgtttcgttgaacagacagcattcacaattttggagattgaactgtataggggtagagattattttttttatgaacatatatcattaggatgtactatgagttggatttttcataaaccatacagaatgagttgaacatagcagcctgaatgagtataagacacactatgacacaaactaaccactcatttatttttaccacctaacttcctcttacttggaaggcatggaaagtttcacatgccagatggcattatagtttcaagggacgttcatgaggatgagatgctggggaccggacattcataacaaactaaagaaaccttggcaagcgaataagacaggggttgtggagcaaggcagctgcaatgggcggaatctccaaatgtgggaggaggaggagctgcatcagcaactgttggctcaaaatccagggcaaacctaggtgcgtgcgatgaatggtgtcccaactaggagtgtccagcactggatcgaacaaacgggattagtaagagatggagccaggcatgggtgcgacgaaatcggcgatcaattgcttcaaatgtagccgtgatggccaccaccactcaacatgccctagcccacccctttgctatacatgtcacaatactgggcatctcattacactgtctgatgaaaatatgatgaaaagagatgttaaacagtgtggatttgggattcctcgtcaaggtttctatagtttgcacattgatattttagaggttgagttagctagaacttgagtgagggggatcctaatagtgaatcatggtgaggcttctatccagaaggtggttacatatctgagacacttatttgttggtttgaattgggatatgcaaggtgaaggtgaaccagtatccttattggaattggtctcattaatttcccttctgatgaggtgaggagtaagatttcagcatgtatgagctttcatttggagagtttttcaatcaaggtcaatgtagtggatcacttgtagcttgggaaaaggtttgtaagcctatgaaaaaagttacaatgggaatcattgatctcagggtacagaacaaagctttattacccaaacatttgtacaagttcaattacaaatgcccttatccttcggtgaatttgatttggactacatattactcctcttcagttccacatgctgccagattatgtggtcgaatttggtggaaagatataacgcaatttgatatcattttcaaaggcatgactaaacctattgtggaca

SEQ ID NO: 20815 - DNA, 566 bp, Oryza sativa
tgttactcggtagaatgctcgcaaggtcggctagaaattggcatgagctttctttgaacattgctctgaaagcgggaacgctttctcataaagagtaacagaacgaccgtgtagtgcgactgaagctcgcaataccataagccgtttttgctcacggatatcagaccagtcaacaagtacaatgggcatcgtattgcccgaacagataaagctagcatgccaacggtatacagcgagtcgctctttgtggaggtgacgattacctaacaatcggtcgattcgtttgatgttatgttttgttctcgctttggttggcaggttacggccaagttcggtaagagtgagagttttacagtcaagtaaggcgtggcaagccaacgttaagctgttgagtcgttttaagtgtaattcggggcagaattggtaaagagagtcgtgtaaaatatcgagttcgcacattttgttgtctgattattgatttttggcgaaaccatttgatcatatgacaagatgtgtatctaccttaacttaatgattttgataaaaatcattaggggattcatcag

SEQ ID NO: 20816 - DNA, 719 bp, Oryza sativa
agggcgaattcgagctcggtacccgttttggcatggacatcccagatcactccctgatggcggttgcggggcagttcggacatttgcaatatcagattgcttttatcttgttcttgcttgtttcttcgatttgcttgcaggaatagggttgatctgcaccggcaagatcagcaacccacggagaggtgtatcgatcgctaaggcgcaacacaacgtctcgtacggttgtagtcggatcatcaacgtttctcccaaatcgtagttatcacaactcaccgaaagatcgggccaacaacagccttgagtgtcgagaggaactcagggttcatcactaggtgaaaccccgcgcattgttgtgggaatttagtatgataataataaaaaaataatgtgtaaaatagctagataacatcagattaagtaaataatgtggtttataataatttaaatttaaatagtatgtagaatggtgattcaaacgtaaaaagtaaggtggtatgacttcatggaagaagaaatgaagggagatagtttggaccttagattaatcatctaaaggataaaaacaattgatgtgatatgacttaattagaggaaacaatgagaaagataatttggaccataaattaatcatttaagcactactaagtgaggatgaactatataagtataaatgatatcataaaacataataaagatatacattaaaacattatgtg

SEQ ID NO: 20817 - DNA, 660 bp, Oryza sativa
tgcggctttttttttctttttttttgcacctttctgcctttttttttcactttttttttgattttttttaacaaaaactgactcaaggcccttaatgtaagattacagggactcaaacataaatataaaatttacagggactcaaatgtaaaagtctaaacccaaaattaaaattatacaaaaaatggaatgctgaatttatgccggttccgtttttccaaacagatctcgaaaccgacaccaaacaaaaattcgccaaggtgtttgacacaactcggaaccgtggaagagagggagggagtcggactcggccaaaggggcgagtgggacttggccaggaggtggagtggatggcagccgaatttggtgtatgggataaaaaggaaactgatttttaaccaatccaatctactgtatctttccaaaacaatcttgactacttccaaaatcagatatggtaattcaccttcctcctctcgtgcacgacacaggcacggccaaaacaaacacacacaaggatcggcaaactctagatgcaactcaagaactccaaaactaaccgacagaaacttctggaaactacaaaaatagaaccgtggcagcgagccgattccgttttcgtaggtcccgacaacaacagagacacggtggcagcaacga

SEQ ID NO: 20818 - DNA, 572 bp, Oryza sativa
ttatacaccgactgtacctcataaagatactactcaagatgcggacactcatgacgtagctctggttgaagccgactggcgagagcccttcatacgatttttaacttctcaagagctccctcaagataaagatgaagccgagcggatttcaaggcggagcaaactttatgctatgcatgaagctgagttatataagaaaagcccttcaggaattctgcaacgctgcgtatctttagaggaagggagacaattgctgaaagacatacattctgggatatgcggaaaccatgctgctgcacgcaccattgtcggcaaagcttaccggcagggtttcttttggcctactgcagtgtccgacgccgacaaaattgtgcgcacgtgcgaaggttgccaatttttcgccagacaaattcacttaccagctcaagagttgcaaactatcccgctgtcttggccgtttgcggtttgggggctcgacatggttggcccgtttaaaaaggcagtcggcggttacacgcatctctttgtggccattgataagttttccaagtggattgaagctaacccggttg

SEQ ID NO: 20819 - DNA, 5876 bp, Oryza sativa
atcttagagttagagtttgttagagataagcgtcgtgtccggcaaggacatatcttgtattttgggtataaatatgacccaaacccatgtaatcaattaacaatcgttcaatacaatctcggcgcatcgccacccttttactttcgtttatttcgatgagttcttgctttcgggttgagctgcatcaaatcgatcttcaactagagataaagcttgttatggcggcttacgttctcggggttaatgcttccatctttatgacactttaaccctgtttatgtaatccgtcgagttatcatatacatgttgcaatctatgttagttgccctatataacttgttatcggctggttcttattgttaggaagcaatcggtagagttatgttttattgttaatctagattgtgtcgtgtatctaccatctcttatagattttcacatcttgcttagatctcatagttgtctttatgcttaatgctacatcggttgagttcgatctattgagtagtatttataattatgatatctggctggttttatgatcatctagagagatagtatcggggtttcagccgatcttacctgatttagtcttatgacttacatgcttaattgatatgctaaatagcttgtttttctataaaacccatcttgatttggccttttggctggatcgagatggttggcgactccatatcactgcaagacatttaggtgttgcgattgtgcttgtcgacctgtaaaaaaattgccaacacgatttttggtgactctgctgaggaagatatctattcggctttagaatagccgaatttgcaatctatctgtcagtgtttcgtcaagacgactgtgcggccgaaatcaatctgtacaaattatccactgctgttgcatattttcatcggatcaatttgtttggcggcagtactattcggtcgtcaagtgaaaatcaatataccacactaaatgttgctattgcttcatcgatttctcttctaatcaagtgtttcggccatatagccgaaatcgatctatattgttgcgtggaaacagcaacaagcggccggcagcatctttgctgtacacggtcagaaaattggaatctcaattctattcggtttgctgtgtacaaatttctaaaaaaaaaaaaagaagcaaaaaagatcaggctataccagagccgatctgttcagagtaggcaaaaccgagtctgtttccattagtgcatacattaggcaactgtgttacccaaaaaaaaaagaaagaaaaatcaaagccgatttacatcggctgtgaaaagttccaaatttttgctgctacacaaaattccttctgttacgtgtacacatcaagtataccaaggaaatttagagaccgtacattaatctattcggtcaacgattttggctatgagctatatggctaaaattaatcaagaaatttcttcatcaaccatgatgagcgggaacgagatcgataattaaggttacatcggaggatcttgatgaggagcaacgtcaagtcatggaggagcggatcaaggtgattacacaagagatgttgatgagatcatgcattaggacccgtcaaggtgtggttctcaagcctagtcctcctctcaaatttaaggtaacctccaattcacccaacccatctattgctattcaaaatgttaatgatcgttgtgtagatgcatctgctacttctagttttgcttctgtacagtatgcctataatgctatggagggatcaatgggtgtttatacaaccgattgcacaggaatcggctataagcagaacctatatgatggtgtaactggtcgtaacaccggtgtaaccgcatcctacgacggtcaggctgtgtctaccatggccggtcagactgtgtactaccatagccagtcagaccatgccctatcctggccagatcgggcctcctgtggccggtctgaccgtaccactgaccaccggtcagaccggaccatgggccgatcagacagggtgctcggctggtcagaacggactatctatagccggtcagaccggttccctggaaatttctccaggttttcataccacgactaccaatacttactttaattattactcatcacatgttagtactgttagtcatgctgctccacatatccataatgtttacaatgatcctaataggggatatcctcctgacactaggtatggccaatataatcatattgcgccgcaacaaccacctcttaggccactaaactcaccaccaaatccacataggcctgaaaatatggagaagttgattagtatcattattagggataaatttgggattaaagcaaggaatcgtgttagggtgtaccaaaagctgtatcctgattattatgacaatatctcgtatcctcgtggttatagagttcccaaatttaccaagtttagtggtgaggatagtaggaccacatgggagcatgtaggccaatttttagcgcaatgtagtgaggctagtagtacggatacatataaattgtgcttattttctttatctttgtccggtactgcttttacatggtttacttctttaccggcaaattctatttatacttgggctcaattagaacaaaaatttcatgattatttttgcactagtagaactgagcttaggttgtctgatttaacatcagttaggcacaaatacaattaatctattgctgattatattgagaggtttagagatattaaaagccgatgttatagtttgaatataactaaaaaggatttggcggacattgcatatgatgaattgcttgattctattcaagagagattgaatggccagatatttcttaatgttgatcatgtgttgcatgaagctctagctcaggaaagctgagtggatgacaatagcttaaatgctagtttagatgatagtgcagtatcatgcatagccgaaccaagcgatggtttggattgtgttaataatttgtgcaatgatgccgtaacgagtatagccgaactaagtgttggttcggattgtattgctggtttagacaatgacaccattgagagtataaccgaactaaatgacggtttggattgtatcacaagcgaaagtgaaatagcattgtcacctaataccgaatcacaaatcgatcatgtggatgttggaaaagatgatgacagtgtcttgcgggacagtagtgaaatagaatccaaagtacctatgcatacatatcaaaggccgtatcctgaacatgtagatttggtcccatacctgcaaggatttgaggtgcccaacttcacaaaattcacatgtgagaatgctatgactacaatggagcatatcggccgctttattgatcaatgtggtaaggacggtagtaatgatttgtttaagttgaagttgtttcccctttctttgtcaaactttgcatctacatggtatagtttatttgctcctaattcaatttctacatggtcacaaatgaagcatgagtttcataattatttcaaagatgcaagcttgatggagcaaagaccgattgatgattcatcggtcacttgtgaaactattccggttacacctatgcctaagaccagaattgttagtaatcctctccctattagtcctattgattctgacaacaaagaagtgttgattcggcctagtcaagccgaatccacgaaagggaaaaatgttattattagggatcctcggcccgagacaattaggatcaatgatgctaaggccaaagattgtagagttacaaaagataaatcatctagttcccaaaagactaaaaagccgaagctcacttttgagatgcttatggctaagtacgagaaaggattagcgagtcaacgatttcataatcaaattagtgattcaaaaagaccaagatcatctcgcaggaagagatttggtcaatcaccaaagcaatcgaagccatcaattataccaactccatacaaacttccggttgtgatgccatcgtatccatatccaatctcactatatggttatccttttatgtattacatgccgtggatgcatcaaccacctatgcagtattatcaagagtggaaggaatcacctaggtcagtaccaactaattcatctaattcaagacaagaccgtttctcacaaaagaatcggtccggtggatcaaaggtgaaaaaagggaagaaggtatgggtgaggaaagaagccaaagctccggaggtcgtttctatcaaggaagagtttcaagatgttgaagtacgtactggagatgcggtggaaaccatacaagcaaaggagattgaagccaacaccgtgattgtcaaaagcggaggtctgaccgaggcgtctggccggtctgaccgccaacctatggtcagtctggccgaccctactggccggtctgaccgggcctagaggccggtctgactggggggcattggagaagagtgggaaaattgagagcaacacaggagctcccacttcgattaaaaatatcaagaatcatcatttgactcttggaagacaaccacagccgaagtggataccttccggattatctcgctctcaaaagaggaggctacagtgtcttcgagccatagttcaaaaagaaaaggaggccatagatgtagagaacaaaacatgtaacaatttagagcctcgaaagacacttaagtgagtatggagacctaaagaagtaaaagttaaaagaccggtgatttcccatagtagtgataaatccaatttcatgagagaagaatcatcgatcattagagataagtctccttcacatgatgctatgggtctaagtgcggtatccatcttgccttcgaaatcacgcaatctagaaagccgattttgcttggggggtaagacattaatatgctcatgaagaaatcaagagagatgaacggcgatggatacaacatcacatctttgagccgtcgttcgttggatgctaaggcaaggtatgggtttatggtgttcatcgttatattatatgcctatgccatgttagaacattgcttgatatttagcacatgtgtgtttttctcttatcaaattgatattatgcatacatgttgcaaatacctgttctaagtagtggaattgctaagtctgcatataatttgttcaaaatatgatttaggtcttgagtctttgatatttatttaaagccaaatcacatgtgtttttatggatcaccatataatatatagatttcatatttattgcaccatgaaggttttgcttattagtaattcggcaaatgtcaatggtcaatttgatgatttgttctagagttgttttctttagggacattggccttgttaatattttgcatacatgctcaagtcgattacttccatttgtagtttattggaatctatgcatgtgtcacatatgactttggtcattcattattgatcatatttcaattgggtaagtgttttgatgccatgttgattattgtttcaaaagccacttgaattagtattcatctagacatatccgttggatgttgtaatttttcatatgtctagaaagaataaattttggtccaataatttgatacaccaagcatctgggtgtaatatgaagaaaggagtatttttgatactagaaaagtcggtgcttgattttaaatctttgggcaacattggcagaatcacagaccaagggcgatctgaccggcattgcacggccggtctgaccggctctgcatggccggtctgaccaggcagatggggcagtctgaccggcattgcatggccggtctgaccaatcctagacagaaagctggggggcacaaaacaattgatttagaggccgaatttgttgtaaattcggacatttgtgcccaagagttagaagaaagcgggtgaat

SEQ ID NO: 20820 - DNA, 2003 bp, Oryza sativa
attgcttaggagagcggggtttcattggccgaaaataattgatgattgtttctagtgctacagagggagtgaagcttgtcaacggatcggcaatgttcaattggcgcatgccgctgtattgaatcctatcatcaaaccatagccgttccgaggttgggctttggatttcattggtcaaatttatccttcatcatcaaaaggtcattggttcgtgctagttgcaatggattacttcactaagttggccgaagccatgctgctcgagaatattacttgcacggaggtaattgactttattctgaagcatgttgttcatagattcggtattccttaaactttgatcaagaagcttcttttatgtccaaagaggtgagaagttttgccgaattttatgatattaagttgttgagttcttctccttactacgctcaggctaatggataagctgagtctagtaataagatattgttgaaattagtcaagagggagattgaagaacactcaaataagtggcatgaggtgctttctgaagcattatggactcattggatatctaaacatggtgctaccaaagtcactccttttgagttggtttatggacaaaaggctgttctatcaattgaggtaaatcttggctctcttcggtatttcaagcaagacgatttgttggttgaagattacaagaccttgatgggaggcaattattaagacgtcatcgacaagcgtttgaagattttgaaagagatggaggcacttcaagacggtgttttcagagagtaatccatgggagatacatgaaaacaaatactttcctagcgtttggcaagatggttaggaggtcctatggcaggtaattggattttcgccctaagacaacatgttctatgcttttagattcacgatgttcatcaaaaaggcagaagggcagtgtttacacccaaatttggtacctatggacgaaatagaggaaaattgccaaagtttggaaagtgtcgggttcccttcacagggccggtcagaccacaggtatgtgggcggtctgaccggctagtagggccggtctaaccgcaggtatggggccggtcagaccgtcagggtccgagtctgagtttgttttcgttgggtctcgggtttccttactcgggaaggcatgtttcgggtttcttttggtttctatcccgagttggatgtagagaagggcctgtagagggtaagaccaacccctatttaagggacaatgccggttcattgtaatcccccgaatataatctacttgaatcattcttttaccatgttttctattttaccctagttttagtccatctttgtcgatttgcgctgaaaatcgtctgccgctactgtgagagtgtcacacctctttgttggtttgtcctaaaaaccttccgttttgcccacgagatgggtagttatcctcatatcgatttaaattggcctagaggctgattttgatttctaaatcggctccgctagccggtttagcttgtttttctacaaaacctatcttgatttggccttttggctagatcgaggtggttggcgactccatatcaccgcaaggcgtttaggtgttgcgatcgtgcttgtcgacttgtcacaaaaagttgccaactacgctacgcccacccactttctctagcaccaacagccccgtggatgccctggactggttgcatgcaagaaagaagttggataccgttcagtgcacggatgaagagaaagttgcctttgccggtcatcagcttcaggggcgcatcggagtggtgggacgacttcctggccacccaaccagccggacagtctatctcttgtgctcattttaccacagcattccgaaggactcatggagttttgggagctgaggcatggcaatcgctccatcgtggagtatgttgatatttcttaacaacattactagaaatataattctcagcaatgacgtagaaatattcatggtatatttatggtcgcagatatgatccgca

SEQ ID NO: 20821 - DNA, 2996 bp, Oryza sativa
acgtagaaatattcatggtatatttatggtcgcagatatgatccgcaagcgcgcggatataccattgtagcatttcacccaggagtattccaaggtatcgtattattttaatcccaagggaagatatgataagagagtactatgctaatagtttatatattacttgtatacatgaaagtctatgtaggggttaagtgattcaaaggataggtgacacacaaaagaaagaacaaagatactctcactaatataaatactaagctaagtggagaaagaataagaaaagaattcattgctatacctctagtatacatacacacatttagtctacacttgctaatatacagtcatgcaaccaataccccctaacagtgtcatcctggtgtttcaagagaccacccctggttgcctagttccttacgacaacctgtcatggccatccaacctgggcaaaatacggaggagtaccctccccaagaaattgcacttaggattatatatacgcgcggaggaatacccgtactgagctgtcatcatcagttgcctacctcgacgtatccgcagcatataaccccaattaatgatacttaagaatctagacaccatgtctacattattaaatactactctacatccatgcatccgacatagagcaaccgaatactcggacactaaacccacaccattacacctctctggtaagctagttacacaactatatcgatacaagtataaagtaaagtcggtactaagaaaatataaatggaataacataccgaagatgtataaagaagaatattctattaatttaataagtcataccaaagaagagagaaaagctactagagccatacccgaattctcctgaagactcgaggactaagattgctattctaattcctactccactagcactagtgtacaactaaacttgagagagggagagagctctttttctttagtatgtgtgggaatgaatgagaggaggggtatttataggctatgaggtgccctgggagagtggagatgctcaaggtatccaacgagcatctttgctctcctcatgacaagtggcatgctcaagcatccaaagagcatctttcaccctcctcttcacaagtgtccacttccatgacggtttctaccggtagaattgctcccaaccgtcataagatacccgtagataattgccggtgaaaaataggctagattgggccagctaggggttcggccgaacccctggttggctcccctggcccacagccttcttcaggatgctgacatgtgggccccactttatggtacaccatgttttggctcagaatgattgctcattttatatgttgtagctcaaaaccaagtgggtccattagtgcaaaatatattcacattcttcatgttcattctctcccaactttgatggttgatcacctctcgatggcttccgattgattgttcgttttttttttccgtcgattctcctccatttatgcgtgcttctcctgcatacatgttagtagcatagcacatagtggaagtagatattttatttggaaattatgcattgcaagcataactagtcttcattaattgggtaatattgacgatcgaaactggtcgataacgaccgtcagcaagcttgttccactctagatcggtcatcaaccatcttgtagtcatagaactgttccatgacatacaactcgctggcagcatcggagagtcaaaagttagcctcaagagcatcccacatgtcgttccctgaatgcatgtgtatgtacacgtccactatgttgtcagctagtatactgatcaattttccacggaacaggcaacccacagcctcgaacttagcctccttctcaggagagaaaggtggtttgctcggtttgccctatgaaacaaagaagcaccgcatagccgtcaaccacagtagtgcacgtgctttccatcttttatagtttgaaccatactcggagaacactccagtgctggatgaggctttttcggtgttgttgtctccgttggtgtggtcgttctcacttctaatcccgctgccggtacgtcctctgttgacgcgtcctcaagtcaacatggtgtagtggaagcagatgtagcagtgcagaaccgttgtcgatgcagaggaagcagatgtgtcgcagagcagtcgcaccggaagacgctctcaaaaacttaatcacctgcatacccgtgtaggtacacaagcggatggagtttcggaggcatgcttgtcccaaatatattttttaattctaatgctacaaaagcactccatcaatactaggtggaacgaagaccaggtcaccgtgatataattgccacgtcagtgaaaccgtcctccaaaaccatcgagtgaatcaaattgcatcggctttaaaagttatggtgttaagatatatgattgtcacgaccggaaataacctaacgggcgttccttacgtgcgtgcattattccttgtcccaggaggcaaggtacaccaaaagttgatacagttcagagtttaacaagcggaagcgtaaatagctaatttattacatggacggcgaaggcccagcacacacaaagacaaacgggaaacagcggaagactagggcgacgaccacaggcgcttgacggcaggcacgagctagacaccaaagccttcatcttccaggaactcctcttctgagtttgggaaaaattgagcaagactgagtacaaccaccgtactcaacaagacacacccacaagtgcagaataaatgcaagggagtacaagggagttataatataaagggttagggtttgcagtaaacagcattaaaagtcacttagttgctcaaagctattttgtaaacacggtcctagagctatacaatattattaatcaaggccatgaacccacacgaacctgccttaacccaggcctacgatgattcagaccgaactggcaacccgaccctgggccagctcgtcccagccaaccaggccaacca

SEQ ID NO: 20822 - DNA, 4766 bp, Oryza sativa
gcgaagtccgctcgggagagccagagaggatcactgcagtgacctcccaaccagcgtggggctctgcatcgtcaccctcctgctccggaagcggcctggcctggtagtccactccatgtggataccctaggaccacgcacatgccccgcagctccaagacgaagccagtcatgtccaaaccacgacgggtgacgctgccggccatctacaaacaaaaaaacagaaagaaaaaccacattttaaaggtcagattttggcgataaatgaagcagcaagacagagagagactagacagttttcacaaataacaaaggatttttatttttgaaaatattgctaaggcttgggatctacggctcgtcctagggtcaagggggctctgataccaacttgtcacgaccggaaataacccaacgggcgttccttacgtgcgtgcattaatccttgtcccaggaggcaaggtgcaccaaaagttgatacaattcagagtttaacaagcggaagcgtaaataattaatttattacacgggcagcgaaggcccagcacacacaaagacaaacgagaaacagcggaagactagggcgacgaccacaggcacttgacggcaggcacgagctagacaccgaagccttcatcctccaggaactcctcttctgagtttgggaaaaattgagcaagactgagtacaaccaccatactcaacaagacacacccacaagtgcagaataaatgcaagggagtacaaaggagttatactataaagggttagggttgcagtaaacagcatttaaagacattagttgctcagggctattttgcaaacacgattctagtactatgcaatattattcatcaaggccatgaacccacacgaacctgccttaacccaaggcctacgatgattcagaccgaactggcaacccgaacctgggtcccagcttgtcccaagccaacccaggccaaccattacacattttagttgttaggcaggttttaagaattaaaacactaacttgggtacattgctcagcttgcccataaccgagggcgcggctattcgaatagattatactctgatcagaggtgtacatctttacccacaagacacatcttcctcacgtgtaaccacgtgccacataccaccacggtatacggacggaagacgtgacatagtttccaacccatcctagccatagacaagagtaccgacccaaccccacctacggccggaaccccgggacaggtaggcaggactgagcccctagcagcaggacaccggccctgtgccatgacatctcgactaccgggctgcagctcgtgtagccttcatttgtcctagagatgtccatcgacccccgacttcgtccatctccatccgtgtacttttgtttatgaccagactgagccacaaactaagccttacccactagacatgtggaagtacggtagtgctttgcaacagaggcccgaagaccggtccttatatggccgaggtgctactatcaaaaccatgcaccccgagtccagcctaaaaccatttttaggattttgaatagagggggaggtgtgaatccaattccacaataatccaacaattccatagtgtccaggtgatgagaatatccccaaggtctagagttgtaaaaccacctaatgttgcctaattaaccagcgaagtatctacctaaaatcatactagtggtaccatgagtagagtgtccactagttggggttttgtttaatctagggtgaacaaggtaataatatcaataacaataataataaggtcataacaaaggtaaataggcatggctaaataaaacagtgataacgcgggaatttaaataaagcggtaatgcaataatttaaatcaaaataattttataaactgggattcaatatgttcaaggatgatgtgacttgccttgctcgctttcccaaacgtcggcttcaacctccacgaagagctgatcttccgaagctgcagcgtctacacgaccaacggaaaagaaaaggcttttactctaataaactccatataacaagcaggaacaaagcacaaaaatgggttcttgacttcttaaggaaaaattagagacttgaacggtccaattccgagttcaaatggccaagttatggtcatttgaagtttatatgctctttaaatgaatatttgcgaatttcttcatttaaattttaatttaaaatggatttattgcgtcagccgaggggaggggcgcgcggaccgggtccacgggagtggggcccacgcggcagcctcacggtccacggtggaccgggcgcacccgggctcgcaccggccggcgccgtgagtcccacgcgtcagccgcacctaagggcgcgggcggctgacagccgggccccacacggcagccgcggggcgcgcccgaaggcggccacgccggacagccgacgggaggcggcgcgcccacgcccctatggtcgccggcggcggccataggtacggcggagcggcggccgagagaggggagggaagggggaaacgaatcggcggtccacggctcaccccgggtcgacggcgacgacgggaacggcgaccggagcggaggaaggcggcggcgcggctcgggtggacggggtcgacggcgctccggcggtcggcgaccaaaacggagaggtggacgaggtcggcgaggatgcggcgaagccaaagcaggcggcgccgaggtgggaggtggtccggggcgacaacggcggcggaccggagctcggcggcgacggcggagagagagcgacggcgcgagctcgattccggcaaggagagagggcggcgagaggcggaaactgacggaggaggagcggggagggtttaaatagagccgggtcgagagagggtggccggggaagggaggaaaccggcgcgggaggtccggccgccatcaatggcgccggcgagatttgcgggggcaaatccgcccgtttgaacgcgagagagagaggggaaaatggggggaaagggagaggggatcacggggagtgatttccccctctttattgcacgtggaggcggtgggagcggcgggaggaaggggatgacgggtgggccccacccgtcagcgagggtggcgggcgggcccgcccgtcagtggcgcgcgcgcggggagaggccggatgggccgcggggagaggagagggagggggagggagatgggccgagccggcccaagagggagagggagggaaaggggactttttatagtttttctttttataaaaccattttaactttgtttatttcttaataattgttatttgtgctctgaaaattccactaaaatttatttacgcattttaggcttttaggaaatatacaaaaatcctccaagccttatttgacttttaactttgcacattttaattgttggaggctttcacacggattttaattattcttggcataatttagaggatgtattttagagtcgttttgggacgtgacaaacctaccccccttaaacggaatctcgaccccgagattcggaagaactgccgaagagattgggatgggctgccttcagctcgtcttcacgctcccaagtagcttcttcctcggcgtggttgctccattggaccttgcaaaaacggattacccggttcctggtcctgcgctccatggtgtccaagattctcactggtctctccacgtaggtcaagtcttcgcgaacttcaatctgctctgagtcggcctgctcgggcggcactcgaaggcatttcttgagttgcgacacatggaacacatcatgcacgttgcccaaggaggcgggcagctccaactggtaagcaacttctccgcgtacccagctcttcttggagcttcttccaaaagtgagaggtgaattggcttcccctatcagatacaattttcttaggaacgccatggagactcacgatcctagcgaagtagagctcggctagtttgttccctccataggtggtcttcacatgaataaaccgagccaccttggttagtcgatccacgactacccatatagaatcataaccgccctgggtttttggaagtccggtgatgaaatccatcccaatttcatcccatttccattctggtacttggagaggttggagaagtccggccggtcgttggtgctctgccttgacacgctggcacacatcacaaagggccactaactctgcaatttcccgcttcatactaacccaccagtatttctccttcaagtctaagtacatcttcgtactgccagggtggatggaataaggactttcgtgagcttcctgtagtatcagctgtttaagttctctgttatctggaacgcatactcgatttccgttccatagggttccgtgttcatcctctgtgaaaccagcggctttaccttgtttcatattcttgaggagtccatgcatgtccggatcattcttctgagcctcgcggatttgatcgagcaaggtaggcttggcttccaacgcagccaagaatccgcgaccaactatgcttaggttcagggcttccatctgttgactaagttcgagtggaatgccacggacgttaagagtgttgcaatggctttttcgacttagagcgtcggcgaccacgttggccttaccaggatgatagtgaattcccacatcataatccttgatgagttctaaccatctcctttgccgaagattcaggtcggactgagtgaagatgtatttcaaactcttatgatcagtatatatttcacagcgattcccaatgaga

SEQ ID NO: 20823 - DNA, 1085 bp, Oryza sativa
aaagagatgggccgagccggcccaagagggggaggggggggggaaaaaggactttttagagcttttctttttataaaaccattttaactttgtttatttcttaataattattatttgtgctctgaaaattccactaaaatttatttacgcattttaggcttttaggaaatatacaaaagccctcgaagccttatttgacttttaactttgcacattttaattgttggaggctttcacatggattttaattattctaggcataatttcgaggatgtattttagagtcgttttgagacgcgacaaacctaccccccttaaacggaatctcgaccccgagattcggaaaaactggcgaagagatcgggatgggctgccttcagctcgtcttcacgctcccaggtagcttcttcctcggcgtggttgctccattggaccttgcaaaaacggattacccggttcctggtcctgcgctccatggtgtccaggattttcactggcctctccacgtaggtcaagtcttcgcgaacttcaatttgctctgagtcggtctgctcggacggcacccgaagacatttcttgagttgtgacacatggaacacatcatgcacgttgcccaaggaggcggacagctccaactggtaagcgacttctccgcgtcgggtaatgatactgaaaggacccacaaaccgaggtgcgagcttcccttttgtctgaaacctgtgtacacctcgcaatggcgtgactcgaaggtacacaaaatcgtccactgcgaattccaggttacggcgacggttatctgcataacttttctgccgggactgtgccacctttagattatcccgaatggttctgaccttcgcttcagcttctctcaggatatcagtcccgaacacttgactttccccaacttggtcccacaagagcggtgtccggcatttgcgcccatacaacgcttcataaggtgccatttgtatactggcttggtagctgttattgtaggagaactcggcataggggagactcttatcccaggtcttcccgaaatctaggacacatgcgcgaagcatatcttctaggatctaatt

SEQ ID NO: 20824 - DNA, 1476 bp, Oryza sativa
tggcttccaacgcagccaagaatccgcgaccaactatgcttaggttcagggcttccatctgttgactaagttcgagtggaatgccacggacgttaagagtgttgcaatggctttttcgacttagagcgtcggcgaccacgttggccttaccaggatgatagtgaattcccacatcataatccttgatgagttctaaccatctcctttgccgaagattcaggtcggactgagtgaagatgtatttcaaactcttatgatcagtatatatttcacagcgattcccaatgagatagtgccgccagatttttagagcatgaaccaccgcggctaactccaaatcatgggtagggtagttgccttcatgaggccgtagctggcgtgaggcataggccaccacatgaccatcctgcatgagcacgcaccccaatccttggcgcgaagcatcacaatacaccatgaagtccttgcgagtatccggcaagattaacactggcgaggaaaccagcttttctttgagagtttggaacgccttctcgcattgcgggctccacacaaatttctcttctttcttcaacaactgtgtcatgggtcgagcgattttggagaagttctcgatgaacctccggtagtatcctgccaaacctaagaaactgcgaatttgagtgactgtcttgggttgcttccaatcagtgacggcggtcactgtttcggggtccacagcgactcctttagcagatatcacgtgccctaagaatttgacttcggacaaccagaactcacacttgctaagtttggcatacaattgatgttcccgcaactttcccaacaccagacggagatggtgctgatggtcttcctctgattgtgagtataccagaatgtcatcaatgaaaaccacaacaaacttatccaagtattccatgaacactttgttcattaagttcatgaagaaggcaggtgcgttggttaaaccgaatgacatcactgtgaattcatacagtccgtatcgcgtggtgaatgcggtcttcggaatatcttcttcacgaatacgtaattggtgatatccggaacgaagatcaatcttggagaatacagtggcacctttaagctgatcgaacagatcatcgatccggggaagagggtacttgtttttgatggtgacttcattgagagctctgtagtcaacgcacatcctcttcgtcttgtctttcttctccacaaaaatcacaggagcaccccagggggaagtactcggacgtatataccccttttctttcaactcttccaactgtttcttgacttcggccagttcatttgctgccatacggtagggtcgcttgtacagaggagtggttcctggagcaagatctatccggaactcaatctctcgtttgggcggcataccgggtagttcttccggaaacacgtctccgaactctctgacagatgggatttctgacagtcctatctgatgaa

SEQ ID NO: 20825 - DNA, 1502 bp, Oryza sativa
aaaaaggaatcccctgaatttctatagggacggcaggactataatactttgctgtcataacccctccaggggtggtgatgaccagagggttcctaagcctttctacccccaactgatttctccccacgaatggcacagatataaacgagtgggatgctccagagtcgaacagaatggtagcagggatggaatgaatgaggaacgtaccaacgatgacgtctggagttgtcagcacgtcctcggccgtcacgtggttcacccgaccccgaatgacatccttcccaccgttgttggagcggggaggcgcttggccttgctgacgcctcggctttgggcatttatccgcaaagtgcccgggctcgaagcagttgaagcacagacgctgcggaccttgagcgtccctgcggccttgaccaggctgcacagttggcgtaggaggacggggcgcacgagtcccttgttgattctgctgctgctgcggctgtgggacgcgcaccacgaattgaggtcgaggcgcggagcgaggttgctgctgctgttgttgctgttgcgaggaggatccccctggatagggattggtgtagcggaccctttggttagcaccctgttgattgcggaaattcgccaagcggcgcttgtgcgactccagttccttgtgcttggcttccaagcggatgctcttgtccactagacgttggaaatccggatagtccccggagactagacggacggacagctcagggtccattcctgccaagaacttctcttgcttctcctcatcttcccgcacatcctccggggcgtaacgggccaggttgttgaactcatgcaaatactccatcacggagcggttgccttgcttcaactctcggaattctcttttcttaagggccacgactccggcgggcacatgggttctccggaaagcggcggtgaaacgggcccaagtaataggttgcccttctggctgcgtagcctggaaatggtcccaccatagagatgcgggtccctgcagctggtgggcggcgaagatgactttctcctcatcgctgcactgcacagtgtctagctttttccccacagcatgcaaccaatccaacgcgtccacggggttgttggagctagagaaggtaggtgggcggatgcggaggaactcggcgagtttagagtgttgtgggggtggtggtggagcattatgttgtggcggattttggaggtggtggaggaaagcagtcatcatgttggcctgctgggcgaggatttgggtgagaatggcgttggtgtctggtggtggtggtggaggcggaggaggaggtggaggtgggctgccctggtggtggtggttgctgccttcaggttggttgccatcaccggggttagcacttctcctggtcatcaccatctgaaacccccacacaagaaccagcatacagagagagctgacaatttaagcttaaccacccacgactaccataattcttgaatttattactgctattaaa

SEQ ID NO: 20826 - DNA, 6981 bp, Oryza sativa
gtatcctgccaaacctaagaaactgcgaatttgagtgactgtcttgggttgcttccaatcagtgacggcggtcactgtttcggggtccacagcaactcctttagcagatatcacgtgccctaagaatttgacttcggacaaccagaactcacacttgctaagtttggcatacaattgatgttcccgcaacttccccaacaccagacggagatggtgctgatggtcttcctctgattgtgagtataccagaatgtcatcaatgaaaaccacaacaaacttatccaagtattccatgaacatttgttcattaagttcatgaagaaagcaggagcattggttaaaccgaatgacatcatggtgaattcatacagtccgtatcgcgtggtgaatgcagtcttcggaatatctttttcacggatgcgcaactggtgatatccggaacgaagatcaatcttggagaataccgtggcacctttaagctgatcgaacagatcatcgatccggggaagagggtacttgtttttgatggtgacttcattgagagctctgtagtcaacgcacatcctcttcgtcttgtctttcttctccacaaaaatcacaggagcaccccagggggaagtactcggacgtatataccccttttctttcaactcttccaactgtttcttaacttcggccagttcatttgctgccatatggtagggtcgcttgtacagaggagtggttcctggagcaagatctatccggaactcaatctctcgtttgggcggcataccgggtagttcttccggaaacacgtctccgaactctctgacgatggggatttctgacagtcctatctgatgaagttctgaactactgacagaggttgggggtgcaaagaaaacaaccggttgttccggccctcggtacagagtgacagtgcgtcttgcacaatccactactccttggaattgagccaaccaattcatcccaaggatcacatccaagttcttggtgtctagaagaatcagatccgagggaaaaggaatcccctgaatttctatagggacagcagggctataatactttgctgtcataacccctccaggggtggtgatgagcagagggttcctaagcctttctacccccaactgatttctccccacgaatggcacagatataaacgagtgggaagctccagagtcgaacaaaatggtagcagggatggaatgaatgaggaacgtaccaacgatgacgtctggagttgtcagcacgtcctcggccgtcacgtggttcacacgaccccgattgacatccttaccaccgttgttggggcggggaggcgcttggccttgctggcgcctcggctttgggcatttatccgcaaagtgcccaggctcgaagtagttgaagcacagacgctgcggacctggagcgtccctgcggccttgaccaggctgcacagctggcgtaggaggacggggcgcacgagtcccttgctgactctgctgttgctgcggctgtgggacgcgcaccacgaattgaggtcggggcgcggagcggggttgctgctgctgttgctgctgctgtgaggaggatccccctggatagggattggtgtagcggaccctttggttagccccctgttggttgcggaaactcgccaagcgacgcttgtgcgactctagttccttgtgcttggcttccaagcggatgctcttgtccaccagacgttggaaatcctgatagtccccggagactagacgcacggacagctcagggtccatacctgccaagaacttctcttgcttctcctcatcttcacgaacatcctccggggcgtactgggccaagttgttaaactcatgcaaatactccatcacgaagcggttgccttgcttcaactctcggaattcccttttcttaagggccatgactccggcgggcacatgggtcctccggaaggcggcggtgaagcgggcccaagtaataggctgcccctctggctgcgtagcctggaaatggtcccaccatagagatgcgggcccctgcagttggtgggcggcgaagacgactttctcctcatcgctgcactgcacggtgtctagctttttccccacggcatgcaaccaatccaacgcatccacggggttgttggagctagagaaggtaagtggacggatgcggaggaactcggcgagtttagagtgttgtgggggtggtggtggagcattctgttgtggcggattttggaggtggtggaggaaagcagtcatcatgttggcctgctgggcgaggatttgggtgagaatggcgttggtgtctggttgtggtggaggcggaggaggaggtggaggtgggctgccatcgttgttgtggttgctgcctttgggttggttgccatcaccggtggcagcacttctcctggtcgtcaccatctgaaaaccccacacagaaccagcaaacagagagagctgacaattaaagctaaccacccacgactaccataattcttgaatttattactgctattaaattggttcattaaagttcaagttgcttaagcaaataaaataaagacaggctccgacacagttacaccacagaccggcataaccgtgccccacacaacccaacaagaagacaaacgagaaagaacacacgcgcaagcctactaactgctcgtctaccgctgcgacgggccaggacggaaggtgagcaacagcgcatcctccgtgctaccaacgccggaggcttccccctcctggggaaccacgggcgcgggctcggcacgaggggtctcgacgaagcaagtccacgccagggactgacgaacaagctcgggcctggaggtgctcttgcgggcggtgatcttctggctgcggcagacacggcggcgcttggggcggcagacctctccctgggcgatcttgagctgatgcagctgcgcctccaccacgtctaggtccttcttcagctgcagattctcctgacgcagctccaggatcttcatgttgttcttgaccatcccacggcgcaccatctgatggaagtcgatacgggccgcgtcgtacgcctccaccatgcgcgccaggtgcatgatggtagcgtcatcctccgagctagcatcccggaagatggcgtaatcgcgggctcctccgcggcgagggtggtagcggtagggcgagtgctgcaactcgtccgggtagcgctggtgaagtgtgccgatggcgaggagtgcggcgttctggcaagcggcggagaaagaatctccacctgcggtgactgccaacgaagtcctctcgggtgagccagtgaggatcactgcagtaacctcccaagcagcgtggcgctctgcatcgtcaccctcctgctccgggagctgcctgccctggtagtccactccatgcggataccccaggacaacgcacatgccccgcagctccaaaacgaagccagtcaggtccagaccacggcggttgatgctgccggccatctacaaacaaaaacaaaaagaaaagcaacattttaaaggtcagattttgacgataaatgaagcagcaggacagagagagactagaggattttcacaaataacaaaagatttttatttcgaaaatattgctaaggcttgggatctaaggctcgtcctagggtcaagggggctctgataccaacttgtcacgaccagaattaacccaacgggcgttccttacgtgcgtgtattattccttgtcccaggaggcaaggtacaccaaaagttgatacatttcagagtttatcaagcggaagcgtaaatagttaatttattacatgggcgacgaaggcccagcacacacaaagacaaacgggaaacagcggaagactagggcgacgaccacaggcgcttgacggcaggcacgagctagacaccaaaaccttcatcttccagaggctcctcttctgggtttgggaaaaattgagcaagactgagtacaaccaccgtactcaacaagacacacccacaagtgcagaataaatgcaagggagtacaagggaattataatataaaggattagggtttgcagtaaacagcattaaaagacattttgttgctcaaagctgttttgtaaacacgattctagaactatacattattatttatcaaggccgtgaacccacacgaacctgccttaacccaaggcctacgatgattcagaccgaactggcactccgaccctgggtcccagctcgtcccaagccaacccaggccaaccattccacattttagttgttaagcaggttttaagaattaaaacactaacttgggtacattgctcggcttgcccataaccgagggcgcggctattcgaatagattatactctgatcagaggtgtacatctttacccacaagacacatcttcctcacgtgtaaccacgtgccacataccaccacggtatacagacggaagacgtgacatagtttccaacccatcctagccatagacaagagtaccgacccaatcccacctacggccggaacccccgggataggtaggcaggactgagcccctagcagcaggacaccggccctgtgccatgacatctcgactaccgggctgcagctcgtgtagccttcatttgtcctagagatgtccatcgacccccgacttcttccatctccatccgtgtacttttgtttataaccagactgagccacaaactaagccttacccactagacatgtggaagtacggtagtgctttgcaacagaggcccgaagaccggtccttatatggccgaggtgctactatcaaaaccatgcaccccgagcccagcctaaaaccattttggggattttgaatagaaggagcggtgtgaagccaattccacaataaccaaaccattccatagtgtccaggtgatatgaatattcccaaagtctagagttgtaaaatcgcctaaggttacctaattaaaagcgaagcatccacctaaaatcatactagtgataccatgagtagagtgtccactagttggggttttgtttattctagggtgaacaaggtaataacaacaataacaataataaggtcataacaaaggtaaataggcatggctaaataaaacagtgataacgcgggaatttaaataaagcgataatgcaataagttaaatcaatataattttacaaactgggattcaatatgttcaaagatgatgtgacttgcctttctcgctttcccaaacgccggcttcaacttccacgaagagcggatcttccgaagctgcagcgtctacacgaccaacggaaaagaaacggcttttactctactaaactccatataacaagcagaaacaaagcacaaaaatgggttcttggcttcttaaggaaaaattagagacttgaacggtccaattccgagttcaaatggccaagttatggccatttgaagcttatatgctctttaaatggatatttacgaatttcttcatttaaattttgatttaaaatcggatttattgcgttagccgaggggaggggcgcgcggaccgggtccacgggagtggggcccacgcggcagcctcacggtccacggtggaccgggtgcacgcggcttacgccgggcggcgccgtgggtcccacgtgtcagccgtacccgcgggcgcgggcggctgacggccgggccccacatggcagccgcggggcgcgcccgaaggcggcctcgccggcacagccgacgggaggcgacgcgcccgcgccccgatggtcgccgccggcgaccaccggcgcggcggagcggcgcccgagagaggggagggaagggggaagcgaaacggcggtccacggctcaccccgggtcgacggcgacaacggaaacggcgaccgaagcggagagaggcggcggcgcggctcgggtcgacggggacggcggcgttccggcggtcggcgggcgaaacggaggggtggacgaggtcggcgaggtcgcggcggagccgaaggaggcgacgccgaggcgggagaaagtccgaggcgacgacggcggcggaccggagctcggcggcgacggcggagagagggaacgacggcgcgagctcgattccgacggggagaaagagcggcgagtggcggaaacggtggagggaggcacggggagcgtttatatagtgttgggagggggagagaacggccggatgagggggaatcggccgcggaagatccggccgccattgatgcgccggcgaagtttgcgggagagtttccaaacgaatccgagggagagagagagggaaaagtggggggaaagggagagggaatcacggggagtgatttccccctctttattgcgcgcgggggcggcgggatgcggcggaatccgcggcggcggcggcgctagggcacgggcgaggcggcgggtgcggcgcgaggtaggggatgacgggtgggccccacccgtcagcgagggtggcgggcgggcccgcccgtcagcggcgcgcgcgcgggggaagccggatgggccgcgggggagaggagagagagggagggagctgggccgagccggcccaagaaggagaggggggggaaaaaagactttttagggtttttctttttataaaacctttttaactttgtttatttcttcttaattattatttgtgctctgaaaattccactaaaatttatttacgcattttaggcttttaggaaatatacaaaaatcctccaagccttattcgacttttaactttgcacattttaattgttggaggctttcacatggattttacttattctatgcacaattttgaggatgtattttagagtcgttttgggacgcgacagaatccgttaagacatcgttgaaaaatagtttttcaatgaaggacttaggggaagcagtacatattctgggcataaggatctatagagatagatcaaagaggctaattggattaagctgagtacatacattgacaaggtgttgaagaggttcaacatgcaagattctaagaaagg

SEQ ID NO: 20827 - DNA, 2556 bp, Oryza sativa
atcgtccactgcgaattccaggtcacggcgacggttatctgcataacttttctgccgggactgtgccacctttagattatcccgaatggttctgactttagcttcagcttctctcaggatatcagtcccgaacacttggctttccccaacttgatcccacaagagcggtgtccggcatttgcgcccatacaacgcttcataaggtgccatttgtatgctggcttgatagctgttattgtaggagaactcggcataggggagactcttatcccaggtcttcccgaaatccaggacacacgcgcgaagcatatcttctaggatctgatttagacgctcggtctgcccatctgtctgcgggtggtatgcggtgctgaagtttaaccgggtacccagctcttcttgaagcttcttccaaaagtgagaggtgaattggcttcccctatcagatacgattttcttgggaacgccatggagactcacgatcctagcgaagtagagctcggctagtttgttccctccataggtggtcttcacaggaataaatcgagctaccttggttaatcgatccacaactacccatatagaatcatatccaccttgggtctttcgaagtccggtgatgaaatccatcccaatttcatcccatttccattcaggtacttggagaggttggagaagtccggccggtcgttggtgctctgccttgacacgctggcacacatcacaaagggccacgaactctgcaatttcccgcttcatactaacccaccagtatttctccttcaagtctaagtacatcttcgtactgccagggtggatggaataaggactttcgtgagtttcctgaagaatcagttgtttaagttctctgttatctggaacgcatacccgatttccgttccatagggttccgtgttcatcctctgtgaaaccagcggctttaccctgtttcatattcttgaggagtccatgcatgtccggatcgttcttctgagcctcgcggatttgatcgagcaaggtgggcttggcttccaacgcagccaagaatccacgacccactatgcttaggatcagggcttccatctgttggttaagttcgggtggaatgccacggacgttaagagtgttgcaatggcttttttgacttagagcgtcggcgaccacgttggccttaccaggatgatagtgaattcccacatcataatccttgatgagttctagccatctcctctgccgaagattcagatccgactgggtgaagatgtatttcaaactcttatgatcagtatatatttcacagcgattcccaatgagatagtgccgccagatttttagagcatgaaccaccgcggctaactccaaatcatgggtagggtagttgccttcatgaggccatagctggcgtgaggcataggccaccacatgaccgtcctgcatgagcacgcaccccaatccttggcgcgaagcgtcacaatacaccatgaagtccttgcgagtatccggcaagattaacactggcgaggaaaccagcttttctttgagagtttggaacgccttctcgcattgcgggctccacacaaatttctcttctttcttcaacaactgtgtcatgggtcgagcgattttggagaagttctcgatgaacctccggtagtatcctgccaaacctaagaaactgcggacttgagtgactgtcttgggttgcttccaatcagtgacggcggtcactgtttcggggtccacagcgactcctttagcagatatcacgtgccctaagaatttgacttcggacaaccagaactcacacttgctaagtttggcatacaattgatgttcccgcaactttcccaacaccagactgagatggtgctgatgttcttcctctgattgtgagtacaccagaatgtcatcaatgaaaaccacaacaaacttatccaagtattccatgaacactttgttcattaagttcatgaagaaggcaggagcattggttaaaccgaatgacatcaccgtgaattcatacagtccgtatcgcgtggtgaatgcggtcttagggatatcttcttcacgaatacgtaattggtgatatccggaacgaagatcaatcttggagaatacagtggcagctttaagctgatcgaacatatcatcgatccggggaagagggtacttgtttttgatagtgacttcattgagagctctgtagtcaacgcacatcctcttcgtcttgtctttcttctccacgaaaatcacaggagcaccccagggggaggtactcggccgtatataccccttttctttcaactcttccaactgtttcttaacttcggccagttcatttgctgccatacggtagggtcgcttgtactgaggggtggttcctggagcaagatctatccggaactcaatctctcgcttcggcggcataccgggtagttcttccggaaacacgtctccgaactctctgacgatggggatttctgacagtcctatctgatgaagttctgaactgcctacagagggtgggggtgcaaagaaaacaaccggtgttccggc

SEQ ID NO: 20828 - DNA, 771 bp, Oryza sativa
agcggttgccttgcttaaactctcggaattcccttttcttaagggccatgactccggcgggcacatgggtcctccggaaagcggcggtgaagcgggcccaagtaataggctgcccctctggctgcgtagcctggaaatggtcccaccatagagacgcgggcccctgcagttggtgggcggcgaagatgactttctcctcatcgctgcactgcacggtgtctaactttttccccacggcatgcaaccaatccaacgcatccacggggttattggagctagagaaggttggtggacggatgcggaggaactcggcgagtttagagtgttgtgggggtggtggtggagcattatgttgtggcggattttggatgtggtggaggaaagcagccatcatgttggcctgctgggctaggatttgggtgaggatggcgttggtgtctggtggtggtggaggaggcgggggaggaggtggaggtgggctgccatggttgttgtggttgctgcctttgggttgattgccatcaccggtattagcacttctcctggtcgtcaccatctgaaaaccccacacagaaccagcaaacagagagagctgacaattaaagctaaccacccacgaccaccataattcttgaatttattactgctattaaattggttcattaaagttcaagttgcttaggcaaataaaataaagacaggctccgacatagttataccacacactagcataaccatgccccacacgactccaacaagaagacaaacgag

SEQ ID NO: 20829 - DNA, 724 bp, Oryza sativa
cgccgcgaatcccgccgcccccgtccgcccagcgtgcaatcaataggggggaattattccccgggatcccctccctctttccccccatttttccctccctctctccctcggattcgtttggaaacccctcccctaacctcgccggcgccattaatggcggccgggtcttccgcgcccgtttccccctcctccggccgccctctctcacccccaaccctatataaaccctccccgagctccccaccaccgtttccgccactcaccgccctctctccccgccggaatcgagctcgcgccgtcgctctctctctccgccgtcgccgccgagctccggtctgccaccgtcgtcgccccggaccacctcccacctcggcgccgcctccttcggcttcgccgcatcctcgccgacctcgtccacctctccgtttcggtcgccgaccgccggagcaccgtcgaccccgtccacccgagccgcgccgccgccttcctccgctccggtcgccgtttccgtcgtcgccgtcgacccggggtgagccgtggaccgccgcttcgtttccccctttccctcccctctctcggccgccgctccgccgtgcctatgtgtcacgaccggaaataacccaacgggcgttccttacgtgcgtgcattattccttgtcccaggaggcaaggtacaccaaaagttgatacagttcggagttcaacaagcggaagcgtaaatagt

SEQ ID NO: 20830 - DNA, 631 bp, Oryza sativa
gaaaaagccctagcgccgtgtgccctagctttgcagtcgccgccgccgctccagccgtgagccgccgtcgtttcagccgtcgccgtcgctcgggaaagaccaccgtcgtgctcgccaagtagtcgccgtcctcgtccgccctttcgccgtcgccggagatcaccggagcagcatcgccgtcgtcgacccgaaggttcccgccgcttcctcctcgtcgccgtcgccgtccgttggtcttccgccgccgtttaggtcaccggtgagttcgccgtgttgtcctctacgtcttggtgccctccgtttgcgtcctagtgccgccgttcgccggcgagcgtgcgccgttcgagccgtctcctccgccgagccgccgccgctgtcggtgacgtcaccgctgacgtcattggggtcgtccgccgtgagccgccatggacccgattgatctcggccgtccgttttggattggttcgatctcggccgtccgttcgtgtgaaccgccgcccgtgcgcccggtccaccaaaccctagccgctgacgcaataatccttcttttccttttcaaaaataattcattattgcgtcataattcaatttaaaccgatataagtgttttaatccgatttaatctttaaaa

SEQ ID NO: 20831 - DNA, 9124 bp, Oryza sativa
aatttttaaagattaaatcggattaaaacacttaaatcggtttaaattgaattatgacgcaataatgaattatttttaaaaaggaaaaggggatttattgcgtcaccgggctagggtttgggtggaccggcgcacggcgcgcggttcacacgaacggacggccaagattgatccgatccaaatcggacggccgagatcgatcggtctacgaccggctcacagcgaacggccccgatgacgtcagcgatgacgtcaccaccggcggcggcggctcggcggctcgggcttgcatgctcgccggcgaacgacggcacggcgacgcggacggaaggcaccaacgggtagcggacggcacggcgaactcaccgacgaccaaagcgacggcggaggaccaacggacggcgacagcgacgaggttgaaacggcggcgctcttcggcttgacgacggcgacgatgctccggcggtctccgacggcagcgaaggggcggacgaggacggcggcgacttgacgagcacgacggcggtcttcccgagtggcggcgacggctggaacgacggcggcgcacggctggagcggcggcggcgacggcaaagctagggcacacggcgctagagctcttccgacgacgagaggcgaaggcgagggctgcgacgggtagaggagacaccgggggtccttttaaacgggctcggaggcggcggcgaaggcccacggcgacggcaacggcgaaggaaaccttcggcttggagagagggaaaaccgatccgaatcgaactcgattccaaagctttccaaagcgattgagccaaagattccaaaggagaaaaggtagaggagatcccggagatcatttcccctctattgattcggccggagaaggaaaggaacggccggatttggaaagggaacggcggcggcgctcggcggcggcgcgctagggttccggcccgaggaagacgacgactccgacaggcgggacccacctgtcagcgacagcgagggcgcgcgcgcgcggcggactgggccggctgggccgaggagagagaagagaggttttgggccgactttcggcccaaagccaaaagaagactttttaaaacctttttcaatttaaattattccttaaatgcaattccattattaaaaatactttcttagctcaaataaatcccagaaaaaatctaggaattatagaattaagcaaagtatttaatgaaattttatctggcccaattttatattggaatttattaattaaacttagattttcttttcaagacttttaaaataaattctagaaattccaattaaacaacaatttatatattttgaattttcagggtgtgacaggacaccggccctgtgccatgacatctcgactaccgggccacagctcgtgtagccttcatttgccctggagatgtccatcgaacccccgacttcgtccatctccatccgtgtacttttgtttataaccagactgagccacaaactaagccttacccactagacatgtggaagtacggtagtgctttgcaacagaggcccgaagaccggtccttatatggccgaggtgcagcggccgagagaggggagggaaagggggaaacgaaacggcggtccacggctcaccccgagtcgacggcgatgacgaaaacggcagccggagcgaaggaaggtggcggcgcggctcgggtcgacggggtcgacggcgttccggcggtcggcgagcgaagcggaggggtggacgaggtcggcgaggatgcggcgaagccgaaggaggcggcgccggggcgggagatggtccggggcgacgacggcggcggaccggagctcggcggcgacggcggagagagagtgcgatggcgcgggctcgattccgacggggaggaagggcggcgagtggcggaaacggtggaggggagcacggggatggtttatatagggttgggagtgagggagggcggccggaggagaaggaaaccggcgcggaagatccggccgccattgatggcgccggcgaggtttgcgggagtgaatccaagcgaatccgagggagagagagagggaaaaacggggggaaagggagagggaatcgcggggaatatttccccccactttaatgcgcgcggggatggtgggaggcggcgggattcgcggcggcggcggcgctagggcacgggcgaacggcgggagtgtcgggaggaaggggatgacgggtgggccccacccgtcagcgagggtggtgggcgggcccgcccgtcagcggcgcgcgcgcggggagaagtccgagtgggccgcggggagaggagagggaggggagggagctgggccgagccggcccaaaagggggaggggagggaaagggaactttttagggtttttctttttataaaacctttttaactttgtttatttcttcttaattattatttgtgctctgaaaattccactaaaatttatttacgcattttaggcttttaggaaatatacaaaaatcctccaagccttatttgacttttatctttgcacattttaatttttgaaggctttcacatggattttaattattctaatcataatttagaggatgtattttagagtcgatttgggacgcgacaattattgatcaaataattactgaactgttctttgtatcatttaggaattgagctctgaaaaaatccgagaaaatttcagagagttgacttaatcatggagaatttaataaaaattaaatccatccatgctttagatttaagaaattttatttcccacatttaacttcacttgtaaaattaaagaacacttaatataaattctattattaatttattaaataatttataaatcctgaaacgaaaatcaggatgtgacaaactaccccccttacaaagaatctcgtcccgagattcggaacggctagaaagaaaaagggaataggtaaactgcagtctatcttattccataactccgataatcattctaaagctttaaagaaaactactgctgctttgaaactggtggctgagctgtaacacttgaaaacgcaactcttgaagacgcaactggcactgcattggctcctgtgacaacaatgttgttgacctgaccttgcgactgctcactagtagactgtgataacttaacagtggttgggttcgatcctgtcatgacaggcagcctcagtgaattggtgatttataataagccagatatagacgataataatcatcgctgctccgtagcagcacatttgttcgcagcggtgtcaacgacgaaggcaatacctgttggttcattccaacagcttaagaagcttgaggtggacagcatctcagcggtgtttgttgcccccatttgcagcctcctcgcttccaccctctacaggttgaggttcacttatgatttgtggatgaaaaatttcacaaaagagcaggagcaggcacttcagctcctcacctccctccgaaatctagaattctatgagtgccaccgtctgcagtcccttcccgaagggttgcatctcctttcttctatctgcacattaggcatcgtcggatgtcctgaaatcagatcgttgcccgaggagggcatcccagcttcactgaaaaaactactagcaatgcgttgcagcgtcgacctgaaggatcaactcaagagattagaagaatcaaaccaagatttacaagtattctacatctgatcacccaaggtaagacgtgatgtcccaactcctttgttttttactctttcatctgcagttgttcatatttaaactcttttttacctgttcgttgttactgttgatcatctagcgagccaccactactctcttttgaacaatgaagtgcagatacacattctaaagtcatttgaacaatgataaaaaatcaaatccgatgggaaaaaacaagaaattgctagaacatgttggacaatcgccatcttttcttactgtgcgcaacaagcctaaccttggcattatggaaactttgcagtaactttgcagtaattagatcgtggatgttctgtacgttgctttattgggagtgatgaccaaaccatttgccacacatagcttgtttttttcaagagaattacagttttgattaaggagcaacacccaaatgattgtggagctaacctcgtttgtctctatttcatcatatgttatgttacagttttgattaagcagtattagatttagatgagagcaactgtaattgtttatggttctggtaacacagtttcatggtcattagtaggagaattctttgaccttattaacttgttccctttcagcaaagcattgtggaatggtgttttttttagcctattcagaaccagttttttacataatggaagctttattaatctcagtaaatttcatcaagtgatacaattattctgagagcacattcggcttctgcaccaaagagtacacacagccaacaagaaagaaacaaaagataaactcatcatccaaaatagcagaaacaaaaagaactttaggagcccgctaaccgtagcctagaacgtcacccatgtgctggggtagaaaactactatatggccactaactctaattgttgacaaaccgcaatgatagtaccctgcaaattgaccttctgaaggatagcctatgagcggagccaatgtgtaatcaaaaagataacctgcaaaggagaagatatgttttttcctttcaaaaaccacattatttctgaaaagccaaatagaccaaatagtggtagttgcacctaataagaccaaagatctcaaattgcgtgattgtcttcttatccaatgcccaaacatatgagttgtactattagataaaactaatattcgaagcaaactgaattaaagaccaaaccgcgcgggcaaaataacaatcaaagaacaaatgattaatagtttcatctttgtggcagaaagaactagacttgtttcctctccaattccttttaatcagattatcttttgttaagattactccatggcgtaagttgtcacgcccgaaaattcactagtaatttccgaacttatttgtgcataaaatcctcgtccaggaatcagccgaggtacacaaactaacaatttaatatacagattcatcaaaatatctaaaacgataaatacttactaaagaggcacttagtcctcaccatgaagaaaactgcagcggaaaaaaaaaaaatctagcgaagctccggctccactcccacaggcagctcaactggggtataagccaaacgtcttctccttctggatcctttttcttcaactgaggttgattgattattgcaaggtgagcatatgacatactcagcaagccacacagcaaatatgcaagtgcgcaaagataccaaaggttggcataatataggctcatttgcaaaagcagcatttagcaaaacatttaagagaagtaaaacagtggagtaattaatcagaaattttaatcaacactgaacaacacgcccatgctgctcaggcccaaccattctgaaacaaccatacccggctgtacagatctaatctccaatccaggagctaagcaaattattaccagatataacatccataattattgtgagaagtgtgggactaatcacgaaaaacattgctcaacccgcccataaccgtgggcacggctattcgaatagttttactctggccagaggtgtaccactgtacccacaagacacagccccacatcatgtcaccatgtgcctcagtaccaccacggtacctcggaaaggggctgtgacattaccccttgcataacacaatccaccgcagtgcaccattcctggatcataatcacccccttataaataaggcatggactccccagcgacccccgtgggcttatctccgccacttctcagtctggtgccccgcaatgaaccatgctatacgaaaggtaaagccgttgcccacgctggcttgtggttggcacgattaatgtttcacaatagtagctcgcgaaccggtccttaattgtcatgagcacgactctcaaaaccatgtgctcacaacccaccattatcaagttttagttggcaagtaattaattaaccaatcacgattgaccatcgtgaactatcattaagccatcattaaataatgagtcataagttatcccaatagtgtgctaatgtttctaagcatggctaagcaatcatatctaatatctagctgaaccaatatataaagctcaacttgtcaagttataataacccaaggtatcaaggaataaagtaatcaatgcaaacaggccataacaaaggaataggttcacaccacccagtgacattcgaaaataaatgcacagttgaaataaatagagaatttaaatataggatcaacatgctcaaaggattgtgtttaggatctgtgtgacttgccttgcaataatcggtcttcaattaatcttcttgaacacttccggcgcactcacgaaccttcgcaacgacggaaacgacaagctaacacgcaaaacgaagaaaaagactaataaaaaccaaataaacagtacatataaagtaaacaaacatgtagatcataattttagatgaattatgagacttgaacggcctcattctgacttcataagaatttattatgaaatttacaagattaaatctaattaaagcccatttaaaaagaattaaataaatttaattctatttatggacaattttaatatgtagatctttattttatataatttttgcaacttgaaccacattaaactgagttcaaatgaattagttatgaatttttaaagattaaatcggattaaaacacttatatggattttaattgaattatgacgcaataatgaattatttttgaaaaggaaaaggaggattattgcgtcagcggctagggtttcgcggtggaccgggtgcacggcaacggttcatgggaacgaacggccgagatcaaccctatccaaaacggacggtcgagatcgatcggtccacgaccggctcacggcggacggtcccgatgacgtcagcgacaacgtcagcgatgacgtcagcaccggcggcgactcgggcggctcgggcgcgtatgctcgccggcgaacggcggctctacggcacaaacggagggcaccaagacgtagatcacggcgcggcgaactcaccgatgaccaaaacgtcggcggaagaccaacggacggcggcggcgtcgaggaaaaggtggcggagaagatcgggtcgacggcggcgacggtgctccgacggtcttcggcggcggtgaagcggtggacgaggacggcgacgcgacggcgaccacgatggcgatcttcccgagcgacggcgacgtctggaacggcggcggcgcacggctggagcgacggcggcgacggcggcgctagggcacacggagctagggcgctacggacgacgagaggcaaaggcgagggtggcggcgggtagaggagacaccggggatccttataaaggggctaagaggcaacggtgaaggcccacggctgccggcgacgagaaggaaagatcggggtttgaaggaaagagaccgatccgattcgaactcgaatcaaacacattccaaaccgatttagccgatgtttccaaaggggaaaaggtggaggagatcccggagatcgtttcccctcaatcaatttcaccggaaacggaaaggaacggccggatttggaaggagacggcggcgcttgcgctagggtttcgggcggcggcggcggcgcgaggaggaagacaggcctgacagacgggccccacctgtcagcggctgagagagaagagcggcggctcggcggactgggccggactgggccgaggagggagagagaaagagagagggagggttttgggccggctttcggcccaaagccaaaaaaaaaacctttttcaatttaaattattcatgaaatgcaattccatttattaaaaacacttccttagctcaaataaatcccagaaaaatctaggaattatagaattaagcaaagtatttaacaaaattttatctagcccaattttatattgagatttaacaaattaaaattagatcttctcttttaggcttttaaaatcatttctaataattccttttaaacaacaatttataatttaaggattttaaacaagaaaagcacttaacaattataattagatcattattgatcaaataattactgaactgttctttgtatcatttaggaattgagctctgtaaaaatccgagaaaatttcaaagagttgacttaatcatggagaatttaataaaaattaaatccatccatgctttagatttaagaaattttatttcccacatttaacttcacttgtaaaattaaagaacacttaatataaattctattattaatttattaaataatttataaatcctgaaacgaaaatcaggatgtgacataagtaccataagaagatcttaatctctagggaggactttgatcttccagattcttttgtttatattgggaacatcggtctgcaccaacgcaagataaagagatttaaccgagaatctaccatcagtggttagattccatttaaactcatctgggtcgtgagataatataatattagcgatgcgtgagagaaggtgattccacgctactaacttagagccagtaaggtccctgcaccaagaaaagcttagaggactggtctggaaaatttctgaaatagttgcatgtttatgcctaacaacgttatagagatagggatattgttctctttaacaggcattcccccaaccatttatcttcccaaaaccgtacttgagagccatctttgatgttgaaagagccaaacctaataaaatcaggcttggccttcattagactagcccaaaagtgtagcgcccgttccgtcgtggcgcctagcgggaaaattaactcttaaaaaccctaattgcgaaatttgtttccttgcttgttgtctagtgtccgtgccatctcaagacctcaatccccgatctatcgtcaagtgcaattcccaatccaatcctttcaatcaaattccaccgcaaaaagtctattttgcctcccccgaggtcgatgggcctaatctcgctcggcccatctctctct

SEQ ID NO: 20832 - DNA, 8531 bp, Oryza sativa
agggagggttttgggccggctttcggcccaaagccaaaaaaaaaacctttttcaatttaaattattcatgaaatgcaattccatttattaaaaacacttccttagctcaaataaatcccagaaaaatctagtaattatagaattaagcaaagtatttaacaaaattttatctagcccaattttatattgagatttaacaaattaaaattagatcttctcttttaggcttttaaaatcatttctaataattccttttaaacaacaatttataatttaaggattttaaacaagaaaagcacttaacaattataattagatcattattgtcacgaccggaaataacccaacgggcgttccttacgtgcgtgtattattccttgtcctaggaggcaaggtacaccaaaagttgatacaattcagagtttaacaagcgaaagcgtaaatagttatttattacatgggcagcgacggcccagcacactcaaagacaacgaaaaacagcggaagactaaggcgacgaccacaggcgcttgacggcaggcacgagctagacaccaaagccttcatcctccaggggctcctcttctgggtttgggaaaaattgaacaagactgagtacaaccaccgtactcaacaagacacacccacaagtgcagcataattgcaaaggagtacaatggagttataatataggggttaggttttgcaataaacagcatttaaaagacccttagttgctcaaagctaaatttaaaacacgatcctagaactatttaatattattaatcaaggccgtgaacccacacgaacctgccttaacccaaggcctacgatgattcagaccgaactggcaacccgaccctgggtcccagctcgtcccaagccaacccaggccaaccattccacattttagttgttaagcaggttttaagaattaaaacactaacttgggtacattgctcggcttgcccataaccgagggcgcggctattcgaatagattatactctgatcagaggtgtacatctttacccacaagacacatcttcctcacgtgtaaccacgtgccacataccaccacggtatacagacggaagacgtgacatagttcccaacccatcctagccatagacaagagtaccgacccaatcccacctacggccggaacctccgggacaggtaggcaggattgagcccctagcagcaggacaccagccctgtgccatgacatctcgactaccgggccgcagctcgtgtagccttcatttgtcctagagatgtccatcgacccccgacttcgtccatctccatccgtgtacttttgtttataaccagactgagccacaaactaagccttacccactagacatgtggaagtacggtagtgctttgcaacagaggcccgaagaccggtccttatatggccgaggtgctactatcaaaaccatgcaccccgagcccagcctaaaaccattttggggattttgaatagagggggcggtatgaatccaattccacaacaatccaacaaatccaatgtgtccaagtgatatgaatattaccacaatctagagttttaaaaccacctaatgttacctaattaatcagcgaagcatctacctaaaatcatactagtgataccacgagtagagtgtccactagttgggggttttgtttatcctagggtgaacaaggtaataataacaataacaataataataaggtcataacaaaggtaaataggcatggctaaataaaacagtgataacgcgggaatttaaataaagcgatgatgcaataatttaaatcaaaataatttcataaattgggattcaatatgttcaaggatgatgtgtcttgccttgctcgctttcccaaatgccggcttcaacttccacgaagagcggatcctccgaagctgcagcgtctacacgaccaacggaaaagaaaaggcttttactctaacaaactccatataaaaagcattaacaaagcacaaaaatgggttcttgacttcttaaggaaaaattagagacttgaacggtccaattccgagttcaaatggccaagttatagccatttgaagtttatatgctctttaaatgaatatttgcgaatttcttcatttaaattttaatttaaaatcggatttattgcgtcagccgacgggaggggcgcgcggaccgggtccacgggagtggggcccacgcggcagcctcacggtccacggtggaccgggtgcacgcggctggcgccggccggcgccgtgggtcccacgcgtcagccgcacccgcgggcgcgggcggctgacggccgggccccacttggcagccgcgagggcgcgcccgaaggcagcctcgccggcacggccgacgggaggcgacgcgcccgcgccccgatggtcaccgccggcgaccaccggcgcggcggagcggcacccgagagagaggagggaagggggaagcgaatggagcggtcttcggctcaccccggtcgacggcgacgacgggaacggcggccgaaacggaggaaggcggcggcgcggttcgggacgacgaggacgacggcgctccgacggtcggcgagcgaaacggaggagcggacggggtcgacgacgacgcggcgaagccgaaggaggcgacgccgagaggggaggaagtccggagcgacggcggcggcgaaccggaactcgtcggcgacggcggagagagaggaaagcggcgcgagcgcgattccgacggtgagagcgagcggcgaacggcggaaacggaggagagaggcacggggaacaattaaatagcgtcgggagagagggaaagcggccggaggagatggaaaccggcgcggagatctcggccgccattgattgcgccggcgaggatcgcgggcacaaaatcggacgaatccgagggagagagagaggggaaagtgggggaatcgggagagggaatcgcggggaatgattcccccctcattatggtgcgcggggacggcgggatgcggcggaatccgcggcggcggcggcgctagggcacgggcgagcggcgggagcggcgggaggaaggcgatgacaggtgggccccacccgtcagcgagggtggcgggcgggcccgcctgtcagcggcgcgcgcgcgggaggagccgatgggccgcgggggagaggagagagagggagggagagaattgggccgagccggcccaagaagggaagggggggaaagaagacttcttttagggtttttctttttataaaacctttttaactttgtttatttcttaataattattatttgtgctctgaaaattccactaaaatttgagggctccttttagaccaaggagaatttaacaaaaattctccgggccacatttgaatttttcttgtacgtattttagtgtttgccaatttctttccgaattttaattaattctattattccttttagaaaatgaattttaatttcgggatgaatttatcaggacgtgacaaatccaccccccttacaagaatctcgtccccgagattcgaggaggctagcaagaagataggttgggcggtcttctcttcttgtctgacttcttccgtcgcgtcttttataacaacttgcctagcaaaacttctctactctggactgcttggctcaatctcctgttgcagatggaatcttctcttcacctgacttgtccctggttgaacctttagctgacttcgactgggttgcggcacttgaagatggtgcttcagttccagaacttcgcatagttcatatttttggcgtcaacctcatagaagttacccatttcacgttatgcgtcgagatcagctcgtcattactaggataccatgcttgtcatcatgagcatatcatgcttgtcatttacttctaacctgccaccaactgcctcatattagctttcctagtctccgggtgataactacttctgctatttgatgcaagggtcgataactttgcctttgaattatgtttcccaagagaaccaacttatcccacttgacatactttgacgtcttcccaaatggctttactgctggatttgttgttgtctaatcattatcctgccaaatctgaggcttcgttgttagatgcgattttaatctgacctctgtagattatcttcgaacatatcacttggttcataactgggaatagctctcacgaacaagcaactcggattcactttctttacatttggttcacttcccactattctcttcatgttgtcatcatttagcattcaacatattcctttgcaccttccgccttgatgtgttctttctcgatggatcgattggtaggaaagtgcgttgagcgatactagtgcaagtgctttcattctagtagcatctgatacaaagcccaaggttgaaccgagctttagattccactgttcaggttttacttattgacttcttggtcatgtcacaaaagtttccatccttgtccccatagaagtacttctacctgtggtcatctctcttactcgtgaattcacctattttaatgacagggcaactgttgtagggttgtttgctatcgggagtcttccttgagtgacacaaatcatggttctcgttatcctttatcaatcacctttcgacctacttcttttcccagtaaccaaacatcttttccgatctcttccattaatcacctttcgacctttctcaaccaggtactcttcactccgggtgttgaggatgcttctggggcaatgaggtgcttgggcgtgctgtctttcagagaaaccttgaagtagttcgtcaaaagctagactgacgattgttgcctttgatccgaagagacacatctgaaactcttagtccaaacaaatgcctctttggttgatcacttgattttcttcgccatcaatcgctaggctatttgattcctaacagattatgggtttacggaaatgagaccctaggtctccctaatcaacaacaaaatgtgcacaactcacagcacttgcactcttaacatggatccttcataagcttatcaaactcattcattatctcatgtttctctgttattacatgattgacggggaacaactataaaacaaaagtatttgaacactgatataagagtattatggttgcttctgactagcgctaggcttatcaggtactgtatttgctccagtgaccacttggcgattggcatgtctgcttccttaacaggtactacagtttgtaacagacaataactttcttacgctcgggttcttcatcttgtacttgatttctttggctgctgtgcacgggcgggagggcggctcggcctggaggggggggtgcggcttgggccgggcaggccgggagggggggggagagacagcccgggagagagagggaggagggtgctgggccgaggggaagggggcccaagaggagggagagaaggagagggagagaaagagagggaggaatgggagacttcggccgcgggccgaggggagagagggaggactttgggccagacttggcccaaaggaggaaggagggttatttttaggtttttctttttaataaactttgttaattgtttttgttgcttaataattatttccggtgctataaaaattcaagtaaaatttgagggctccttttagaccaaggagaatttaacaaaaattctccgggccacatttgaatttttcttgcacgtattttagtgtttgccaatttcttttcgaattttaattaattctattattccttttagcgaatgatttttaattcgggatgaatttatcaggacgtgacaggagggtcctcagcagaaaagaaaaacaccaatgcgaaccgaagatgaagtccgtaagatgatcattaccagcacagaatggcctccaccaggaatgacaaaacgtcagagaagaaataccttccgaggtgcaccacagttgacagagcatcttttagctaatggaggtagagtgtctgatagtgaagattcagatcaagtctcctcagatgatgaagatgagaagtctccccaaggtttcaaccagaataaaatggaacgtaaggcatgctctcgttgtggagaaatcggtcatgttgccagctcgtgtgccactacatgcgttcattgtgaggaagaccatccacccgacaggtgtccaacgagcaggatcacttgtttcttttgtgaaggaactgatcatgtaccaaaagattgtcaattcagtttgctgctgacgaagaagatggccaaccaacccgccagttccaacggagagaagcatcaagatggatgaagtcgggggtcgatggacattctccagggcaaatgaaggctacacgagctgcggcccggtagtcgagatgtcatggcagagggttggtgccctgctgctagggtgctcagtcctgcctgcctgtcccgggtgtcccggccgtagggggattgggtcggtactcttgtctatggctaggatgggttggaaactatgtcacgtctttcgtctgtataccgtggtggtatgtggcacgtggttacacgtgaggaagatgtgtcttgtgggtaaagatgtacacctctgatcagagtaaaacctattcgaatagccgcgccctcggttatgggcaagccgagcaatgtacccaagttagtgttttaattcttaaaacttgcttaacaactaaaatatggaatggttggcctgggttggcttgggacgagctgggacccagggtcgggttgccagttcggtctgaatcatcgtaggccttgggttaaggcaggttcgtgtgggttcacggccttgattaataacattgtatagctctaggatcgtgtttacaaaatagcttgagcaactaaatgtctttaaatgctgtttacttcaaccctaacccctctatgttataattcccttgtactcccttgcatttattctgcacttgtgggtgtgtcttgttgagtacggtggttgtactcagtcttgctcaatttttcccaagcccagaagaggagctccttgaagatgaaggctttggtgtctagctcgtgcctgccgtcaagtgcctgtggtcgtcgccctagtcttccgctgtttctcgtttgtctttgtgtgtgctgggccttcgctgcccatgtaataaattaactatttacgcttccgcttgttaaactctgatttgtatcaacttttgctgtaccttgcctcctgggacaaggattaatgcacgcacgtaaggaatgcccgttgggttatttccggtcgtgacacaccatcacctgggacgagttttcatctgtattcaagagatcccatgttcccgcaggaatgatcacactgagaaaacgagagttccgctacctgaagcaagaagatttgaccgtcacagagtacctgcacgagttccatcgtttggctcactatgcaccagaagatgtggaaaatgatgaagacaaacaagagaagtatctccaggggttaaaagatgagatcacagtgcaactactcctagaggaatatgaagattttgagaaacttgtggacaaagccatacaactcgaaagtgagcataatcggatgaagaactgtaagagaaggattgtcagcatcccagtattcccatgtggtaaccaaagacagcgcacggagccacttcagatcaccggatcttctgttgcgcatcaagagtttcgccccaagaagatggacacaatgcagacaacaacattagcaatactaatgatgatgataccaccaacaaccatgcttcttgccccattagtgaccactcaaatcaagcgtgcaatgtcaacatcattcaccaaggtgtcgacgatagtatcaatgatggcacccaaaatgacaaccctagcaattgtgactctgagaaagactccaatggtgatagcaactatggtaccactgatgccaatgttagcaaggatttccaaccaccaattccaactccaagtcagaatgatcgtccccagacggatagctcagcaaagaagacgttgatttgctacaattgcaaaggaccagggcattactcgagggactgcctgcaaccaaggcaaagtcgatctccacattaccgccaatttacacgaagcagacatcccaatcgtattgtggtcactggagcaaacgccgtacccgtgaggcctcgtgttaatcagaacccatagcagaaacaatgtgccgatgctaagcacctttccttttaggcagtgcttagtattcatgtaatgagggagaaatgtgtaatacagacaagttctatgagggttcttttggaagatgtggatatgtgattatgtgtataattgcttactgataaaggagacctagggtctcatttcagaggaactatgttctaacctcgagttaataaccaacctgttgatggaaaagaaaaccaattaaactgtgttgggttaaaaagccaatgagacagtagttggggataggagtttggatacgccttttacagatcaagataaggattgttggatgaaacccataagggtacccgccatg

SEQ ID NO: 20833 - DNA, 11826 bp, Oryza sativa
aattcgggatgaatttatcaggacgtgacaggagggtcctcagcagaaaagaaaaacaccaatgcgaaccgaagatgaagtccgtaagatgatcattaccagcacagaatggcctccaccaggaatgacaaaacgtcagagaagaaataccttccgaggtgcaccacagttgacagagcatcttttagctaatggaggtagagtgtctgatagtgaagattcagatcaagtctcctcagatgatgaagatgagaagtctccccaaggtttcaaccagaataaaatggaacgtaaggcatgctctcgttgtggagaaatcggtcatgttgccagctcgtgtgccactacatgcgttcattgtgaggaagaccatccacccgacaggtgtccaacgagcaggatcacttgtttcttttgtgaaggaactgatcatgtaccaaaagattgtcaattcagttttctgctgacgaagaagatggccaaccaacccgtcagttccaacggagagaagcatcaaggaaacacaaatcctcgccaagattacagtttcagcctaactccagtgccaggacagaggaaacaaaatgagaaaagaaaatgccgagtccgggaagatatctgttgcttcaattgtcaaggaatgggtcatttcgccgacaagtgcccaaaaccgagaaacgtagctgccagcacgtcagtccacgcaaacccccgcaatcagaagcttgctcctcaacgaattgtcatccatgcatcccgaagcagtcctatagcccgcgttgcaacagctccaattccaatgagtgcactaccacaaggtgtcaatgctcaatttcagccccagccaccagctgacaagacagaggccagtatctgcgttgtacctttggaagttccaatacagcagctgagaaatcaagtacaagatgaagaacccgagtgtaagaaagttattgtttgttacaactgcactgaagaagggcattactccaaaaactgtccccaaccaaggcaaaatcgacctccacattaccgccaatttacacgaagcagacattccaatcgtattgtggtcactggagcaaacgccgtacccgtaaggcctcgtgttaatcagaacccatagcagaaacaatgcaccaatgctcctcctgctgcacctgactcggcaataaatcatagcaaccattctctgcatcgacagcctcagcaaagaattgtcgtagatggaagaagttgtgtctctccccgacctactccaggccgagccaagagcaatcaacctccggagggcgataccaagcagaagaccgtcatccgcttcaaccagcaatcagaaggaagcttctcctgtgaatgatagcattatgtagtcctgtcacatcatcacagaaccaatcaaggatgcagtcactagaacaatgccagctatatctctccagaatcaaaatgagcagccatgtttgtggttttcagttcgctacttatcatggtgtaatcgaaagtttgcagcaaccatgtaatacataaatatattcatgtctataaacagtgagcttgctatgcttgtggatgattcacgttgagaatacaatgtaccgatgttaagcaccgtccctttttgtttaaggcagtgcctcgtattcatgtaatgagggagaaatgtgtaatacagacaagttccaggaggattcgtttgaaagatgcggatatatgatcatgtgtataattgtttactgacaaaggagacctagggtctcgtgtcagaggaactatattctaacctcgagttaataaccaacctgttgatggaaaagaaaaacaattaaactgtgttgggttaaaaagccaatgagacagtagttggggataggagtttggatacgccttttacagatcaagataaggattgttggaggaaacccctaagggtacccgccatgcctctacattgataagatcggatatacctgccaacagttaaggagatccaggagacatcaatatttgagaacataatagtcgatggttggtaattaatctatcaggtatcagaaaagggtcaaaggtgatatggcagaagaacaatttggatgctccccatctcgaggaagcactaaagatgatcatcggcaattaaaccctagtggcatagatacagatagcaagcaatgtatttccctgaaggtagtcagtgcagctttttgacgaaccacatcaaggtttcactgaaaggcagcaagccaaaggatctcatcgtccccagaagcgtccgcaatccacattaaagaataccacctgttagaggtaagccgaaagatgattgataaaagagattggcaaagatgttctctagcatgaaagaagtaggccgaaaggtgattgataaacagaaacatgctctgcatcgctcaaggaagacccctgattgtaattgccacgcaacagtcaccttgtcattaagtaagcaagatgacctaggtaaaagtgtttctaggaaggcaaagagtgaaatcttcaactcggtatcagatgctacacggagtgaaaagtgcaagcaccggttaccaggcaatgccatttcttgggagatgatccaatgggaaagaacacatcaaggttaaaggtgtaaaggaatacgttgaatactaactgaggacaacctgaagatgataatgggaagtaaactgaatgtaaagaaagtgaatccgagttgcttgttcgtgagagctattcccagttatgaatcaagtgatatgttcgaagataatctacagaggtcagattaaaatcacatctaacaacgaagcctcagatttgacaggataatgattagacaataacaaatccagcagtaaagccatttgggaagacgtcaaagcatatcaagtgggataagttggttctcttgggaagcataattcaaaggcaaagttatcgacccttgcatcaaatagcagaagtagctatcacccggagaccaggaaagctaatatgaggcagttggtggcaagttagaagtaaatgacaagcatggtattctcatgatgacaagcatggtatcttagtaatgacgagctgatctcgacgcatgacatgaagcgggtaacttgtatgaggttgacgccaaagatatgaatgataagaagttctagaaccgaagccccatcctcaaccaccgcagcctagtctgggtcagttagaagttcaaccagggacaagtcgggtgaagagaagattccatctgcaacaggagatcgagccaagcgttccagagtggagaagttttgttaggcaagttggttatagaagacggagcggaagaagtcagacaagaagagaagaccgcccaacctatcttcatgctagcctcctcgaatctcggggacgagattcttgtaaggggggtggatttgtcacgtcctgataaattcatcccgaaataaaaatcattctctaaaaggaataatagaattaattaaaatttgaaaagaaattggcaaacattaaaatacgtacaagaaaaattcaaatgtgacccggagaatttttgttaaattctccttggtctaaaaggagccctcaaattttagtggaattctcagagcacaaataataattattaagaaataaacaaagttaaaatgattttataaaaagaaaaaccctaaaaagtctttcccccccttttcccctcttgggccggctcggcccatccctttatctctctctcctcttccccgcggcccatccggcctcctccccgcgcgcgcgccgctgacgggtgggcccgcccgccaccctcgctgacgggtggggcccacctgtcatccctgtcctcccgccgctcccgccgcctcgcccgtgccctagcgccgccgccgccgcgaatcccgccgcctcccgccgtccacgcgcacaataaagtggggggaaatattccccgtgattccctctctctttccccccatttctccctctctctcccgcgttcaaacgggcggatttgcccccgcaaatctcgccggcgccattgatggcggccgacctcccgcgccggtttcctcccttccccggccaccctctctcgcccccggctctatataaacactccccgtgcctctctccaccgtttccgccactcgccgctctctttccccgtcggaatcgagctcgcgccgtcgtcctctctctccgccgtcaccgccgagctccggttcgccgccgtcgttgccccggaccatctcccgcttcggcaccgcctccttcggcttcgccgcatcctcgccgacctcgtccacctctccgtttcggtcgccgaccgccggaacgccgccgtccccgtcgacccgagccgcgccgccgcctctctccgctccggtcgccgttcccgtcgtcgccatcgatccggggtgagccatggaccgcccatttcgtttcccccttccctcccctctctcggccgccgctccgccgtgcctatggccgccgccggcgaccataggggcgcgggcgcgccgcctcccgtcggccgtgccggcgaggccgccttcgggcgcgccccgcggctgccaagtgggcccggccgtcagccgcccgcgcccgcgggtgcggctgacgcgtgggacccacggcgccgaccgccgccagccgcgtgctcccggtccaccgtggaccgagaggctgacgcgtgggccccactcccgtggacccggtccgcgcgccctctccctcggctgacgcaataaacccgattttttttaattaaaatttaaatgaagaaattcgcaaatatccatttaaagagcatataaacttcaaatggccatatcttggccatttgaactcggaattggaccgttcaagtctctaatttttccttaagaagtcaagaacccatttttgtgctttgttccttcttgttgtatggagtttattagagtaaaagccttttcttttccgttggtcgtgtagacgctgcagcttcggaagatccgctcttcgtggaagttgaagccggcgtttgggaaagcgagcaaggcaagtcacatcatccttgaacatattgaatcccagtttatcaaattattttgatttaaattactgcattattgctttatttaaattcccgcgttatcactgttttatttagccatgcctatttacctttgttaatacattattattgttattgttattattaccttgttcaccctaggaaaataaaaaccccaactagtgggtactctattcctggttccactagtatgaatttaggtagatgcctcgctgattaattaggcaacattaggtggttttataactttagactttgggaattctcatatcatttggacactatggaattgttggattatggtggaattggacatacacctctcttcctctttcaaaacccctaaaacctgttttcggtggggtttgggtgcatgccagttgtgggaagtagcaccccggccactataaggattaagctcgggcctctgttgcaaagcactaccgtactaaccacatgtctaatgggtaaggcttaactcggtgctcaggctagtcctgaacaaaaggacacggatagagatggatgaagtcgttgcgacgatggatatctctgaggcaaatgaaggctacgcgagctgcggctcggtaatcgagatgtctaggcaaatgaagactacacgggtcggtgcccgttagtcgagatgccatggcactggactagtacgtgggtggtctcacccctatgtgtgtggcgcacccggtctagatcttgttgctaggggctcaaccctggcctgcctgtcccgggataccggccgtaggcagggttgggtcggtacttttgttcacggctaggatgggtgaatggttatgtcacatctttacgacgggttccaaggccatggaatgcggagtaaagatgtgtcttgtgggtaaagatgtacacctctgatcagagtaaatctattcgaatagccgagccctcggatatgggcaagccgagcaatgtacccaagtcagtgttttaattcttaaaatttgctcaacaactaaaatatggaatggttggcctgggttggcttgggacgagctgggacccaggtcgggttgccagttcggtccgaatcatcgtaggccttgggttaaggcaggttcgtgagggttcacggccttgtttaataatactgtgtagctctaggatcgtctttacaaaatggctttgggcaactaagtgacttttaaatgctgtttactgcaaaacttaatccctatattattattcccttgtacctcccttgcattaatcatgcatctgccggtgtggcttgctgagtactgtggttgtactcattcttgctcaatccttcccctcttcagtaagagaagctttggagaagatgtcttagggggagtcctggcttataccccagttgagcgcttgtgaagatggagccgtaggcccgctagtccgctgctgtttatttttgattgtcaggccttaagtgcctttgtaataatgtaaatattgtcgatataataaagatgtgtcttttatatcatgtttgtgtggtgtaccccggcttttcctgggacggggattaatacactagcgttcgggaaaaggcaattttcccggtcgcgacaggcgtgttccacgtcgtccccgtctccgtgcagccactgctggctgtccctcgtcgccccctcgccggccccggtcgtcgtcgtcctcgtcctctcgtcgttcccgatcgtcgtggcgttcgtccctccgtcgagccgttctcgtccgtcgtccgcgttcgtcaagcgagccgctgcagccccgtcctcgtcttcgtcctcggctccgcgtcgtcaagccttgtgccggccgcgtctcgccttcgtccaaggatcgccgccgaagccgtcccctcgccgttcgtctccgttgtgcccgtctgtctccgccgcgcccgttcgtcgttgtcgttcccgcgcctcgtcgcgtggtggtaaggatccgtcctctcgcttccccgtcctcgtcctttcggtgtcgcccgtgctcgttgtgcggttgtcggccccggtacccgtgtaccggtgtcggtagtcgttcacgcgtgcgggtggtgaccgtgtagtgtccgtgttagtgtgcccgctcggtagccgcgtgatttccacgtgtgcaggccgtgtggtgtttagtggagtccgtttgtcggccactcgcctcggttgacacacggggtctgcttccgtcgacccgaggaccgtctctgtgtacccggtctaccgcggtcctttaggttgacatgtggggtccgcatgtcaacggcgcagccttcctgtcttttccaggctagcgcttacacctgttttatagttgcaaagcttaattataataatccgcaaatctccatataacagcattaaacttcggatgatcatatcttggtcatgcgagctccgaatcgacccgttcaagtctcttaatgtttgatataacctaaagaaccctgtgctttctttttatgtattgttattgcttctttataggcttgtagctttgcttgtgtgcttcgcgtagctttcgtcgttccggaggttcccgaagcgtggttcgtggttgtcgccgaaggttcggaaggccgttctctctgagcaaggcaagtcacatcatccttgagcatattgaatcccagtttataaaattattttgatttaaattaatgcatgatcgctttatttaaattcccgcgttatcactgttttatttagccatgcctatttacctttgttaagacattattattgctactgttattattaccttgttcaccctaggataaacaaaaccccaactagtgggtactctattcatggttccactagtatgaatttaggtagatgcttcgctgattaataggacaacattaggtggttttataattttagactttgggaatattcatatcatttggacactatggaattgttggtttatggtggaattggacatacacctctcttcctctttcaaaacccctaaaacatgttttcggtggggtttgggtgcatgccagttgtgggaagtagcaccccggccactataaggattaagctcgggcctctgttgcaaagcactaccgtacttccacatgtctagtgggtaaggcttagtttgtggctcagtctggttataaacaaaagtacacggattggagatggatgaagtcgggggtcgatggacattctccagggcaaatgaaggctacacgagctgcggcccggtagtcgagatgtcatggcagagggttggtgccctgctgctaggggctcagtcctgcctgcctgtcccggaggttccggctgtaggcgggattgggtcggtactcttgtctatggctaggatgggttggaaactatgtcacgtcttccgtctgtataccgtggtggtatgtggcacgtggttgcacgtgaggaagatgtgtcttgtgggtaaagatgtacacctctgatcagagtataatctattcgaatagccgcgccctcggttatgggcaagccgagcaatgtacccaagtcagtgttttaattcttaaaatttgctcaacaactaaaatgtggaatggttggcctgggttggcttgggacgagctgggacccagggtcgggttgccagttcggtctgaatcatcataggccttgggttaaggcaggttcgtgagggttcacggccttgtttaataatactgtgtagctctaggatcgtctttataaaatggctttgggcaactaagtgacttttaaatgctgtttactgcaaaacttaacccctatattattatccccttgtactcccttgcattaatcatgcatctgccggtgtggcttgctgagtactgtggttgtactcattcttgctcaatctttcccctcttcagtaagagaagctttggagaagatgtcttaggtggagtcctggcttataccccagttgagcgcctgtgaagatggagccgtaggcccgctagtccgctgctgtttatttttgattgtcaggcctgaagcgcctttgtaataatgtaaatattatcgatataataaagatgtgtcttttatatcatgtttgtgtggtgtaccccggcttttcctgggacggggattattacactagcgttcgggaaaaggcaattttctcggtcgcgacaactcccttgcatagtgcccttgctcatcacacataaaacaaatgatacttgcttcttttgagtcaacatgtggcacgtcaccatgggtccttcgggatgctggcggcatgctgactcgtggtgtgagtgcttggactgcctccaactgcacttgaggttgtatctgactcaggttcagaattggcgtctgatgctgctgtagtatctctataagcaatcggttctggttaatcaggtgttggaccagtgtcacacaaatggtgtctggtgcttcattcactcgggagcttgaggtaccgatgtcctgacttctgaccttattgcctttctcattgtcagccatctgttgcaaaggtttggagagggagagagggaaaacaaaggggagagacagattagaaactaagaataggaccttaacagatctaagtcttttgctgttatgatgtatgttaggcttattctgcaagttgattaagcaaacaacctagcatggttacatcacaacccactgatgcaaaccacgcgctacacacacaagcaaggaaacacacgactaacaactctaccctagagggtggcttaggttctgtgacgggttctcaagatcttcactcctgcttcacagctggcttcagtgcttcctccacttcgctagcggatcctgcagtcttccggagcttcggcaaacaactgacgatgtcttcttcttcactgacctgaccatctagtactagttgaaatccgaagaaggaagaagggagtaaaccttttgcaaatagcattaggggaaggagaaaaaaggaactttcgcaaatagttttatttagaaaatatgtccttaggttttatccacttggcttatcctacagtcgagatggctctgataccagcttgtcgcgaccgagaaaattaccttttcccgaacgctagtgtattaatccccgtcccaggaaaagccggggtacaccgaacaaacatgatacaaaaggcacatctttattatatcgataatatttacattattacaaaggcacttaaggcctgacaatcaaaaataaacagcagcggactagcgggcctacggctacatcttcacaggcgctcaactggggtataagccaggactccacctaagacttcttctccaaagcttctcttactgaagagggaaaagattgagcaagaatgagtacatccacagtactcagcgagccacaccggcagatgcatgattaatgcaaagggggtacaaggggtaataatataggggttaagctttgcagaaaacagcatttaaaagtcacttagttgcccaaagccattttataagacgatcctagagctacacaatattattaatcaaggccgtgaaccctcacgaacctgccttaacccaaggcctacgatgattcagaccgaactggcaacccgaccctgagtcccagctcgtcccaagccaacccaggccaaccattccacattttagttgttgagcaaattttaagaattaaaacactaacttgggtacattgcttggcttgcccataaccgagggcgcggctattcgaatagattatactctgatcagaggtgtacatctttacccacaagacacatcttcctcacgtgtaaccacgtgccacataccaccacggtatacggacggaagacgtgacatagttcccaacccatcctagccatagacaagagtaccgacccaatcccacctacggccggaacctccgggacaggtaggcaggattgagcccctagcagcaggacaccagccctgtgccatgacatctcgactaccgggccgcagctcgtgtagccttcatttgtcctagagatgtccatcgacccccgacttcgtccatctccatccgtgtacttttgtttataaccagactgagccacaaactaagccttacccactagacatgtggaagtacggtagtgctttgcaacagaggcccgaagaccggtccttatatggccgaggtgctactatcaaaaccatgcaccccgagcccagcctaaaaccattttggggattttgaatagagggggcggtgtgaatccaattccacaataaaccaacaattccaaagtgtccaggtgatatgaatatcccaaagtctagagttgtaaaaccgcctaatgttacctaattaatcagcgaagcatctacctaaaattatactagtggtactatgagtagagtgtccactagttggggttttgtttaatctagggtgaacaaggtaataataacaataacaataataataaggtcataacaaaggtaaataggcatggctaaataaaacagtgataacgcgggaatttaaataaagcgacaatgcaataatttaaatcaaaataattttataaactgggattcaatatgttcaaggatgatgtgacttgccttgctcgctttcccaaacgccggcttcaacttccacgaagagcggatcttccgagctgcagcgtctacacgaccaacggaaaagaaacggcttttactctactaaactccatataacaagcagaaacaaagcacaaaaatgggttcttgacttcttaaggaaaaattaga

SEQ ID NO: 20834 - DNA, 979 bp, Oryza sativa
tttttgaaggctttcacatggattttaattattctaatcataatttagaggatgtattttagagtcgatttgggacgcgacaaaccttccccccttaaacggaatctcgaccccgagattcggaagaactggcgaagagatcgggatgggctgccttcagctcgtcttcacgctcccaagtagcttcttcctcggcatggttgctccattggaccttgcaaaaacggattacccgattcctggtcctgcgctccatggtgtctaggattttcactggtctctccacgtaggtcaagtcttcgcgaacttcaatctgctctgagtcagcctgctcggacggcactcgaagacatttcttgagttgcgacacatggaacacatcatgcacgttgcccaaggaagcaggcaactccaattggtacgctacttctccgcgtcgagcagtgatgcggaaaggacccacgaaccgaggtgcgagcttccctttcgtctgaaacctgtgtacccctcgcaatggcgttacccggagatacacaaagtcatccactgcgaattccaggtcacggcgtcggttgtctgcataactcttctgccgagactgtgccacctttaggttttcccaaatggttctgaccttagcttcggcttctctcaggatatcggtcccgaacacttggctttccccaacttggtcccacaatagcggtgtccgacatttgcgtccatacaacgctttataaggtgccatttgtatgctggcttggtagctgttattgtagaagaactcggcatagggagactattatcccatgttttcccgaaatctaggacacatgcgcgaagcatatcctcgaggatctggtttagacgctcggtttgaccatctgtctgcgggtgatacgcggtgctgaaatttaatcgggtacccaactcttcttggagcttcttccaaaagtgagagatgaactgacttccccga

SEQ ID NO: 20835 - DNA, 822 bp, Oryza sativa
ggcttccccctcctgaggaaccacgggcgcgggctcggcacgaggggtctccacgaagcaggtccacgccagggactgacaaacaagctcgggcctggaggtactcttgcgagcggtgatcttctggctgcggcagacgcggcggcgcttgggacgacagacctctccctgggcgaccttgagctgacagagctgcgcctccagcacgtccagatccttcttcagctgcagattctcctgacgcagctccaggatcttcatgttgttatcgaccatcccgcggcgcaccatctggtggaagtcgatacgggccgcgtcgtacgcctccaccatgcgcgccaggtgcatgatggtagcgtcatcctccgagctagcatcccggaaggtggcgtagtcgcgggctcctccgcggcgagggtggtagcggtagggcgagtgctgcaactcgtccgggtagcgctggtgcagagtgccgatggcgaggagagcggcgttctggcaagcggcggagaaggaatctccacccgcggtgactgccagcgaagtcctctcaggtgagccagagaggatcactgcagtgacctcccaagcagcgacgggctctgcatcgtcaccctcctgctctgggaccggcttgccctggtagtccactccatgtgtgtcacgtcctgataaattcatcccgaaataaaaatcattctctaaaaggaataatagaattaattaaaatttgaaaagaaattggcaaacattaaaatacgtacaagaaaaattcaaatgtgacccggagaatttttgttaaattctccttggtctaaaagg

SEQ ID NO: 20836 - DNA, 1700 bp, Oryza sativa
  unsure (1)..(1700): unsure at all n locations
ccgtaggcccgctagtccgctgctgtttatttttgattgtcaggccttaagtgcctttgtaataatgtaaatattatcgatataataaagatgtgccttttgtatcatgtttgttcggtgtaccccggcttttcctgggacggagattaatacactagcgttcgggaaaaggtaaatttctcggtcgcgacaatgtggataccccaagacaacgcacatgccccgcagctccaaaacgaagccagtcaagtccagtccacgacgggtgatgctgccggccatctacaaacaaaacaaaatagaaaagcaacattttaaagattagattttgacaataaatgaagcagcaggacagagaaagactagaggattttcacaaataagaaaggatttttatttcgaaaatatcgctaaggcttgggatctacggctcgtcctagggtcaagggggctctgataccaacttgtcacgaccggaaataacccaacgggcgttccttacgtgcgtgtattattccttgtcccaggaggcaaggtacaccaaaagttgatacaattcagagtttaacaagcggaagcgtaaatagttatttattacatgggcagcgacggcccagcacactcaaagacaacgaaaaacagcagaagactaaggcgacgaccacaggcgcttgacggcaggcacgagctagacaccaaagccttcatcctccaggggctcctctgctgggtttgggaaaaattaaacaagactgagtacaactaccgtactcaacaagacacacccacaagtgcagcataattgcaaaggagtacaatggagttataatataggggttaggttttgcaataaacagcatttaaaagacccatagttgctcaaagctaaatttaaaacacgatcctagaactatttaatattattaatcaaggccgtgaacccacacgaacctgccttaacccaaggcctacgatgattcagaccgaactggcaacccgaccttgggtcccagctcgtcncaagccaacccaggccaaccattccacattttagttgttgagcaaattttaagaattagaacactgacttgggtacattgctcggcttgcccataaccgagggcgcggctattcgaatagattatactctgatcagaggtgttcctcacgtgtaaccacgtgccacataccaccacggtatacggacggaagacgtgacatagtttccaacccatcctagccatagacaagagtaccgacccaatcctgcctacggccggaacccccgggacaggcaggcaggactgagccccaagcagcagcgcaccaaccctctgccacgacatctcgactaccgggccgcagctcgtgtagccttcatttgccctggagaatgtccatcgacccccgacttcatccatctccaatccgtgtacttttgtttaaaaccagactgagccacaaactaagccttacccactagacatgtggaagtacggtagtgctttgcaacagaggcccgagcttaatccttatagtggccggggtgctacttcccacaactggcatgcacccaaaccccaccgaaaacaggttttaggggttttgaaaggggaagagaggtgtatgtccaattccaccataaaccaacaattccatagtgtccaaatgatatgagaattcccaaagtctaaagttat

SEQ ID NO: 20837 - DNA, 658 bp, Oryza sativa
tcttttaaagatcatttatctcttcagatcaaatgcatgatttacttatactgtgcatgcgctgtatgcctgcttttacttcctgggagaagttgaaaagtgagaattggttaattgtgccgtgacataccttgttttacttgtgcagtcaagttggattatagtgaagttatctgctgtgaaccaggctgcatgaaggcatttaccaacttggaatgcctcaaggcccataacaaatcttgtcatcgacatgttgtctgtgatgtctgtggaaccaaacagctgaagaagaacttcaaacgtcatcagagaatgcatgaaggttcctgtgttactgagagggttcgatgccacctcaaggactgcaagttgtcattttcaaaggtaggatttcaatctttcagggttgattctgtttcacagaatttttttatttctttccaataaattgcaaatcgttccatccttttcaattttttttttttgggggggggggggggactttgaactgcagaaatccaatctggacaagcatgtgaaagcagtccatgagcagaagcgaccctttgtatgtggattctctgggtgtggcaagagtttttcgtacaagcatgtaagggacaaccatgagaaatctagtgctcatgtgtacgttcag

SEQ ID NO: 20838 - DNA, 4846 bp, Oryza sativa
gacaacccctctccctccctccgccggcgacgaggccgccggaatcgaggaggaagaggggtcgggagaggggaaaaaactgtagcaagcgagggttcgagagatataaccaatatgtctaaacactattaggcatcacactttcaagtaggacgtgttcttcttggcccacttgttggctgatgcaatttccttattccagacgctaggtgtactcatgtgggtgtccctagcaatatactctgctttgcttttccttgactttccccaaagctttcatggattccatgggaacactcctctgtccccagaaaaagtcagaggagatagaaacaaaaccaaggaaaaaaatactaacaccaaaaaatatttttaaaaaagatttgaccctttcaatcatcctcctccagcagagcaagcagccaaaccaccaagctccattcacacacagcaacagcaaccacacacacaaatctagaatgaggaaaaaagaacatcatatcaacaaccaaaaaaggcactaaccatcaatagttggggatgcaagaagagtgatgagtgatgagaattgagatcccaatcctgaaaaacaaaaagtttggatttttttttgccattagagggagcttctttctctcttcttcaagcttacaaacatcccaagggagctacatgcagaaaggttaggttgttgaacagagaaaggaagagccaagaagagcaaagcacccctgctgcatccatgcagagagatagtactacatgatacacaccatcatctttttttccccttttgtttcatctccttttgttggttcatcatctaccactttctatttacaaatgtaaaaaaaaaaaaccagacacctaaggtgaagaaaagaaaaaaaaaagaaagaaaagaagagatgcaaagtctctctcaagcttgcctaggaaatataaaaagagagagaaaaaaagggttgttttgatcagccaagaactggaaggatttgatgctctcctactgctaccattgctaaacaactaatttttagtatgctgctgctgatggtgatgatgacgatgattaatggcggattaattggatgctctaatctcttcctccctcttcctttccctttcctttttcttgcgagctgatgagctaaaaaaagctaagaacggcgcggcgatctgtgcgagctagctgccggcggcggtgggctccgtccatggcgagggcaagaagggctcgtcggcgatgtcgaagagggaggacatgggggtgccatccaatgcggcgttgtcgtcgccgccgttgaggaagaggagctcgtcctcgccggccatctccatgtcctccacgagcagctcttcctcctcctcctcctcctcgtcctcctccatggacggcgtccgcagcggtgtggtcggggagagccccgccgcctcggctccaccacccccggcgccgaccaccaccaccgacggcggcggcggctggggctgcgcggaggcggcggaggcggcggaggaggaagggagcttgttgcgggtggtgccggcgagcgagttgcggtgggtgggcgccgagtggttgtgctcgccggtgtaggtgaggatgaaggtgttggggtcggagcggctcctctccacctgcttcctcgccgggcaccccttcgagctactgcaccggtagtaccccctgttgcaacaaaaccatagctccggtgagcttttccttccatttcacggcggcgccggcgagagagagaaagaggggactgaccttgggtagggtgagcccttgatgggcttctgtccgtacttccgccacgcccacacgtcggccgacacgccgtccgccggcacgtgccgcaccaccttcttctgctggttcttcctggagcaacgagagcagagtttagcaactcggaattaatagaattaatcttttttgtcggattgattaggaaggagatgaggagttcagctgctgccatttctggcgaggtgaaaaagagaagctcgctcacctcctcttggatctaggcacgccgccagctggcacctgcctcgccgccgccggctgcgacgccctcgccggagccgtcgtcggagccggtagattctcctgcaccgtcaccggtttctgctgctctggctgcggctgcgtcggaggaggaggaggaggcgtcggcagaggcgacgacttcgacgaggaagaagaaggaaaggcggcgcagaacgccttgaggagctcgtcggcgtcgcggccgagcccgccgccgccgccgtccctgaccgtcagctccgggaagctccacgcagcctccaccccgacctccttctccgccgcaacctccatcgccaccccctgctgcaagaacgacgcgaacggatccacctgctgcgccaccgccgccggagagatcctccgtcggcagcagccgaggcggacgacggcgtcgaggtcccagttgttgccgcagagctcctcctccatggccgtcgagaagaaatcaagaaaatcctcaagaggaggaggtggtggtggtggtttcttgggctctagagaggagataagagggaggcgctgacttttgctagtttattgattgatttggaagagagaaggagactatgggaaagggtaaaaggagagagagagagagaggaggaatggtggtgatggcattggatcctgccctaaaaaggagtgagggctactggtctattttcttgggtttttttttctttttcttcttggagggaggctggttttataggggtgtgggggcagcacaccccccacttgactctgcagcatgtcaaaggggtgagaaaggggatactccatgggtgggaggggtataatgggaaaagctcactgtgattttttttggacttttcttggagaaaatgtatacctcctgtattggatttaagaaaatgggaggtgatcagtatatttgggaatgtgttttgttctgaggtacaaataggcacataaagaaaagcacacttgtatggtattttttgtcgcttttcacatatgcaaaactggattttatatgcacactagaattaaagctcaaatgattcctggcttctaaagcatgggagtagttgcttcttcttttttttttgttgaaggtgcatttctatgtacctatggcttattttggattttgttccgatacaccgtgagagcgtgtggagtcaatattaggaataaactcgagctgccttgctagttattgccagctgagtaaattctgattctccaaatctgttttgttttgctctattaattagctaggctggattttttatacgagctacctaggctgaataaaaaatgtgttctactaactaaatacaatctatgtgagatatatgtagatttacatctatgcgcaaatgaacccgcactagaattttataaggcccgactcgaatgggttggacttgactctaaaggtaacccatctcgaaggatgtccccggaaaaagaattacatattagtatcaggactaataataatgtaagttaacaaaaatggtactatttgattgaaaaggaggggtgcgcttgtttgctgacgagaacacattgatgtcggtcagttttttgcaactaatttttatttggttcatgtcgtattgtatatacaaaaatagactgtctatacacaccttacctaaaaattgttataatacatgcaaatgctggatatattggctatttgattggctagctattttttctccttagttatgatctgatcaataataactactgtttggttcacaaaacatgcccatgatattctcaatttctggtaaaatgcattggcaaatggaatgagctagacaagaggggtctaacaggacactacaccttccatgctacattaattagaaaatttgatttgggtgtacacaccttcacagtcggcgaatgtactagaagcacgttatctaaaaatgggacatgccacatgagattgttttgcaaatcagtgctccagttcataatattaattaaccaatatacatacaccatcaacacattaacatagttaaactagtcatgtcccatttattatagagtttaattaaaactaggaaggtagcccgcgcatacgcgcaggcgtgttgtttaatcttgtttgcacttttattacgaatgtttacgtgtggatcatatttttgaaatatttttttgactctattttaaacgtatgttcaataactggtttgggcgtattacttgaaaatgtatatcctcaaatttattaaaaaaatgtcacaataatggagttagttcatatctatttgtattatgtgtgattcttccttttaaatttttggagtttcccaactttatataacattttttattgtgtatgttatagatgactttaagtaacattttaattttactatatattaatgaaagatattttctattaaaaatatagctaataatactacttcatctaatcaaacataaacttatattacttatattaccaccgtcacgtaaatcgaaggagttaacttttatcccaaaataatagaagaatttatatgtaactaagagaaagtgattttttttaaatactatcacgataatccaaagtacggtatcatactttgacaaatatctatagggtagtgcatgttagttcagtgtctgttttgtttataacacctattgttctaatcacatgagacacctttagtaatttggttaatacatatatatacttaaattagcgtatatattcgtcaagtggtttcttacactaaaatgtgatgtgaaattattatcataacattaattattacatgt

SEQ ID NO: 20839 - DNA, 5142 bp, Oryza sativa
tagggacggagggagtatagcttttttaaaatctcatttcctctcgcctctccataatgttacctttttttattgttgaatgaccaccccttaatccttctacgcagtggcggagtcaggaatttaatcctgtcgggttagttactagcactggtttgtatttaagcgaggtcatttctttaatttttctagatatatacatgaaaaatcaaggtctacaggggtattgtttaaaatgctgtgggtcagcggatcccacaatttatacatagattcgccactgcttttacgtagtcatcttacttgatcatcggccgatcacgttctctcacctcaatttcctatgttttattcccgttgcgacgcgcatacacgttgctagtcctatttaatattgaagctaagaaggtggtgaatatttatatatggacgtaaggaaatccttagtacttctacttaccaatagagttagacgaagcttccacactcaagcttaaaaattacaataatgctcttaatcggagaaccgatcctaggcggaaatttaaatgtccacactactcaatcactcactcatttttttatgggcttctaaattaagagaaaagtacaaagaatcccttgagaaacacataatagggataaactcaaagttgttttctatcatatatcattataagagcaagttttatagtggagatggcaactatatctccagttttagttgcatcatccactcactgattaagaggcaacatgtaaaacaatttaccttctacacacaaactccaataatttttattggttcactctcacattatctcactttatttttggtgtttgtataaaggttgctctgtgcatgagtggtgtctcaccctctcttctcacttctcttctccatcttatcacataattctttatggcatttctagaggtggcatttttagaggtagcacaaaaatctgatctagtagtacttgctctaagtgttccttcttattattaaaatttaaatggtaaactagaatttctgtagtggtatggtcagactttttttttttaccgagaaagataatactccctctgttttaggttataagacgttttgactttgatcaaagttaaactacttcaagtttaactaagtttatagacaaatataataatatttataataccaaattagtttcattaaatcaataattgaatatattttcataataaatttgtcttgggttgaaaatgctattattgtttctataaacttagtcaaaattaaagtagtttgactttgaccaaattcaaaacgtcttataacctgaaacggagggagtagctaggaggagccgaggagctaataatctttaaattatttaagtttacgagtataagaaatttaaatatttaaattaaggtgctaagaaatctctacgaaaacaggcttggttctaggttcaaacctaggatcatcattaaccgacacacaccaaactatagtttccatgtggtatgactgacaggtgctttgtcccgtactttcctattcatatttatgcatgtgaggttgatgcctgccatgagcatcaaattcaaccgggggtgcaatgcatgttcgaaggttgttgggtgcaatgcatgttggaaggttgttggattctgcatgcacatcccatcaaacctacaaccccctgttgttaccaaagggattaattagaaaggtgatgtgcctgccctcttggtatattatttgaggcacaaattaagtgctcaatagctcgttctatcatgcggcttcctgttcctcctactcccaataatttgtgcaatgtcatgtcacgaataacacaaggttggccggcctttttgtgtggaggcggccagcgccgtaattcacaagtggtaccatcgtcttatccgtgtcattatcgttacggacctggttcataaatcttgtagttacaaattactttctctaatatagtagtataattggatgcacccgacactttgatatcctttttaagtgtgaacaaatatttctcaattttgaaagtgaatgcgagtgatattgaaaaaatgatggatcgaatttgtctaaataaaacttttattgcatttcaaattaaaccttgggattactatcaatgtcaaagcaaggatttagatatatagggaaagagtctaaataaagactattctttccgtcacaaaatataataacttgtgaacatttttagatacataacataaaaattactatattttaagataaaggtattatttcttaacttaattacttgattaattggataaccgtaaatgaaaaaagttggcggagggggctagccgtctgacggtccctccgcgctccatttcctgtttttttatagagaaatctacaaaccacttaatgacttgactcgcgaggtcgtggtcagtaaacataacatatggttctttcttatcaccagaaactcgatcaatcgagatgtgatgagagcacttggagtgaagaggataatgacagtctctgcatctctctctctctctctctctctctcctgatcaactgtccatcattataattaattatttgcatcatacccaaatcccaacagtggcctccaacgcatctgtctccctcgcttcggtcgctcgaccaccaaaattgccctgcactgcactgtgcggtgcgcctgcctgttcatcacagctttacaatgattgtgtagtgcaccatcctctgttcccgttctagattcagatgcatatatagcaaaggagtgtgacaaggttagggagctgtttgaatgccaaggtttcaaaaatcgtttgccgatcgaataccgctcccaaggggtttcttctgttttcgcagtaaccgactgaatttatcgaataaaataatctttgtttgattttttaaaaaaaacttgaccagtttatcgagtggcttctcaatgtgggagcgattcaactaattaccattgttttcaattataattgttggttttgtgaaccatgttgaatatggtattcactttgacaaaactttgaaatgctaaagagaaattaatctcattatattttctcagcagagcacaagttctgcaaaattccaatatgaaagttgattctacaaacgcttaacttattttcctctctctgttagccttagccaacctcctttttcaatgactaaaatactctccacattttcctttttagaattcttgacgaatgatatgtggcgcatgtgtttgactattgacgaatgatatgtggcggcagcccatgtggtaacctggcccagtgtcttgtggctttgtgcatgctggccctgcaaatttgatgggcctgtacttagttagcttcagtgctctacagtagttttggcccttcggcgagtcatttcacggtaaccactacagtatattctttattgatactacagtagtagtaagaaatactcctactaagtgataccccgtgcttcacagtatgtatggataaatttgtattaaatattatagaaattatagataaatatatgttaaaatattataaaaattacgtgaggatgatgattggaaatatttatgtgtaccatgtttgagtaagatgagatttaaatcgctatagaataataattgctattgaacgatgatatgacatatttagatgatgatcggaaatatttatgtgtaccatgtttgagtaagagataatagttgtgagcgagtgtcaactataagggttatcgtcaattggatttcgcttacctttcgagaagagaaaagaaaatagaggaaaagaatgtagaagccattgttataagacgtttttacttaggtaaaagtcaaactactctaagtcaaactactctaagtttaactaattatataaaaaatagtaatatttacaacactagcatagtttcattaaatctaaaattaaacaattttttataatatatttgtcttggattaaaaatactagtactacctttttcctataaaattagtccaacatagagtagtttgactttgaccaaagttaaaatgtcttgtaacctaaaacggagggagtaaatatttttttcaaatacatataaaaaatcacatacacatacataactatgcgcatatattattgaacgcgcaaagatatagtctagaaggggggggggtgaatagactttactgaaattcacaaacaaatcgcggcggaaaaattcagcaggaccggaacttccgggtgtagaacaccgaaacttctggtctgctcagactgtccggaacttccggtgttctaaataccggaacttccgagcaacagaaaaactgtaaaactagcggacacttaaattaaattgcacgaaatgaactataggaggacagagtagatacacattcacaacaacatgcacagaatcatcacagagaagacaaaggcgattttttcccgaagttcggatctttcgatcctactctccgttgaggtgctccaaagagccgggtctcgattaaccccttgcctcacctatgcaaagaactcagaagaagtccaaggtcttcaactcaacactcctaggtcattttctagaatttgagtgaccaccagatccaactcacaaatccttctagaaaagaccacaagtgcaagttgctctaccgaggagaacctctgaaatctcagcacaagaatctttactcacttacctcgtttccttgtggaggtgaggaaaaccttcacaaactttcccgagacatccacaagatctttgaaagctcgcgggcgacacctaaccgtctatgagatgatctccacgagtaataagcctcaagtgacagcccacaagatatccaaagtactcaaccacaccagtattcaaagcttctccaaatcactcctacactctcatctattctcacaatctcacaagaaagactctagatttgagtggaggaagcaaagggatcttgggagaggctagaacaacctagggtgtggaagaactgaagtgaaatggccaaaaggtgtgctgggtgtgatttggatatatataacggctaggtgatgtcatctagccgttactcacaattttgaactggaagaagtccggaagttcctgaccct

SEQ ID NO: 20840 - DNA, 3661 bp, Oryza sativa
cttccggccaacacttaggaaaatttcagccaatgcagggtccagaagttccgggtccagggaccggaacttcctgccagccttctctgttcggtctggacccatttgaaaaaatggctctcaaaaatattttatcactaggaacccactaagagcacttttttatatctcagaacaacacttggaaccccctcttaatagtacggtttttactaaaactcgattttaaaaattaaactatcctattgaccttcgagcttcaaatccgcttgaatgagtgttgttgggggtctccaagcatctcttgatcacctaagttaactatgggactaattaccttaaagtctcaataaacacattagtcccttaaccttattcatcattaatcaccaaaacacattaggggataaatgcaacttcaattatatgtgcacatacatgagtacaccttgtaacacagtggggattgtctgtagtattgctgatgcagtagcagacaccgatgcgtgggtccggaggccatcgctgaatcccttccctcgtattaaaatgcacatcgacgtgtactccatgaactcgctgaaatccgatcaaaattgacgcacccgctttgtaatcactggccagactaacacctgtttaaaacatacttgtgtatacgtaatattaattagcaacataatttaaaccttagcgattagtgcatgccccaacacttctactactacgcaattcagttcttttccaaattagtgcatactcatacaactacgcgtacacgaactcacaaagtaagccttatgatacagatgttggaattaatgaatgggccttagcccactcaaagattaattctttgaaaaatcacaaaagcccacctcatgggatggcatgcatgtggagtttagtaccaccttgcttattctaggaaagggagacctccttaaaagggaggatgccctcctagccacttgaagcatgtgtggtggagagaagagggggaacacacacgcgcgctcgctcgcctggctgttttgttttgctgcctctatataaaccgagccgccgccttcacgcaacacacgcgaaatcaatctagggtttgcctcctactctgtgctgcgccgtcgctcgtaggttactccatcctgctcgccggtgtgcacctgcgatcgggagagcaggtctccggaacctctgccttcgatgtcctgcaccgggagaaggcggcaataaggtttttgggaagcgctttgcgcgactgctccctgttcgtccacgacggctcgtcttcctcttcgctcgcgcgttgcgtgccttcgtagacacctgcgaaaagtttcgaccgagtagccggtctttccgccacctcggtacgtgttcaatatgttgcgcatgtttgatctgttcatgttatactgtgtagtttacatatatagatctaatgatgcgttcatgctagttttcatctgtaatgtcatgatttatttatggaatatattaaatcattatatgcctataatctcaacaatccaaaaaccttattataggcactgtgattttactatggctggttttgccgatgcactgaggccggataaattcaccggtgcattttaagagatggcagatcagagtcactctgtggctgacagctatgaaatgcttctgggtgagtactggcaaacctgaaggagttcttactgctgaacagcagaagcaattcgaggaagccactactctctttgtgggatgcattcttagcgttcttggcgatcatctggtcgaggtgtatatgcatatgaccgacgctaaggagttgtgggatgcactgaatactaaattcggtgctactgatgctagcaatgatctgtatatcatggagcaatttcatgactacaagatggctgacaaccgttctatagtcgaacaggctcatgatatacaaaccatggctaaggaactcgaactccttaagtgtgtcttacccgacaaatttgtggtcgggtgtattattgcgaaactacctccatcttggagaagtttcggtactgcactcaaacacaagagacaggaatactccgttgaggggttgatagcgtctcttgatgttgaggagaaagctcgggaaaaagatgctgcgtctaagggcgatggtggccagtccagtgccaatgttgtgcacaaggcccagaacaagagcaaggggaaatacaaagctcagcagaccaccaacttcaagaagcagaagaagaacaacaataatcctaatcaggatgagaggacttgctttgtgtgtggtcaacctggtcatctggctaggaagtgtccacagcgcaaggggatgaaggcacctgcagggcagatttctaagtctgctaatgtgaccattggcaacactggagatggaagcgggtatggtaatttacctactgttttttcagttaatcagtctactaattggtgggttgatactggggccaatgtacatgtttgtgctgatatctcattgttttcttcttattaggtcgcacggggttccaccgtcctaatgaggaatgggtcacatgcttctgttcatggtgttggcatggtagatctgaagtttacttcgggaaagatcgtgcagctgaagaacgtgcagcatgtcccttctatcgacaggaatcttgttagtggctcccgtctgactagagacggatttaagttggtttttgtcacgcccagaaattcccgaatagaattccaagcagaatgtgcattaaaatccccgtccaggaccagccggggtacacaaacgacaatgttgacattcagatccacgtcttacaaacatcataaaagtcttacaaaaatgcagcggaaaacaaaagaaactggagctaagccttgactaaactgcagcgggaacaccactgcacaggcatcctagacggcacggacgaagcctacttctcggggaaaccttcatctgacataaactcatcctctggggttgggaaaaggagagcaagactgagtactacccactgtactcagcaagtcatcccggaataggggtatgatgcagggaattaacaaagaagagctagagtggttcatttgcataaatactggcatttataaacaggaattgaatacgaaaacggttgtaataattaagcagtattaaacatccgctgtccaacgctaacccacgttgcgacaggcccaaccatccacctaaactatccaaattcaacagattacactagggtgagactaatcacggtgaatctggttgaccgcccataaccgcgggcgcggctattcgaatagctttactctgatcagaggtgtacaactgtacccacaagacacagccccacgacacgtttccgtgcgccgacatgccaccacgacatcccggaaagaggctgtgacaggaccattcgcataaccccctctaaccaagcacaccacacctcaggtttcacccccactccttgcaaggcagcgggcagtcccctctcgtgcctaggtgaatccggaagccgcatagaccgtcgcagggcccatccaaactccatcacgcccacccttgcctggatgcgtcggctagaggaaagctacactacaagcccagccgttgcccacgctggcttgtggtaagtacgataag

SEQ ID NO: 20841 - DNA, 4911 bp, Oryza sativa
taagactactgaaacagggaacaaaaccatttttaatggattctacacatttttcttgatttactgagacttgaatgggataaacggagctcggatgaattagttatgaattttagaagattcactgtgtttattactataaccataatccttaaatactttattgcgcaataaattccagggctgacgtcagcacaggtggcgcggcgccgacatgcggggcccaccggtcagcgacacggggaggagagaggaggcgtcggcccgcgggcccaccggtcagcggcacgggaggggaaagaaggggcggcggcacccggcgcgaaccggctcaaggccggccgaccgaccgcggcgacggcgacggcgcgcgcgcgaacgggttgccggcgacggcaaccggcggcggaggcgacgcaaaagcggcggcagcggacggcggcaacgacccaaagcgacggttagcgcgggtggcggcgacgcacggggaaacggggaaggagaggagaggagatgcctcaccgagggtggccggcgcggaggaagacgatggcgaacggcgacggcaggccacgggaggcgacggcgaccggcggacgagcttcggcgtgccctaaggaaggagaagagagggattagagagagggagatagaccccggcgatcggaaaccatggccgaaggcggcggtggagatggcgctcacccgtgcgcgtggggatgagggctccggcgacgaacctcgacggaggaggggtggacgaggtggacctcggccgcgcgaagctaacggcgacgacggcgcaagacggcggcgagcctagcggcggctagtggcggccgaagtagcaaaaacggcggcggcgggtggttgcacggcgcgggagcgatggggagctcgggagaggtcggcgaaatggggaaaaagcgagagggggtgccggcgatgcttaaatagggggagagggaaccggacgtggccgggagcggcgggaatcgccggccgacgcgggggagtggggagaagagagaggcgggattcggttttcgaatcccggccatctcgggcgcgggcgcgagcgggagagagaggggaatgggcgcgggagacgcggcgcacgcgcgggcgtggtcgacgtggcccgaggaaggcggagacgtgggcgcggcgacggttgcgggcgcggcggcgcgccggaatcggcgggaggagggagacgggtccgacaggtgggccccacctgtcggcgaccccgagagaggaggcagcggggcggcctggctgccggctgggcctcggcctgcggccggcccaacagagaggagggggaggaaaaggagaaatgggccgacggcccatttgacaaaaaggaggaaaaagagaggaaaaagaaaaagaaaaaggaaaaaggattttctctggaataaaatattgcttgctcaattttaattggttgaaattatttctagagctctgaaaattccactaaaaatcctgttaatgaattttgacatgtagaactcaagaaaaattccacatgtcaagtccgattattatttgcattactttcttagggttttctcctgatttcacctgcattttcttggggtcatttgtaaattacgattttggcttgggaggaaaacttcggggtgtgacagtttttgagtctaataaagtagtcgtgtctaaacatggatattttattggtaaaggttatgagtgcggaggcctgttccgcttttccctttctgatttctgcaataagtctgtgaaccatatttgtggcagtgtggatgatgaggctaatgtttggcactcacgtttatgtcatattaattttggcttgatgtttcggctttccagcatgtgtttaattcctaagttttccattgtcaaaggttctaagtgccatagttgtgtgcaatcgaagcaacctcgcaagcctcacaaagctgccgaggaaagaaacttggcaccactagaactcctacattcagatctttgtgaaatgaaatgggtgttgacaaagggtggaaaacgatatttcatgactttgattgatgatgctactagattttgctatgtgtacttgttgaaaacgaaagacgaggctctagactattttaaaatttataaggcagaagttgaaaatcaacttgacagaaagataaaaagacttaggtccgatcgtggtggagagtttttctcaaacgagtttgacttattctgtgaagaacatggcttcatacatgagaggacgcctccctattctcccgagtctaatgggattgctgaaaggaagaaccgcacactgactgacttggtgaatgccatgttggacactgcgggactacctaaggcgtggtgaggggaggcattgttgatctcgaatcatgtgttaaacagagttcctaacagaaataaggacgaaaccccatatgagatatggattgggagaaaaccatcactttcttatttgcgcacatgggggtgcttggcgaaagtcaatgtaccagtaacgaagaagcgcaaactgggacctaagactgtggactgtgtctttctgggatatgctcatcacagcattgcctatagatttttaatagtcaaatctgaggtacctgacatgcatgttggtacaattatggagtctcgtgatgctaccttctttgaaagctttttcccaatgaaggatacacatagtagttcgagccaaccatctgaaataattcccggttcaatcacaccaccagaacaaactgaacatacacatgaacatgtcactaaggaggatgacagtgaagctcctcgaaggagtaagagacaaaggacggctaagtcctttggtgatgatttcactgtgtacctcgtggatgacactcctaagtcaatttcagaagcatatgcatctcctgatgcaaactactggaaggaggctgtccgtagtgaaatggattccattatcgctaacgggacttgggaggtgacagagcgaccctatgggtgtaaacctgtgggatgcaagtgggtgttcaagaagaagcttagacctgacggtactattgaaaagtacaaggctcggcttgtcgctaagggctacactcagaaagaaggcgaagatttctttgacacttactcacctgttgctagattgaccacaattcgtgtgctactttccctagcagcctcacatggtcttctcgttcatcaaatggacgttaagacagcttttcttaatggagagctggatgaggagatctatatggatcagcctgatgggtttgtagttgaaggtcaagaaggcaaggtgtgcaaattgttgaagtctttgtatggtctgaaacaagctcctaagcaatggcatgagaaatttgacaagacattgacatctgcaggcttcgcagtcaatgaggcagataaatgtgtgtactatcgccatggtgggggtgagggagttattttatgcttgtatgttgatgacatactgatatttgggacaaaccttgaggtgataaatgaggttaaatcatttttgtctcaaaattttgatatgaaggatttgggagtagctgatgttatcttaaacattaagctaattagaggtgagaatgtgattacactcttgcagtcccattatgtggagaagatcttgaatcgctttggctacattgatagtaagccttctccaacaccttatgatcctagcttgttgcttcgcaagaacaagagaattgctaggaatcaactggaatactcccaaatcattggctcgttgatgtacctggctagtgcaactaggcctgatatctcctttgctgtgagcaagttgagccgatttacctctaatccgggagatgatcactggcgcgcgcttgagcgagtaatgcgctatctgaaaggtactgtggaattggggcttcactatactgggtatcctgcagtactggagggttatagtgattctaactggatctctgatgtggatgagatcaaagccactagtggatatgtcttcacactgggtggtggtgctgtttcatgaagatcttgcaaacagaccattttgacgaggtcaactatggaagcagagctgacggcactggatactgctactgttgaggcagaatggctgcatgatctattaatggatctgcctattgttgaaaaaccggtgccggctatccttatgaactgtgacaatcaaacggtcattgtcaaagtgaatagttcgaaggataatatgaaatcgtctagacatgtgaaaagacgattgaagtttgtcaggaaattaagaaactctggagttataacgttggattacatccaaacagctagaaacctggcagatcccttcacgaagggactatcacgaaatgtgatagacaatgcatcgaaggagatgggtttgagacccatgtgagttatactatggtggtaacccagtctatgtgatcggagatcccgtgaattggaatctgggaagaacaaaccataagtaaattagaggagagtaccaatctataccctctctaagtgaagatgcatgtactctcgtgaactgcaaggcaggttgactatgccttaatgagttctgttggctttaattggcgaagatgctgtcctgcagagcattcttgaaagaactcacctttgtgagcttgattgttggtcgcagtctatggagattttgggtgaatcttctaggaagcttactaaagacctaggagtatgacttatacgctccacccgaggggtagtctacagacggtctagtaccagataagactctgagtgaaacttgcttgcacaagacttgcaattcaaggcttagtctattgttcaagttgtgagtaagtgtagcttggagttctaggtggatgttcacccttaatcggtctccatcgaact

SEQ ID NO: 20842 - DNA, 12641 bp, Oryza sativa
  unsure (1)..(12641): unsure at all n locations
gtggagtttagtacccccttacttattctaggaaagggagacctccttaaaagggaggatgccctcctagccacttgaagcatgtgtggtggagagaagagggggaacacacgcgcgcgctcgctcgcctggccctggcctggcagggcaggcggcgctcgtgcacgacgtacgcgtcgaatggtccgtcaaaattggttcctcaccttgcgcagatgcagtctcctttggcagttttgttttgctgcaaattcggattcgtttttgttttggaaacatttcgaaaaatccggtgcgtgcaaacggcgtggagtccggataagttacgcgcgacttatccggttcggttacgcgcagtggagatcgttcgggcgccctgatcaagcgacccttctctatataaaccgagccgccgccttcacgcaacacacgcgaaatcaatctagggtttgcctcctactctgtgctacgccgtcgctcgtaggttactccatcccgctcgctggcgtgcacctgcgatcgggagagcaggtctccgaaacctctgccttcgacgtcctgcaccgggagaaggcaacaataaggtttttgggaagcgctttgcacgactgctccctgttcgtccgcgacggctcgtcttcctcttcgctcgcgcgctgcgtgccttcgtagacgcctgcgaaaagtttcgaccgagcagccggtctttccgccacctcggtacgtgttcaatatgttgcgcagtttgatctgttcatgttatactgtgtagtttacatgtgtagatctaatgatgcgttcatgctatttttcatctgtaatgtcatgatctatttatggaatagattaaatcattatatgcttataatctcaacaacagatgcttaaatagaagaggctgtatctccatttgtattgtaatattttacaacactatgattctaccaaattgaaacgataccgatcccatctaatatttaaattagtttacatagtattttcatacggttctatggaatcttagatattacattgatttctatgatctttataatcctacaaaatattattaaaaataatatgaataaatatgcttaagtttacataaaactgattaatttttttaaaatcaatactatatactataatttatacacaacacacacacacacacacatatatatatatatatatatatatatatatatatatatatatatatatatataatataaaaataagtactttctaaaatttgttagtattccaatcctacttagcatctcgatacggattacctttggatggagtggagccaattgtccctgtgtcacgaaaattgaattgacgaaaaataccctccgtgtgagtgtgacgcaccttacatcccagcacagagggaggtggagagcacgaatctcagcgcatggcctgcaccaaacatgatactactcggtgcagcagttagtgggcccgcattgccattggctgcagggaccagcggagtgggtagcaacgacggacggcgcaacgtgtgggcacgcgacaccgcacagcaaaaaaaaagggtaaaatgtcgggtgcaggcacaaccccaagtaaccaccactgaccaaagggccccacgtaccatcctaccccacctgtcagcgtgcgtaccgggtacagaacccggtgcaaaaaagaacaaaccagggccgtttcacgctttaccagcctggcgcgtcgcgtccgtccacatgcccccgcactacccctcccctccacatggcgcgccacacccacgagaccaccacgtgcttgaccacatgggcccacctgtcattcactccaagatctccggcccgggtcacgcgcgcgcggccgcattgattaataagggggaggggaaaaaaatctcccgtgggccgctgcaggtgggctccacgttagctccgggcccacgtgtcatcggctatgtaataataatataatataataataataattgcagtatataggggggatatagtcgcggtcgcggggagccctaggcgagcgagggagaaagagagaggcgttggtcggtggccgcccgtcgcttctcctcttccgacgccggcgcggccgagagaaatggcggtggctgcgagggctccgctcggggtggtggcggtggtggccgtgctcgtcgtcggcatcttcatgcccgccgcggcgcaggccccggcgcccgcgcccgtcagcgacggtgaggatatcgttgcccgcctctctctctctctctctccctctccgaagccgcattgcgcgccggagttctcgtctgctccgtagcctagcgcattctggttctctggcaccgtgcggcggctgactggttccctggttgttccccagttgttcgtcgatccaccaaaggggaaatttaatgccctctcgttaagagtagatttaattttgttttttcgacctgcgcctgaaatgtagtacgcattaaccttttttttttcagcaccagcatctatagcttgcgttagatccctctttttctaattttagacgttattaataattctagtatagtagtattggaccgagcatatatttagtgctataaatcattcaaaatcttcggcagattcggatctctgttgtgacgtccttgaaatttcctttcaatttcagttccatttggcaatttctgcagcgcattacacgaattaaatgctatatgatgcaaataccatatctctgttgtagtgagacgtatactagaacgatctttttttgttttgttttccaattactagatgatgtccaggagtagttgatctattgggcgtgctggatagatccacagtttacctttttgttgcaagtggaggcaggcagcttacacttgcctgtcattttatactattattggtggttcccgttcctggagtagctttcagttgatattggttgccgcccctttacacgtctctgactgatgttacagtttgggtagcctgaaaatgaccacaatttctatcaaaatgtgccatctgtaacaactgattagtggaggtggcaggtattacaactttacaaggatgcgccatttgtattactgaacgccgcaaatggcttatctttgtttagttatgaccttgacatataatctgttttaacttcggtttattattacgagtcttggtaacaaaactgtaaacaagaacaacctgtgacattttatagtatatgcaagagacttaaagttccattttctacttttctaggcctcacagccaacaattctctatctttgtgatcaccttgtatgatatgcttgttatatctctctgttcgcacgaattgaattaaaaaagcaacgtggtaactgtgatatgccatttcctatcaacatagcttcactatttttttttgttatgaacctagttgcaatttgccacatgctgttggtttgctatctattcgataactttctccatatgctgttttgatttaccatgacactgatgtgcattttgctcctgtaattgctttccgcaggcacatcgatcgacctggggatcgcatacatcctgatgctggtggctcttgtgctcacctacctaatccatccactggatgcttcttctccctacaagcttttctaatcccttgttcttccttcatctggcttggttagggtaaattctacttattatttagccatggcgacgattgttaacattttaggtgagatgttaggaggtttggagtgatttgtctgtccatgatgggggtggtatcaatcagatcgttgtttggtggtgcgattggctgtattggattccatgatttggtgccaagttgtgcgtgctggattcgttcattttctgtttcttttttagctggcctgtgactggttggcatgtgctctctgacgtgcggtggttttgtccttgtgacaactattgcgcctgcttgcctgctctctgtgtgtgtgttggtgctcgtcagcactactgactcgatgacggtttcggtttctctgtgggccgatgcaaatggtcattgttgtttttattcccaccttgtcagtcaaaaaagtttcaaacgactttcttcctgtgaaatagtagaggtaggccttgtttagttctaaactttttctttaaacttccaacttttccatcacatcaaaacttttctacatatataaacttccaacttttccatcacatcattctaatttaatccaaacttttaattttggcgtgaaataaacactcccgtagtagtagtagtagtagtagtagagctgataagtatcccttccggtcataataataatcatttgatgacaagatttgagcgctttgtgtttttggtgacatctcggtttaaaagggagtaaatttaattgtggtagacctgatgaacctcaaattaagatgcatgccgcacggtatataatccggattgtgttaagacggacgtaatcctgtctgcaacataagggagagcaataaatgtgttgatggctcgagtttagtcatttttaacaagacttttgatgttgcatggatccaccgttgtttatatccgataattttagtgcctcgagtagtgagttaagttgatatgtgtaggtaacttgtgcacgaaagaggatgctttggatgatctgatctgaaatagtaagaaactacgaagatgcgtcaaaaaccacgcagcacctaaactgggttgggcctaattaggctgtactaagggtgtgttcggcaccccttttcccccttttgtcacgtgcatgtttttcaaactgctaaattgcgtgttttatttgcaaaaagtttctatatgaaaattgtttaaaaaaattaaattaatataggcaaaatatataaatagtagaattaatatttccttaatagagaacatatggaaaatgattttattatttccgtgctataaacacatctccatcatcacgcaacaaagtaagcctagcaatgctttagttttccttcaaggcactaaacgaacgtaagatcagggcatccaggaagtgcccatgcgtaaaaagttggtaaaagattattttaactcttatctggcataaaagtttagcattgacaccgctcaacaatttaaaccaagaacgccaacttagatcagatgcaatgcaatggtgacacagctcagcaggtcttgcacgctttaattctagacaaattgcagaccgtctctcaggaaaagaaattgcgtgtgtcgaatgcataaaaaaaaaggtagacttcccctacaaacaattcgcgctaaaattgattattgctgctatccaatctgaactatctatggagtattaggagttaaaatttggatattcgtagatgaataataaccaaccctgtctttccattctgttcagtaatagaataaaaaatgacaagagccttattttccctaaattctctgaaaaaagaagaaattctacctctttatataagatttaatgaaaattgagatgatcactccaatcctttagttatattcaatcttgtaatcttgtatacttaaatttcaatcctgtaaccctgaacaaaaataatatatatgctccaataaacatcttcaatttcaatccagtacattgccaagacaaagaatagcaaaagaattatagtgaaaatagcaggatttctgcactcccctgtgttatatgcctgacatatattgtggcattcgatcgtagcctagatcaatctgtcctacaggataaaaaaaatatcataatgcaaataaacaagagatgctagccagtatagtactgttttggtgctgcaaaatttccttggagcaaactgtatcctgctgcctgttcatgtccattggtactgccctgcaaaatcaattggaagcaagatctactgcaaaaagggaaatgtaattgcaggagaacagagattggccaactcacagcatggtttcttggtccttgattgggtacatcatattatcctccatcctctgattgaaccaaaacaaaaattcccactcaaatctaagaaacataaccacatatcaaccccaaatcaaatgaagtcccaaatccagctatacaagagcagcacaaatttgttggatctggagaactaacatttaagggcattgtgttggttttggagaagaaaaaattctggataatacacgtatgtgcaattgtagatatagcgatagcacctagccgtgaggtccacactcaccaggccgaccacagctccccctttatatggtcgtactgttctggtatgcatttagcaaaaacattttctgaattcctcataaaacagagaaatgtcaatctctggaccgtaggaccagagatggggaaccaaattcactgcaaattaaggaaccatctgtttaacttttcacatagataaaaagaaagtagataaactttatagaggttgttgaggaaatatcataaataaatccaaattaaaggtcaccatatctgacaaattaaagctacacttgaccatagacaaattaattaaccgggcttgctagaaaaatctgagattgatttggtagcaaactgcacaagagtgcaatgaacgcacgggcatacaagcacctagaggaatcgatttcagataggttcagttggcattataaaacaatatgcaaacacctgaacaagcacctagaggaaccaattttaaataatgcatggtatatataatacaagtgcttctgaccaccatattctagataatcatgacacattgttcagaaatgcttttgaccacagtttttcaggtctccactgatttaaaattcagaaatttattttgatggattattaggaaggaaagcagcaactaccaaaattcagtatagcattataggatccaatcaaacaaagtaaaaatacacaaaactcaacatgtataaatttgacaaaggataaactgaccttgcaataaattaagagcacctcaatttcataaactccttttgttatctcatagctcattgtaagcagatattaggtgcaaaagatgatacttacaaataaggatcttgtattgatcagttcaacaaccaaacttctatttatcactaatcaaaagtaggattgtactgcattgatctgaaaaaatatccgtcgcatgagtataaggaggtcaatagtgcagatgatgtgtagcatgactacaaagtttgccggaatgaccgaaggaggtcattcaatgtaattaagataggaagaaaaagttacaagaaaaatttacatcgatagctggctgtcgaggaaggatgtgcaccagagcacacgccccgaaccatgtgccaaccgtccgaacacacactacagagagggaagccaagcaccgaaccggccatcgctatgcgagaccgatcgccaccgagctaacgacaccactacgacacgaagactctaaaatgacgccctcacgagggtcgcgacgccaaaagacgccgtcgtcatctatccaaagactggacaaggttttcacccagagctccttgccgagggaggagggatacctcaacagtgccctcaagagggttactacgtccgaaggcgaagtcactgttggcccaaagaattgggctaagctttcgctcggaaccccctgcccccgtggtacattacccaatccgaattcaccatctgaacatcggcggcacatgggtttcggcacacccgaccgacgccccttcgtngggcggcttcatcgaaccaccattcctgagagctggcccaggacctcttcgtttcaccacccgccgggcttcttcgcagatctgggcgaaggagaatccgggattggatggcatttgttcagcagcctgagcttcccccgctgacgagctgccacctcaatccagcttagaaactccccacagagaaggggaggagctccaggaagggtgagggtgttgaccggcaacgaggaagacgacccaccgccgccagctcccttagcacaaccatctgggcctacgccgacgccggaaacattgccgctctggctccggcgccaccctccggcctcccattgcccggccaccgctccccacctggccaccacggcgtaatgctggcagtacttacagcttacttagaaaatgaatagacacatagacaaccaaatttgcctcacatgactcacctttgccgcactcaatgtatcagctctgagtcctttttgttcataagcgaggaaggaatcaataagggagtactgcaatgttaaacaaaccaacagatcaaatccctaagtaagaatgcacaatttcttaatataggaaatatatgttcaaatcccaaaatgtgagtcatgttctgtacaatcagtcatcaatttcagtaaggaaactatatttctcataggcatatggactcgattatgacataatttgactataaatgaacagaataaacttgcagggatgtgagcgcatgttacttgcatgtaaggaccttgtggatattgacctgcatcgatagttggattgtgctgcagtgaacaacaataagatgaatttcatgagcataaacgggaatataatattgaccaaatgtaaacctcactctaataacacaaatggtcccatttatacaaaagtctgcttgtttttatactcactgtttgtattccgatttaatatttcatgctatcattatgtcaggcaataacaagcatccgaactcatccaattgtagaagttatatcatatagatagtgcaattcagtttatattttatttataatggccacgatcaaaggataactcatcagctgaatgaaattgtcacaagagaaggtttccaatactcaccttggagagagcagatagcatgacaatcctgatggggaagggatgattttgatttggaataaatttagcacaatatctacctaaatgaaatgaaaccaaatcaacgagagagattcaaaagaaaataccgatgacatcctaactgcagcaaccaaatgcagtttgaatgttttcaccagtaagttcacaactcgggcactaccataatgagctggtttcaacttttcacaaaaaaaagattctgaaaaaaagaaggcgggttcatgagatatttgaccatatttattcaatagttgccgtcaacagtggaacatgcatgacataaataaatataccagtggtgcaggcattaattctcttaatactccaggttaatatcattggttctgaagcgatctaccagtggtgcatacatttattttcttaattctcaaggttaataccactggtccttccttaccacttgaggctttgacaatgccatcagtccatattctaaagatgatgaactacaacacaaaatggacagttctgtaatttaaaagtaccgaacaaaatctcattaagaaatatgtatcttgaaccaaaacattcagactgaagcacctcgtgtatttctccgggctaatgatgccagggtttaactaacaaaacataaaccagaacggagatcgtaaattattggctttttctaaatagcaacataatgatatcttgggttttttttctcactgaacaccttttgaatcaagaagaaggaacgcctgctggttttgaattgaaaatcctaaaatgcgttctctaattacattagatcagactaaaaacaaaatcataaacaacacaatctgctatccctactgacatggaagaagcactatacctttcatcatcctcaaaacctcaagctacaacaatcaaaatcgatgaacaacatcaagagtaaggacaaattagagaatcggaaggaagcagcagaggagtagagtagcagaggagggaagcagagaagggttagtcgggttcgtcacaatggaggagcagatgaggaaagaatactccctctgtttcacaatgtaagactttctagcactgctaacattcatatagatgctaataaatctagatattactatatatatatatatatatattcattagcatatatatgaatgtgggcaatactagaaagttacattgtgaaatggaggaagtaccattttataacaccaagccttcatcacgagccaatacaccactactccctccgttcaaaaaaaaaaaaaaaaactctatcctaggatatctagattcgttgtcctacgataggtcacgtcgtatcatatcctatgatatgtcacattctatcctaacttgggttttttttttttaacggagggagtacttattggcgatgcaatagccaacggctgtgcatgcagtcaagacctgcatatgatgccattgaactggtgtacggtcaacttgtggtgtaactctaaaggagaacgtgaggctacctatactgagaggcggaggcagtttctgcgcgtcgtgtgaggccatggctgtcataaggaagatgtgtgggagagaacccgggtccatggcgaagatcagagccggcacagccgccatcgccagggcagagctagagcgaaatggagggtggtgccatttgcttaatttactctactttagatcgagtttaagctgatgcgggtgcctaagtttgtattgaggggggtgcatgcatggtgaaaataggtgaggtatagctaaaaaattttcttgaccgggttcctgggcaccccctattacatagtagctccgcccctgaattatttgccaccagcagaagccaccatgagcagcgccaccaccaccagaagcagcagaaaccgtcgccattgaactctggatgctgagggagcgaccgtgaactccgagaccgagttatgtgctaaactatattgactaaatatggacaaaacttgcatcagtaggttttaaaacttaaataaaatcatctacatgcacctgaattcacatggagctgctggtagcaaaaaatagaaactcacatttcctaatggctgacatatatacttgatcctagcatgtttgacaattctcaagggttgaacacaaattcagtgactacaacagaaattcagaactcatgtgaatcctcctgaactcggatgcattttgatttttgaaatgtattgtcaaatttaatcatagcgttagcacggggagaactcatgtgagtactcctgactagaggaaaaaggaaatgcaggagtaatacattacaaatgtcatctcttgaggtgctaaactgtcagatatttttccagaacaaagcagtatgaacatgatattgtactgccagatatataaatttgaattcctcagattacctcatagcagcctagcatgtagccttagatttaataaatctccaattgcttcagctggaaccacaagttgaaactaaaatgcagaaaacaaacaagtcattataaataccctttattgacatgttcagatccactacaaaagaaattgatggtgagactatactatataaaatgtcatctcacagattatataccatgtgtatataaatttggtggtggtatataaaactaactgagaaatgaatcatatagaggtttggtggtgatatctaaaactaactgagaaatgaatcatctagaggtatagaacagaggcaattgagagccgtagatcttcctattattcccatgttgtgacagtaaattttcagacttacctatcttatatttttcagaaactttcagtgttaaaatagatgatgttgcatccctatgtatgcctatattttatatatacatgtctattaagagaaaagttctgctgcagcagaatatgcatgacaatactaaagaccataagagaacatgtaagtaaccttaaattaaataaccgtgaacaactgacatgtgtaagatagtaggtgttgtctgattttagagttaggtatagcaatcaagagtttaggttttcacctagagattatagcatgtgggttcacaaaatctgaataactggagctgtatccttaaagcatcaatctgggaacagaaaaatgcaaaagaagaattcgtccggtgaaaacatgtgggtttgcaagttgaaaaatggaaaattcaatacattggggatgcaacaccatctatttcaacatcatctattggccggcggaggggttcgatatagtagaaggcataggttactaaggaggtttcatacatttaaaatattcatgtatagatttgaaagaggtttgaattatcaaatgaaaaccgctgctcacaaccatcaacttgaaagtcccaactcctaaaaaccaaaatctatagaattcaatattagttcgattgctaggtttctgaaattgtaatctctactgtcagtcagtcccagtcaacaaagcatcatgtatatagaagtgattccttgcatgagttgaagtcaacatgagcaatgaacaaatataattgatctctgcatgactcagatattaagcaagatagggatattatggaagagttgaggaccttctttttctgttatatgaatttttcactaagacaaaaacttttttggatacactattactaaacagtaggtaaagaatagacaaattagatgtatcagaaataaaagttgtaggaatcacgaccaccattatggtcttttttagtagtagagataatgatgtgaatgtgttaatg

SEQ ID NO: 20843 - DNA, 5044 bp, Oryza sativa
ccgtcgccgtcacgaccgccatcgccgccgccgcccacgtcaagcagagcgacgacaacgacgatggctgggacttcctcttcatccaacgcgtcaaccggtcacatccctaaaccctttcccttattctctattgttgttcaatcatccatcgcaaatagaaccacccgactagatctaaacctaggtgatccaatagacaacctaacaatggtatcagagccaccctagagtttagattggttggggaaagaaatccaaaagaaaggcaaagaaaagcaaacgatccaacggatcgaaaagatcgaaaccctaaccctaatcttacctcgtcgccggccgtcgttgacgccggccacggagggggagaggggcaaagaggcaccgccgaggagccactcgacagccgcgtgcgcacccgcgggtgcacgcgcgcgccggcgagggggcccgcggcggcgccaccatctccgtcgtcgccggtctctcactcttcactcgcgtggaggggtgagacggtgggggggagaagagaaaagaatagagggcgtggcggcgcgagggcgtcggccatggcgcggcggcgcgaaggctgccggcgtcggcgacgccgctcggcacggcgcacgcccgcaagagaaaggagagggcgccgcggcacaaccgctcgacggcggcgcactcacccttgagtgagtgcgcgcatcagcgaaggggagtgggacggcgccgccgtgtcgccatgccgccgccggcgctgtgctagggtttcggcgacggcgacgccgctccgtgcaaccgcaagagaaagaagagaagaggagctagggtttcggcgccggcgggcgggggcggttttgtttgcccgatccgcccgcgcgaccgtccgatcgaaaccctagcgatcggacggccgacggcggccggaccgaaatcggcccatgtgggagcgcacggcgagccactttcccggcccaggcccaggttgcggcctggggaaaggggagggggcgcccgcccgcgcgcaaggcggccgtgggccgactggcaaaggccgaaaaagttcattttaggtccctcggggccgaatcaaaagaaaggaagtttaataaaagtccctcggccgaaggaagcattttcaatatgtttaatgattgtgtttatttctaagcaatttgaaccaacgtgaaaattgtttagagaatagataaatgtgagaaatgcttctgaacatgtattttgtatttttcatgcaaattacaatagaattttgaattgttttacatgttttatctctgtttaaatttgaaccaacgggagaattttacagagcgtaaacaacagagttttgttacaatttatatgaattgtatatagatcttccgctgcaaatagatgaaattgatgaaaattagtgtttctaaaattaaatttcgaaccaacaggagattttaattttaggaacattaattatgtgctatgatgttgtaatttttctgaccaatgttgataattgcaatgttatagttatggctttatgtgttatgtctattttctgcccaacggtgatgtagacttaatacataataattttaatgttaattttgttctcacaatacatgattatcttaggtggctactccttgatgggttacattaaagatattccgaccctgaaaggagataactacgaagaatggaaaagagaactcgaccttgcttttatcttgggagaggtggactgggtgttgactaccccatgtcctatagaacctgctgaaattttcagaggtgaaaaagagtcagatgctgaatggcaaaagagagagagggacaatgcttccctcatcatgtcgtatgacattgagcatgcgaaatggtcttcagccaacaagaattgtttggctgcggtaaagaacacgattgagccaaccatattgggctcaatcccagagtatgacactgtctctaagtacctcgaaagtataaagagccagtttagtggttcttcaaagttttatgcgacacagctgataaagcagcttgttacagagaggtaccatggaggtggtgtaaaagaccacattcttaggatgagcaatatggcttccaaattgaagcaaaaagatttgggcatctcagatgactttctggtccatctggttttgtcctcattgccaaagaactttgacaaccttgttgtcaactacaaaataagtacagagaattggaatattgaagagctcatctctaattgtgtgcaagaggaggaaagacacaaagagaccaatggtgactccattaaccttgtcaaagataacaaggaaaagagccacaggtcaccctcctcaaaagaaaaacagcctcagcatctgcctcagaagcaacagtttacagttgagacaagatcagtgtctacattgcaagaaaagacattccaagaaagatcatcctgacttcctgacagtgatcatggcaaagaaaggtgagaacattattacatttgtaaagaatctcattatgattggttattctagatccacatggtggattgattctggagcaactattcatgtgtgtaattgtttaaagggattccgttcaatgaggactatgcaaagaagtgaaagatccattagagttgccaatggagttgaagcaaaagttgaggctggagatcttcgcctagaactcgcgaatggcttcacacttttacttccagacgtttttatgttccttctttgcaaagaaacttgataataagtgtatccaaattggattttgatagatatgattgccattttggaaatggcaaatgtgaactatggtataataatgaatgtattggtcttgtgttgcaagatcagctttatttctttctgagaatgtgaatgttgtgtcctcgttgacaaaagaaaagaaagcgaacttctgatgtctcatcgaaattatggcactgttgtttatgccatatttcgagggggagaattgagagactggttaagaatgtagttcttcctccattggagttctcagttttagaacaatgcatacaatgcatagaatgcatcggtgcccaaaacaccgtatgagctatggatcctccgtgtgtgggggagtcctgcaaaggataaagtatttaacccaaaacagtaagctgccattttattggctattctaaaagatcaaagggtcatcgtttctactgtccaaacagttatacaaagtttgtagaaacgggacacgtcgtcttcttggaagacgaaatgattagggggagctcggtaattcgagaaattgatcttgaggagagccgggtgtctgtacccgctccgtcgactcagcaacctttcttctctctacctgctaatgttgtgccagcaatgcatgccgttgcggtaccaaacacctgttgtatctctcctgtggcaacaatgaatgaaagtgaggaacctgttctacaggattcaacagaaattattgccacatcagaggaggagatgaaacagcctcaaacagataatgtgccagaataggaggcccctagaaggcctgaaagagtcgcatatggaggatgatcccatctcatatgaagaggccatgagaagccatgaaagatgaaatgaaatcaatgaaattaaatgatgtctgggatttagaagaaattcctaaatgagccaaaacagtaggctgtaaatgggtctacaaaaccaaatatgactctagagggaatatagaaaagtttaaagtgcgactcgtggcaaaaggcttcatgcaacgagaagggattgattacaatgagacattttctccagtctcttgtaaagattccttcaggattataatggcactagtggcacattatgatttggaattacatcagatggatgtaaaaacggcatttctaaatggagatttggaggaaaaagtatacatggcgcaaccgaaaggttttgtcatgaaaggaaacgaaaatatgggatgccgtataaagagatccatttatgggttaaagcgaagcttcgagacaatgctacttgaagtttgatggaacaataaagaaatttgggttttcaagagaatgtagaggacaactgtattgattcaaagttaagaatgggagactcattttcctaattctgtatgtagatgacgttctactggctagtagtgatgtcaatctactgcaggaaataaagaaattcttgtcctcaaactttgacatgaaagacctcggtgaggcttcatatgttttgggcatagagattcaccgaaatagaacaaagtatgcattgggattttctcaaaaggcatatatatagaaaaggtgttgaagaaattcaatatgtacagatgcagtgttacacctgctcctatagtcaaaggcgaaaagtatggggcatcgcaatgtcccagaaatcagtatgagctcaataaaatgaaaacaaagccatatgcgtcagctgtaggaagcctacagtacgcgcaagtgtgcacacgacctgacttggcatttgttaccgggttatttggcagatttcaaagtaatccaggcccagtgcactggaaattggtaaagaaagtcttgcgtgtttgcaaggaacaaaaggcctcatgatgtcttacagaaaagcagaatcgctctagatagtggggtattcggattctgactttgcaaaagataatacaaagttaacatcgggatacatgtttaccctggcagcaggagctatttcatggaaaagctcaaaacagactaccactgcagggtctaccatgtatgccgagtttatagcatgccatgaggctacggggcaggtgaactggctaatgaagttcatacccggttttaaaggtggttgatagtattgagaaaccactaaagttatactgcgataaagaatccacagtaatgtactctcacaacaattagtcaagtggtgctgccaaacacattgacataaagtactatgttgtgaaagacaaagtccgggatcaaacaatcagtctcgagcacataagaacagaaaggatgctcgcggat

SEQ ID NO: 20844 - DNA, 2718 bp, Oryza sativa
  unsure (1)..(2718): unsure at all n locations
tataggtagtcattaaaaaaggaataactctatttcgcctccctaaactcatgcccctggttgaaatacatccctcagtcgtaaaaccgggtataactcatgccccaacttccaaaaccgtagcaaatagactccccaagcggtttaaggggcggtttcgtcctacatggcacttacgtggcgagttgacttggtctttataccacgtggggcttacgtggcactaaaataacaacaaacctaaatgggacccacatgtcagtgagtaaaacaataaaaataaatttcagactcacgtgtcatttacattgtcacctcctcttaaacctctctctctctcatgtggatgttggatggcagtgacaggcaaaccgtgtcggaagtggatggcggtggcggcaagacgtagcacggcggagggcgaggactacggcggaagctgccgagtttgacggctaggtcaacaaggtcggcggatgaactctccactgcaggcggcgcgcgagcgtggtagcgtcaatcttggtgaaggggatgactccccacgccggctcagcagtcagcatcctctcctcctcgccggttccccacgccgccgccgncttctncccttcgctctccttccctaacgccgacctcgtcgtctgcctccgcctcgacccctgccccgacgacaatgcaaatttcgacgccactgagtatcaccgccgctatcccgaactttttctttgtttataggatatgaaagatgtaaaaaaggcttaagaatattttaaatctacaagtcacatggttggttcttgtgaagaaaatatcaaaaaaataacacaaaataaaaaagttgcacatctctcctctacactagagaggagaggagaggaaaagaatggggttggggccacattggtgcactccccctgccacctcggcgccgacccgccacggtggtaggaggacggcaccagagaggctggcactgtcccgttggatgactggcgccagtgattctggtgctccaaaaaggatcatttctgggataagtttttctaggggtctatttgtaaaataagttttttaaaagaaccaaattgtaaaaaattagaataaataacctgtaaagaagaatagatttttcttttgtcaaacaccacatcattcctacaaaaccttaatggccaacaaatagttgttgcccctaacaggataagtgacttaaggcttttcctaattccccgtagcaaattaccaaacatgttggatacaccacgaggcgggaaaagccctgtagccacttgtatagtgcaccacacaaaacaggcaaatttgcattcatgaaacaaatgtaaaattgtctatctttgtgacaaaaggaacaattcttaggaagctatatcaaatggacccttaggtgtttgtacaattcaatgaaatcaatccatttcaaatgtttttctttctctaaacaagattttcttttcttcatagggataattttttttccatctaagaatgacgcttttttactagacgtgttaagatttcttctaaatttgttaggcataccctcaattactacaccagtccatgtgactctagctacaaacactagttgaacctacaatgcattgagttaaacatccgtaattttgacattttaacccttttgataaacgtattctataagtaaacctggacaaaaaatataactaaaaataggccttcacctcagcatcacgggccttggcattgaggcccaacatcataacgccagacccattggctgtcacgcccagaatttctatccaaaattccaaacgcttacatgtgtgtgaaccctcgtccaggaatcagccgaggcacacaataacaaattgataatagagtacaaatattactctaattaataagcgaataaaatgtcattacagaggtagatagttcctctcaatcaataaagatctaagcagcggaaaataaataaacggcgcagacggctccactccacaggcagcttgaccaaggctacacctaaacctccacaccatcagcctcattgtagaactcttcctctgatgaatgattgcaaggtgagtatatgacatactcagcaagccacgcagcaaatatgtaagtgcacaggataacaaaggatggcataatagggttgcatttgcaaaagcagtatttagcaaacatttgagaatttaacaaaacagttgagtaataattaagcaatattaatccaacgctatacaacataccctgttgtataggcccaaccattctgaacaaccaccccggctgcacagttctatctccaaaccaggaatgtaccattccaaaccaggagctaatcaaattattaccagttatagcatcttttactatgatgagaggtgtgagactaatcacgaaagacattgttagacccgcccataaccgcgggcacggctattcgaatagttttactctgatcagaggtgtaccactgtacccacaagacacaaccccacatcatgtcaccatgtgcctcaataccaccacggtatctcggaaaggagttgtaacaatacccctcgcataacacaatccactgcagcgcaccttcctggatcataatcacccccttataaaacaaggcatggactccccagcgacccccgtgggcttatctccgccacttctcagtctggtgccccgcaatgaaccatgctatac

SEQ ID NO: 20845 - DNA, 7784 bp, Oryza sativa
tgagtcccagctcgtcccaagccaacccaggccaaccattccacattttagttgttgagcaaattttaagaattaaaacactaacttgggtacattgctttgcttgcccataacagagggcgcggctattcgaatagattatactctgatcagaggtgtacatctttacccacaagacacatcttcctcacatgtgtcacgcccggaatttctatccaaaattccaaacgcttacatgtgtgtgaaccctcgtccaggaatcagccgaggcacacaataacaaattgataatagagtacaaatattactctaattaataagcgaataaaatgtcattacagaggtagatagttcctctcaatcaataaagttctaagcagcggaaaataaataaacggcgcagacggctccactccacaggcagcttgaccaaggctacacctaatcctccacaccatcagcctcattgtagaactcttcctctgatgaatgattgcaaggtgagtatatgacatactcagcaagccacgcagcaaatatgcaagtgcacaggataacaaaggatggcataatagggttgcatttgcaaaagcagcatttagcaaacatttgagaatttaataaaacagttaagtaattaaacaatattaatccaacgctatacaacataccctgttgtataggcccaaccattctgaacaaccaccccggctgcacagttctatctccaaaccaggaatgtaccattccaaaccaggagctaatcaaattattaccagttatagcatcttttactatgatgagaggtgtgagactaatcacgaaagacattgttagacccgcccataaccgcgggcacggctattcgaatagttttactctgatcagaggtgtaccactgtacccacaagacacaaccccacatcatgtcaccatgtgcctcaataccaccacggtatctcggaaaggagttgtgacaatacccctcgcataacacaatccactgcagcgcaccttcctggatcataatcacccccttataaaacaaggcatggactccccagcgacccccgtgggcttatctccgccacttctcagtctggtgccccgcaatgaaccatgctatacaaaagataaagccgttgcccatgctggcttgtggttggcacgataaatgtttcacaaccgaaactcgtgaaccggtccttaattgtcatgagcacgaccatcaaaaccatgtgctcacaacccaccattaccaggttttagttggcacattaattaattaactaatcacgatcgaccatcgtgaactatcattaagccatcatgaaataatagtaaatcattagttatcccataagtgtactaatgtttctaagcagggctaagcaattatatctaatatctagttgaaccaatataattaaagctcaactagtcaaattaatataccccaaggtatcaaggaataaggtaatcaatgtacaaaagggccataacaaagaataggtcaattccacccaatgacattcgaaaatagatgcaatagttgaatagaaacaatagctttaaataggatcaacatgctcaaagggttgtttgggatctgtgtgacttgccttgctggccttggaactcttcaaactcttctttcgcgaaaacggactctccggaaacgacggaatctaagcagaaaagagcaaaatcaccaaaacagcacatgaacaagcatgaacagtacatgtggatatttttaatgtgtagatcttaattttagaaaaatttagagacttgaaccaactaaatcggagctaagatgaattagttatgaatttttaaagattaaatcggattaaaacacttaaatcgattaaaattgaattatgacgcaataatgaattatttttgaaaaggaaaaagggattattgcgtcagcgggctagggtttggtggaccgggcgcacgggcggcggttcacacgaacggacggccgagattgatccgatccaaatcggacggccgagatcgatcgggtccacggcggttcacggcggacggccttgatgacgccagcaatgacgtcaccgacggcggcggcggctcggcgaggcagacggctcgggcggcgcacgctcaccggcgaacggcggcaccacggcaccaacggagggcaccagcacgtagaggacaacacggcgaacacaccggtgaccaaaacggcggcggagaaggaacggacgacgacggcgacgagaaggaagcggcggctaccttcgggttgtcgacggcgacgaagctccggcgggttccgacggctgcgaaggggcggacggggacggcggcgacttggcgatgacgacggcggtcttcccgagcgacggcgacggctggaacgacggcggcgcacggctgaagcggcggcggcgaaggcaaagctagggcacacggcgctagggctactccggcgacgagaggcgaaggcgagggtggcggcgagtagaggagacaccgggggtccttttaaaggggctcggaggcgacggcggaggcccaaggcgacgacaacgacgaaggaaacgctcggcttggagagaggaaaaccgatccgaaacgaactcgattccacgacttccaaaacgatttagccaaagattccaaaggagaaaaggtagaggagatcccggagatcatttcccctctattgattcggccggagaaggaaaggaacggccagatttggaaaggaaacggcggcggcgcgaaactagggtttcggcggcggcggccgaaggaggacgatgggtccgacaggtgggacccacctgtcagcgaccgaacgcgcgcgcgcggcggctgcggactgggccggctgggccgaggagagagaagagaggttttgggccgactttcggcccaaagccaaaagagactttttaaaacctttttcaatttaaattattccttaaatgcaattctatttattaaaaatacttccttagctcaaataaatcccagaaaaatctaggaattatagaattaagcaaagtatttaatgaaattttatctggccccattttatattggaatttattaattaaaattagattttcttttcaagacttttaaaattatttctaaaaattccaattaaacaacaatttatatattttgaattttcagggtgtgacattggcgctgaggccgtgaaatacaatatgaaaagagtaatagatctaaatgcatatgatttcttgtgtgttgtagtggtgagtggtgttttgatggtttctggagatcgccaaactacatggcgctaggatgttgggcctcagcgtgacccatgacgctgaggtaaaggactacttttggttatattttttttctggttcatttataaaataagttcttcgaaagagtcaaaatgtcaaaatttcaagttaaatatactggattacagctctttcaaaagtgtttttcttttcttttttgcttttgaattgtggggttgtaatgtttgttgggtcatgatgagcacaaacctgcacgtaagtgtacagaggtccacaacgttaaatatcagcaagcgtggcacaattttctgcaatatttatagtacgatagtaatattatttaatcctcttttgaattatttaaatgatgcctccaactacctgcctgcaaatcagctcagatccaacgaaatggtgctactttccaccctttttctttgggggcgacgaatccatccatctaccctataggcccctccattccgtgaatatttttttaaaacttcttttggaccgcacaaaaaaaatcgcataatatgacaaattttacatgaatttcatcagaataaataaaactcataaaatcgaaatatcctagctggaattttatacccaattgaaattgtccataggattatgctcctcaacttgtcactgtcaactgaaattccaaatcattctgttcccatttcaaaaataaaaaggtaaaaatcaaacgcatccaaacaaacgtgatatttatatttgcatcaaaaaaaaaaaagctctctctctctctctctcgctctctccacatcggtcgtgcggtcgtgccgccatcaccatcgcccctccccctcttcctcctctcttctttttccctccctttcgcttcgcttcctctcctcctctccaccattggcgacctcgcaaaccctagcgcggcgagcggggggaagatgagatgggacgcagcggaggcggaggaggtgctggagcggatctgggacctgcacgaccgcctcagcgacgccatcctcgccgtctcccgcgcgcacttcctcctcccgccgcctccgcctcctccgcctccgccgccgtctcagccgtcggcgccgcccgcgcgcgaggggaggaacgggtacgtgttcgtgaaggggttgaaggggggtggaggaggagaaggaggcggggtgggggatggtgtgggcgtgggctcgccgaaggccgcgccgccggaggcgatgccggaggcgaggagcctgcacgccatacggacggcgctcgaggacctcgaggagcacctcgagttccttcatgtgagattgcgctcgcctcctccccttcctctgttcttctagggtttttttttgctctggattggttacctggaggaccatgtatgagttgttgcaatgaatgggggagtgggggaatggatcctcgtcaggctgggggagagtgcgttgttcacgtgattgcggctatcatttagcttcgttttcattgcgcggcctgtagactgtaatttgagatggggctaatgatttcaatttcttcatgggagctagcttctgttgctatccacctggcgcttcgtttgatgtttcgattggatgttgattgcatcatgctgttcgcatggtaggatcattgagttgctgctcatgagttatgctgaattatgtggtttgttaatatcatgtcatgggtgctggattttggcctttttctttgggtgtttggttgtgcatatgcttttgactataaatttgctaattaaggcgcaaatagattggaaatgaaggcatgtggatgttaaaaaagtgatagtccacatggctttattctcttttttggtggttttttagttgatgcttgctatttgtctaggcaagaaaaaacatcatttgttctgtagtcatttgtcactggataaaagttcatagcataaaaccatgattaatatgatacttgaagatattatttggtctataatcattcatcactggttaaaagttcagcataacattggccaaggtatgtaagagaggctaattttgctgtagtaccttaccagaatgaaacagagtgaagtagctcttgctttgtcatgttccattttagttagttctgagcataatttggttactgtccttttatgagtggtgggttggaaacctgtgcatacatataggcaatgcacagttccctgtgtgtttagctaattcagttctatctttcctacttaatggtatggttatgaagcttgtgtttcttagtcgttaatattgttcttcctccacagaccgttcaatcacaacagcgggcagagcaggatgctgcaattgctagattggaacagagccgactagtccttgccatgaggctagctgaacatcaggggaagaagtatagagtcattgatgaggccttggcgtttgtaggcgaagttggtgacaagagtcgattcatctcaccggaagatgttcgtgcaactcataaccagtcaggggaggatgtaatggacagtgggagcaacggttcaagtattatggggaatgtgttatcttgtagtctatctttggccaagaactcatttcgagtggacaaaatcggtagtgctctgggtaacgctgcagcgtttgctgtaagtatgtttgctttcttgcagctgcatcaagttgcctttggaagcaaatctccagcaatggattacaggaggcacagttaccattctgggagctcactacagagtggcaaaggaaagcaactcgaagtgtacctagccagaggttgaggaatcatcaagtcacttgctgttgcctgtacagaagttttgaccaaataccagttttcaccggttttgttagggcactaatcattctttatgacgaaatggactatgtttcaggctactaggatactaattgttaattcgtttggacgtgttggactacgttccaattaatagacgtcatacctctaaacctgtaaatggatttttcattagagatggatggaatgcttgtaagtctgtattctgtcagccgattggaattgctgtgttaggtttgttgtgtcctcatgagttatgaggattgaggagtgttgaaaggacaactgtttgttgtgccctcatgagttatgaggattgaggggtgttgaagcattcaaggattcaaggttctttgcttaactgagaagtccagttttttcttttcttttcttgattattgactattttcgacatcggctaccttacaagtacatgtgatgcttcatgcttgtgttcttttaaggcagtgcacttgagggtataactttcctgtgtcatgtgcttgtgcttggtgattcctacatcctcctggcatttatctgtcaagtctggatcatatctggtgccgaagcttctttggttaggtccatacttcgccttggccactcctttacctcagtttactgcttttgctttgttggtttgccggctctttgcacactgctgtctcatgctgcaaagattgttaatgttgagtacctgtgattacatggaagccttttcttcaatacgtactaagcattagctttattcagccatatgggtactagaaatatatatttagtacatctgtacataagcctcacgggaattctgcataatctggtatgctcttactggacgactttatcagtggtatcaacgttaaaaaccatatttaacttgaataatatggttgctttggctaatcatagtatcactcatgccccttttcagggcatttcactcccatgttggagaaaagaaaaaagaaaaaggcgagattctatgcttatggttccgtggtttgttctttcgaaatttggcatccataaaggaaaaaaaaaaagagaagacaaacgctaacagtgagggaataaaggattaaaaaagtgaataaatgattaaagatgttcacttcttactaatcatgctcgacaagacaacctcttttggctgggaaacaagaaggaaaaagagggcacagaaacgatctcagcgtcgccgattaatattttatcctccgttaaacactgatatggaggagatgttgttctttttcctgcaaaacatttgtagtagatgttgtaaatcaggtcttggttgctattccagtcaatttcatcatactttattcgttcctagttacatgccaatataatctttcggaacatgtgagaattgttgagagaaaaatacccgaatgccggctacatcttgggccacttctggctgccattgattgcatgctctagacatcgcactgctttggggggaaaagtacaccgaaggtccctcaacttgtcatcgggacacaaaaacgtcctcgaaccgcaaaaccagatatacgaggtcccttaactatacaaaaccgttcacccgaggtccctaggtggtttttaccccggttttgtcctacgtggctgctaagtcagcgtgggacccatgtgggccccacctgtcagcgtaaccca

SEQ ID NO: 20846 - DNA, 5839 bp, Oryza sativa
ggcagtggcacagctatgctcagagcggtcgcgagatggggagagatggagatttgcctcgtgggtggcggccggcgggggagcccgcgcgctgctcctccgccgccgcgtcgcccgtcgccaacgccttgcgggtgccatggaggtgggctgcttgcgcgcggcgtccggcaggaggagcaggagcacggcagcgaccaccaccacgcggcggcgacggcggaggtggggccaggaggtggctagcgcagcggcgatgggtgcggaggtggacaagccgacattattcccgatgacaaggcagacaagctatcgctgccgaggttagaatggagtttcgcctggcggccaccgtgccgtcgccggtgctcacgggcgcgtccgactccatcgacagcctcgacttcgaccccaccggccaccacatcgccatcggcggcatcgcccgaaagatccggatttacagggtcgccgagccatctagccccgtcggctgcatctacatcccggcaaagctgagtagcgtgcggtggcggccggggcggcggcgaggtagtggcgcacgtgggttgcagcgactaagacggcgtcgtgacggagtacgatgtggagcgcggcgtgccggtgtgggagcgcgacgagcacgaggggcggcaggtgtgggcgacggcgcgacatcgtcccgtcctcttcgcgctcccccctagctaccgccgcagccgccatacccttctccccccgggctccggccgccgtcgcgctgccgccgccctcctctctcccgcctcgcctgccgacctctgcaccgccgctttgcctcgccgagaagccgcccagaaagagggaaggtgatgatgtggcttcctgacatgtggggcccacgtgggtcccacgctgactcagcagccacgtaggacaaaaccggggtcaaaaccacctaaggacgtcgggtgaacggttttgtatagttaagggacctcgcgtatctggttttgcggttcgaggacgttttttatcccgatgacaagtcgagggaccttcggtgtacttttcccctgctttgtgctgttgatttggcccaactggggcccactcttggctaggttttttctgcttttttaacatatctgtattaataactataaatattcgacatttaggacaagattaaattaatattttaaaactttaaacactaataacttgtcaaatgcttttgttttttcaaaaaaggtatgcatacttttgctttcaacttattcaatttattctaatataaaatttatggtaaaaaaaattaatagttagactgaatcttgtcttcaaatataaaatatttatgaccggatgaagtaattgataacttttctctcatttatttatatgaatttagatgaccgtgtgtgttgtgactgatgtaaaaaacctgtagtaccagatgaccttttttttttttttgaaagtaggctaaaggattgcctagctcattaataaaggagagaagtttatagaagttatttacagaaatgttccaggtaaccaaagaaatggcaacacacgcttgaattacaaattgtcatatagtcaccaatccatggatatgcttgggcaagcacaatctgtgatacagttcacatttgagaaaacatatgctctgaatatagcacatcatccttttgctaccagtcaactaacatgggctgttaatactttggtagctagctgtttacagaaatgttcagtgtaagtgtgtaacaaaaaaaaaaacaagaagaaacgatacacgcttcaattacacattgtcatatatagtcaccaaaccaatgcatatactcatattcagtgatattgttcacatatgagatatcagataacatatggtctgaacatagcatcaatttttttgctagtattcaccagtcaaccgatgctttggttttcaatccaatggtatcgtgattcttcccctcttctagccagcagcctcgaggccaggttcgccgggttcagtaatggcaagctcgggcccgccggatcaacgacggcgagctaccacggcggcggagacggctctgttcccaaccttgacgcctcttgctcgcccatccggtgtcgcaatgacatgatactccgttgagaatcatgatttcctccggacaattacatgcatgactggatcatctgcatagacctatacgcatacatggcaccatgagacagattacaaagtgtcctcaaacaagattgtcgagtcaccaggattgttattattattatttttttttgtgcttgatcttcagtaggaacaagaagggggaacggagaaccaactgaccgtgcagatcagcagatggtacatggaggattccttctcggctctgttaatagtatataaagatatgaactgtttttccgttgcaagttggatgggaaccacttttgtcttggaagcaagtacctggggaaagtatgcatcagattgcaacaactgttctgtagattgaactgaaggaaagcagatttagctaatgcaaagatctccaaaatatgcaggatgtaaaacgttttctagaggagatttctacctggcgatcgattgcgaggggcgatcagactcggatcccctccctccacctagtttccttttttggcatcgtattactttcctattttagtaaatttatacacctaaagtttacacatataaagtttagagacccaaagtttataaatcaaaagtttatatatccgactcaaatttgaatttgaattcaaatattttttatatatagtatttctatacatataaagtttatacacctaaagtttatagacccaaagtttataagtcaaaagtttatatactcgattcaaatttgaatttgaaatatatccgatttaaatttgaatttaaattcaaatatttttttatatataatatttctatacatctaaagtttatacacctaaaatttatagactcaaagcttataagtcaaaagtttatatacccgattcaaatttgaatttgaattcaaatattagtttatagacccaaagtttataagtcaaaagtttacatacccgttttaattttaaatttgaattcataaggtgtagtaggaagagaagaacaggagaagcaagggggaaaaggagggagtgatgtagcatatagggaaggggcgggcgggtgatcgttcctagccttacccttttctagatggtaaactctgcaggattgtactgagccgacgccagtatatttggataagcagataatgctcggcagtcagtacaagatggaggggttgataccccagaataaattctttttccctaacataaattgggtgatagtataagtgatcaagagcccatgaaaaaataaccacgtcagtatcctgtccaatatgttttaccttaactggtattttttctttcgcgaacgctccttactggttctgaatatactaacctttttcaatgtgaggttagttctttttccattccgttaccttggcattcctgtataccatagaagacttcgtaattcagagtggaaggaagtgattaaacggcttgataaacggttggcaagttggaaaggcaaatttttatcacttatagggcgactaacactaatcaattcagtgcttactagcctaccaatgtatatgatgtcctttttggaaatacctaaaggagtgatcaacaagattgattatttccgatcaaggttcttttggcaaggggatggacacaaaaggaaatatagactagcaaggtaggacatcatatgtcatcctaaagaccaagggggttgggaattcaaaatcttgaaattaagaacacaactttctttagcaactggttgtataaactactcactacaaatgctaaggaacaaatatttggggtcacagcctttgtctcaagctcagtggaaagcaggagactcacactttttgtcacgccccggactagccccgaacggaactagctcgtgacgctccaaattaacctgttgaccgataccagtcccaggaaacagtgctggtatcacaggaagacagaatatcacagcaacagaggtctctttattatagagtaggattacagtcatgttgggctgcggacagatcccgagctcacaactgcattacaaaaggaaagcggaagccagggattggaccaatcatcacaggcgcgacttgggaactaggccgaaacccttaaaactcatcgaagccgacttgctcctggaagaactcctcgtcagcaggatccacttcatcttcttcagcaactggggggggattatttatatagagcaagggtgagtacaggagtactcagcaagccaggggaaataagtatttaatacaggcttcaaggaaaggctgttgttttcgtaattgattttgtttgaactcttttctaaaaagactaagtgagtgcttctcaaacgacacggatgagacagtgcgtctcgtccggtcggagtatgtgcaatgtatcaatctttagatcttgaaccagggttggcatccggccaacagcttttcaaacggccacccgggccaacaacttttcaaacggccacccgggccaacaacttttcaaacggccacccgggcctagctgaccccatcagctgcagatttttcaaacatcgaactccttttcacaacagcaatttcacaagcagtagtcaaacaaaactacgctaggaatcacctcacatccgcccatgaccgtgggcacggctgttcgaacagtttgttaacctctgcagaggggggtacactttacccacacgacattactaacccggatcatccagcccgtggggatcagccacgtcgggagacctccaagctttcatgacaaggcatttcgaaagccgatacaggtttaccatatgccgacgagaggggtcccagaccaacaacaggttaggtcccagaccatactgtgccaggaagcccaggggtcctccccgacaccaccccggcgaatccacatgtctcttggcatcaaggctcccctgataagctagttactcagccaggggtgtcccattccacccatgtggtcatacttgtcttatgtttggatgaaattccaaggattcggtccttaagtgcgagagcgggaaaccgtactcccggtacgttccccggtccgcggttttgaaaattcatttagttcgcaagcaccgacccaggtgtcgggttttccaagtcttttgtaaaactccagttttacccaagttgttactcagattttaagtttgaaggcgaccgtcgatactcgcacggagtgcacgaatatcgaggtgcagctgggtggttacaaggggacatagcatggcaattaacaatggaaggatcaaatgcaacaagttaggtaagtccgccaatctgtcttgcagatgggataaaagatttagtgcgatcctatcaatgcataatattttgcaggcaatataattaaatttcaaatataggctcaagatgttcaaaggtggcttgccttgctcgagatccggagcttgatcctcgaaatcctcgcactgcgggtcttcgggctccgaaactacacgcaaaacgggacaactcaacaaacagtgaagataaggccctattattgacctctaagcgtgccattaggtagatctcgggatttgaggaatttaggaagttgaacggagtcaaacggatgctcggttgaaaagatatggaatttctaagattattggatttttggtctaaaggaaaaaggatttaatcctttttgaaaaagaaaagaaaagaaagaacagagggatggaaat

SEQ ID NO: 20847 - DNA, 763 bp, Oryza sativa
taactacggggaggctactcaagctactaccgaaagctaggggggagatggagcgaggaggaagaacggagagaggcactaccgtgcggaggaggggcgctgtgacgagaggccgacggcgcgggagtgatctctccggcctcgggccggggaaggggaagagaaagaagagggtgcggccgaagtccccttccgcgtcctcgaacgcaccggctctcctggcgctcggcgagggacggcggaggcgagacagagcacgggggcggcggtaatggcgtggagacgaaagggagaggaagggaaagggggaggctggggtttaaatgggcggcaatgtcggtttgagaaccgacttgcgcggtcaagggcgcgagctggcgatcggcggtcgcggccaaagcggcgacagggaggatgacgccggcgaggaggaaaaaggggaaaaggaggggggaaaagggggcttgcccctttgccgatttgggaaaaaggaggaggggagcggggcgacgcggcagagggaaaggagagctcggcctccgcctcttggcggcttgcgcgcggagtggcgagggccgggcagtgacgacggcgatgacggcgggcggattggagcggagcgacgacacgggcgacagacacggcagacgctgacgacggcggcgaccaggcggtcggccaccacggcacgcgcgcgcgggaggcaacgggcggcgcggctgggcagcgggaccgggcgacgcggacggcgcagacgacgcgg

SEQ ID NO: 20848 - DNA, 740 bp, Oryza sativa
ctccctatccaaacctttgcaacagatggctgacaatgagaaaggcaataaggtcagaagtcaggacattggtacctcaagctctcgagtgaatgaagcaccagacaccagttgtgtggcagtggtccaacacctgattaaccagaacaaattgcttatagagatactacagcagcatcggatgccaattttgaacccgagtcagatacaacctcaagtgcagttggaggcagtccaagcactcacaccacaagtcagcgcaccgccaacatcccagaaggcccctcatgccatgccacatgttgacccaaaagaagcaagtatcatctgttttatgtgtgatgagcaagggcactatgcaaggaactgtcctcagcagaaaagaaaagcaccaatgcgaaccgaagatgaagtccgtaagatgatcattaccagcacagaatggcctccaccaggaatgacaaaatgtcagagaagaaattcctcccgaggtgcacaacagttgacagagcatcttttagctaatggaggtagagtgtctggtagtgaagattcagatcaagtctcctcagatgatgaagatgagaagtctccccaaggttttaaccagaataaaatagaacttaaggcatgctctcgttgtggagaaatcggtcatgttgccagctcgtgtgcctctacatgcgttcattgtgaggaagaccatccacccgataggtgtccaacgagcaggatcactt

SEQ ID NO: 20849 - DNA, 1343 bp, Oryza sativa
atgcctgcaggtcgactctagaggatcccttaaatccacgcgaatcaatgcccttctttccaaattgattaggggaaattaaaccccattgaatcctcttcaattccccccaatttccctcttgaatggcgcccccaatcgtcgggaacggccgcgcttttcccggccaccaaccatggccgccggccgccattcccgtcgccgttccgccctcccccgtggccggctccctcttttctcatataaaatgggatcctcatcccccgttctctcgttttagccccctcccgagcctccccgtggtccctagccatctccccgccgccctcctctctctcccacgccgccggccgcctccagccgcctgtgccgcctcgcccgcgcaccggccggccgtgccgtcgcctcctccagcgtcgcagccgcctcctcttccccggcgccacctccgatttgtggggaaatcgccggaacggtgcccccgccggcaaccagtggcattggtgccactgtactccctccagccggctcctgtacgtcgccggtgcgccgatcgacgccgccgtctcctccttcgacaccgcggcatcgcctccttccccggcatcacctcctcctcgcccgaagctcgccggagtggcctcgtcgtcggcgtccagtacctcccggtctccggtcggctcctgtacgtcgccggtacgccgatcgacgtcgccatctcctccgtcgacgtcgcagcgttgtcctcacctccagctgctcctcggtttcgccggaacaccgccgtgtcgccaccaacccctccacccgcctcgccggagtcctccggccgcccgttcctcctcgcttgtttaccggtcagccgcggcaccaccacctccggcatcgcagcggcaaggtcgccctcggcctcgcctccccttcgaccgaacccctccgcggtccatcgtcgttgtctccgttcgttctcgtcgtcgacgtcccgtcggtcgcccggctcgtcgtctcgcggtgccgcctccgtcatcgtcatcgcagcggcgtgttccacgtcgtccccgtctccgtgcagccactgctggctgtccctcatcgccccctcgccggccccggtcgtcgtcgtcctcgtcctctcgtcgttcccgatcgtcgtggcgttcgtccctccgtcgagccgttctcgtccgtcgtccgcgttcgtcaagcgagccgctgcagccccgtcctcgtcttcgtcctcggctccgcgtcgtcaagccttgtgccggccgcgtctcgccttcgtccaaggatcgccgccgaagccgtcccctggccgttcgtctccgttgtgcccgtctgtc

SEQ ID NO: 20850 - DNA, 765 bp, Oryza sativa
acacacccacaagtgcagcatcattgcaaaggagtacaatggagttataatataggggttaggttttgcaataaacagcatttaaaagacccttagttgctcaaagctaaatttaaaacacgatcctagaactatttaatattattaatcaaggccgtgaacccacacgaacctgccttaacccaaggcctacgatgattcagaccgaactggcaacccgaccctgggtcccagctcgtcccaagccaacccaggccaaccattccacattttagttgttaagcaggtttgaagaattaaaacactaacttgggtacattgctcggcttgcccataaccgagggcgcggctattcgaatagattatactctgatcagaggtgtacatctttacccacaagacacatcttcctcacgtgtaaccacgtgccacataccaccacggtatacaggcggaagacgtgacatagttcccaacccatcctagccatagacaagagtaccgacccaatcccacctacggccggaacccccgggacaggcaggcaggactgagccccctagcagcaggacaccggccctgtgccatgacatctcgactaccgggccgcagctcgtgtagccttcatttgccctggagatgtccatcgaacccccgacttcgtccatctccatccgtgtacttttgtttataaccagactgagccacaaactaagccttacccactagacatgtggaagtacggtagtgctttgcaacagaggc

SEQ ID NO: 20851 - DNA, 1032 bp, Oryza sativa
ttaagaaatctttctttttggaagaaaactataactctaaatttcttcaacaaaactaattggttgtgcctaacaacagaggctagagatgtaagccattcccgttatctttaagaaaattattctaaacttcttttttgaaggaaattaccaatttaaccacagagcaactgtcagaaatagggagcattaagtgccatatttgaagtagcaatcagtgataaattgataatgatgttaagatatattgattgcaaaattaagatggtagtactttcggcatgatttttactgtactcacaaatagtccagttgaggtatggcactcagatcaggaatagcaccctgcaaactgcagtttcgaagactcctgatgtgacaagaaatattatcctcagcataacaacacagtatttagacatatatagtagagagagaacatatagtgctcacagtttaaatagtccggacatgttgtaatacagagtagggatggaactcccgctgaagttattattgtcagcctgactagaaacagaaaaaaaatacgaatataagaaacaggtgtatgctatcatagcaagctattttcaattgagtttgacaattgacaatggatacatacagtattttcaagctttttgccgcagctagttctggaggaagaggcccagacaaattgttgttatcaacaaggctgcaaagttttagttagagtatataataagattaattccatgttacctgatacaacatgcattagaaaaaaatgcaaccaataggcttccacttacaggtgcaaaagtgtattcagtctggacaattcggacgggatttgcccacttaatgaattattattcatgtgactgaaatgaaaggggaaattgagtctagcactgaattcagattgaagaacaaagcaggaacaaaatggaaatgaacaatccttacagatgcttcacacttcttaagttggcaaatgatttaggtattgcgccggatagatggttttggtcaacctgtaaccttgtt

SEQ ID NO: 20852 - DNA, 790 bp, Oryza sativa
aaagaggagaagattctccggaatcagtggaagtagtgcagtagctattgactgggatttttgtaagcccggtcaataggttcccctgtacccttggagagaccctgcaagtgcacacagatcacgtatatatccacatgcctatatgtgcatagatcacataggcacgcatcaaaagctttttaatcctagctagcttactttaatctttgattattttcaatagaaatttaatgacgtttaacttgattcatcattcggcgacgtctcttgaacatgttaaaggctgggccgaggcccaccaaaaacggaggcccatgagcaaatttcaaattctgactcgcgcgcggtggcggcaaaattttgcaggcgagacgtacctgtactggctgcggcggcggccggcgctgtacgtgacggacccggagctcatcggcgagatcgggcggtgcgtgtcgctcgacatgggcaagcccaagtacctccagaaaggccaggagccactcttcggcggcggcgtcctcaaggccaacggcgcgtgctgggcgcgccagcgcaaggtcatcgcgccggagttctacatggcccgtgtcagggccatggtccagctcatggtcgacgccgcgcagccgctgatcgcctcctgggaatccaggatcgacgccgctggaggcgcggcggcggcggaggtcgtcgtcgacggcgacctccggagcttctccttcgatgtgatatcgcgggcttgctttgggagtgatttactcgagggggagggagatcttcctccgcc

SEQ ID NO: 20853 - DNA, 10079 bp, Oryza sativa
aaattgaaggtcacaactgcatcaccatctactataggcccaacagccttgtcactatcgtcaacaatcacaaatgggggaagatactgatcattagccttggtctctgaccggagtgttttcacagcttcaacagcgttttggaacttgtgaggtgcttctccaagcacctgagcatcccatccacgtttaacaacatcccagtcattctgcaaaattgagatattaaacaaatagttcaatacttccattagtacatattatcccaagtcagaaagagttgcaataaaaacagaatgcagctgagagataagatatgagcaatccaaactgacagagaggaaggagggtattcatacctcatatcggtccatggtaacatacatccttccaccacctgatgcaatgcacgcatcaatgcccttggcacgcagttgagaaagatcattctctagcgtttcaacaaaaccaacgcttgtgccatccaaaacatcacgtccatcagtaagaatgtgaacacggatttttttcgctccattcgcacttgcaccattcaggagcaactataaacaggaatgacaaaagacaaaaagaattagatactggacagatcaacatgttgtaaagaaacattagtgcctcatactatacaagatgatagcaaactatagaaaagagtacttttatacctgcaactggtcaagccgtgagtggacacctccgtcgctcaacaacccaataagatgaagagtgccttggtcaaaactctccttaatgtacttaaacccttctccttcaaaaatttttccagaggccaaagcagtatccacaagtttagccctacaaaagaaaatggagaacatggtatatttagaggcttaagtctgaggcttctaacttctttcttaaaagaatgatttcatatacggcataatggcaatgtctaaaaggcaccacatggatttagtaatttaaagagaaaatttggaataacttgaagtacacagcaccacgagtagttggcatgccttcaaaaagtcgctgcatgtcaagtataacatacaactcaaacagttgttcataaaagaactacccttcatctctaaagtttgtaaatcagtacacgggatatctttttagttagtactagtagctgctaaaggaagtgcatgatttgtataataacatgagatagtaatgatgatatctctttcatgctcatgtggtaatccacatcatttggagagatctgtgtaaatctaacacttaagatgccaaaaggaaccaatggttgccatttgattttactaaatctggcacacaaataagccaagcaacagaaacctgatgtaataagacctttagaaacaaacgcaatactttttggccatccacagattataactgacagtgtgctaataaaaaagagaaccaggagaaacatgtacccttgagcaaaaatccgaccagcaccaagtgcgttatgcccaacctcactgttacccatgtcatcatcagaagggagaccaacagctgttccatgagcctttacaagcttccacttctctggagcacccttgaaacatagaaaacaagataaaccatgaagttaagtaaaagggtaagaacaatcatcataaagcgtttcaacaatatcatactaaacttgttctaatatatgtcgcaaacaaggtcagaatccattgcctacaactcataatggaatgttagtatgcacggaacatgcaaagacagtgatccaggtaccatacttaacgagtacagtatttcttcactgtgacaatttgtctaaaaataccaaccataccacccacaaaatgtactagagtcaatttactaagacaactacatgaaggagaagcccctagcaaaggtagggcgaagataattggttggaggaaacaaagaatttgtgcttcaggtttcacctgtcacctaaccaccacagattcttcaaaaacaatacacagcaaattacatctatggtggctaacctccaaggccttaactacatactaaaagctaagaaaatataccttcttgagcgaatccattgttggtgtctcagcaacatggatgcagttatactggtccgcatcagcctcaccccatccatccagtacaaccacggccaccggcttccccttagggagctttgggtgatcaggcaatgtccacgagaaatctgagcttcccatcaccaactaaacctaccaaaatcacagatataaagaaatcaaagttagaacatgaaattaaccatctcagaacacatacctgccacacacacacacacaaaaaaaaaaagaacaacaatgtcgcagcaatcccgttctaaccatcacatctcaacaaggtggctatcaagagcgaaccctaggtactcttcttatgggctcttcatgggctattcatgggccattatactaccgttaatcacagccgttggatttctttctcttcccaaaccctaattccccccccccccccaatcctctcgtctactcgacgccgcaacgcgtgcggcgcgcagccgcgcgcctccgccgcctcgtccgtgccttctcacctctctcctcgcgagctcatctcactaagtaacagtgtattgtattgctagtaacaattacagaagtagttggttaatctgcagctgatctcctatcctactcgaagcgatctatagagatcaaaaggggtattcccaaatagggcttagcatcacacattctccagaatcgttcgactcgaacaaaatcaaaccattctccaatcttaatctccatctctaaaccgcacaaaaatgcatctgcattggaatcagactatcgcgcacgcataggcaccgatttggttaaacaagccaaaaaataaaaaaggcaaaatagagcgcaaaaatgtgagggaaacaaatttaccagatctacactacaacagatttctgggggtagggaacaatccaagttaaccagattggagaaatcatagaaaaaaaatcgagcggagagttcaaagcgaggtgagatcgagaagattaccggaagagagactgttttttttttctccttttttttcgttgctatatttttctctggatgccggatgatatgaagccgcttggcttggagaggaggaaggtcgatataaatagagcgagtgcgattctcttctggtatttttgcagattagcccacaagattagctcgatggcaaatacgcccttccgagaaaaaaaaagcccttaattaccatgtttaactgctgctccgtacgaaattgactagagaatgagaaaacagctttgaactctgtgccttaattttacttttgaaattagaaatgtggtacgagttgtataaagagttcgtggaaatattattatgcgatgcgcaaagacgacttgatctcttgctatgcatgatcgacatatttagttaattaatgcttataattactaaattcaatgtttgacgcaattataaaaccagcttatctggcctcatgctttagatcggagatgatgtatttaccggttcataaaatataaggtgcattaggtttttacacgttattttaatgttgagttttgaatctctcattgacaactatgaaattaacatagcaagaattactttcaatgcaatattagcttaaatttttagaaaatacttctaaatattgacttatcctgttatccttaaattcgtgtctcgtacgcattgcctccttggcggcagcaccgctacagacctacagttaccgagtcccctgtgtcagttgaacccgacgaaattcctaaatacgctacgtaaaatgaaataatggataagcacatgattaattaagattatatttgacatagcttcgaatcgaaaatactttagagctggatatttttaactccatgaatctatggatctgaatttacgattacattgataatacatgtatgaatctattttttattttaaataaaatatgagaatttatatcactacagtttaatatacaaacttcaaatccatcgtgaaatgtcaaatagtatctaagtattagctttaaaaatttaaaaatgaattaatactttttaagataatttttctatagatttcttggtaatcgtgtacgaacgaactaagcaaatttggtttaccgtgcgtccgtgccatgcaatgaagcatcatccgtccaaggcgtgcaaatcacaggccaggattagggtccattcggccattcccccaaaccaaattaggcctactccatcctgatgaaattggtcgcctcaattccgccttacaacattttggcccacagatatttttccctcacgcgaggcgctcaacggagagaacttgtggcccaagacaaatggcccaatataaaaggcctaatctcatcgcttggtggcccaagccacccacctctgctatcttccaaaccaaactttcctccttccgcttccaaatcaatccccacagcgcagcagcgcacctccgcctcctcgccaccggcaagccgcacctccgcctccgcctccggcctctccaatggacgcgctatggtgcgacctcaacgccgacgtcctccgcctcgtccacaagcgcctcccgtgcctcgtcgaccggcgcaacatgcgccgagcctgcaagtcctggcgagctgccgtcgcggcgccggcgccgccgcagcagcgcccggtcccgtggatcctcgtgccgagcgccggcggccctaccttctcgtgcgccgtcggcggctgccgcagacacgacttcggcgtcccggactacgcgcgcgaggcgcgctacttcggcacgtacagcggcggctggctcttcctcaacttcggcaacacccgcggccacggccggcacgtcctcctcagcctccgcaccaagtaccgcatcggcctccccggaattgtctacctccacctgaatcctgaattcatcagggacatggtcatgatagccgcgaccctctcctcgccgccggaggacgagcactgcatcggcgccgccatcagctcgtactggccgcccgggatgaatggtgcacgcgtgcacgcgttctggcgcatgcggcgtcaggtcgctgtgatgccgactgctatcgagggcgtcatcggaccaattctggaggatgtcatacaccacaaggaagccttctatttcctcaccgcgcaagagcacctccatgttttcgcgctaccggagttccgagtaaaccgtcgcggccatctgcatatagcacccatggagattcgcagcttcccgcatgatggtcgtgattacgacggacgcgccgttgctcgctacctggtggagtcccgcgagaatctcctgatggtggtcaggttcgtctctgatcctccccaaatgccaccgaggacgtcggcattcaaggtgttcgagatggtggagctgcccatcaacaacggcgaggcccggtacgcgtggaacgagctggaatcgctgggtgggaggatgctgttcgtcgcgcgaggctgctcaaaatcctacgaggtggccgattacccggggttggggttcagcgccggcgtctacttcctggacgacgggagaatctacgacgagttcacggtcctcgatgacaccgcacggcgctacccctgcagagacagcggcaagtggctgctgggggcggcggaggcggacaacttcttgccggagcaagccctgtcgagctactcaccgccggcttggcttctcccctgagcgtgtgctcatgttagtttgatcgtcgtggcacaggtaatgtttgctgccgatcttgttgaaatctgcttacagcgagttgtaacagttgatattttcattcgtgatctgattttgcggctgttgatttgtccagttagtataatccatgatgtttcattctatttcgagccttcgaggcccattcgttcttgcaattgcccggccatcttttctgtaccttctgctaattttcgatgcttcgtgatttcagaatggagaaatggttgacttggattgcattagtgcatcattgtattacagtcgattctgcagtgtgagaatgcgtttagttaacaccagcacttgcctttttcttttctttttttttgaagaaaaggcaagctgccaattttcattgaatagaggagtaaaactgtacaaaggcgaaaacgagctcaggacctttggtccgagctaactaaaagaaagccaattatgaagatttttcgcgcccgctaaggcccaagttttggcctcttccttgattttagctagaagggaggtggtcgatagctctttttgctgaaaggttctgcggtttctcttagtccagatctcccatgcgaccagcaggatcagtgtgcgaagagccttcttgggtgcctcctggatgtttaaggtagcctcccaccattctaacaccgtggaggtttgctgccaccgacatggtttcaacccctcacacgccgtccattccgcaattgcctcccagattctctttgtgtatctacaacccgcgaggaggtgtagggcagtttcttgagatcgacgacataagggacatatggaaccgtttggccatcctctggttgctagtctgtcggaggtccatactctgtttggatgattagccatgcgaaggttttgtgttttcgtggcgcccaggtcttccaaattaggttattaaagttggtggctgtggtgccgaggagttgcacattgtaggccgacgttgccgtgtattcaccatggctggtaagcttccatgttattttgtcatcctcttgctcttctagttgtagtgtctgagtggcggtccagattgtgacaagttggtcaattaagtctgtcgtccatcctgcatttgacggcaggtccaaatcatgaatccattggtcggattgcaaggcttgctggatcgtcttgttctttttcttggatgctgcatagactagaggagctacatctttcattctccttccttcccaccaggccgaatcccagaagcttgtcttctcaccgtttccaattgttatgaaggtggccgccgcaaaacggagtttgtcggtgtcgtcacatggtgtgccggttcccacccaggctttttccgatgatttccattcatgccaaagccaatgcagacgcaaagctctcgcgaacttttctaagtttaggatgcccagacctccggaggcagtgggaaggcaggttcgtgtccaattgactttacattttccccccgtcaaagcttcctcgcccgcccagaggaacttccttctttgcttgtctagaacctcgagggactccttggacgcttttagtcctgtcagaaggaagacaggctgcgaagtgagcaccacctttaccagggtagaacgtcccgtgagcccgacgtgcttccctcgccagccagcaatacgactcatcaatttgtcatagagaggttggagatcgactttgcgcagtcggcctgttgtcaagggaagtccaagatacttcaatggcaggtttgctctggttgttggcgtgtcatggaggatgtcgtctaaatccaggttttcgcacctgatcggagccacatgtgatttttgaaggttcgtgcataagccagttgcttgaccaaagcgaccaaggagatcggtgaaggcttgtacattttctttgttcgggtttatgaagactgctgcgtcatctgcgtacatagaagtacggaagcgtactgctctcccccgcagtttgcttatcacccctagttcagtggccatgtccaataaacgttggagggggtcaatcgctaggatgaagagtagaggtgatagagggtctccctaccgtaatcctttgccatgctgattgcctctcctggtgtgccattcaggacgatctttgaggcggaagctgaaagtaggcccgttatccattcacgccattttggtgggaaacctatgttttgcaagagtgcgaggaggtagtcccacctgaccgaatcgaaggctttggatatgtctagcttgaagaggaggatcggtcgtttggtcctgtgatgcttcctgaccatgtttcttacatacataaagttgtcatgtatgcttctccctcgaatgaaggcgctttgattcatcgaaatcagcgagtgcattaggggccgtaagcggattgctagcaccttgtaaaagagcttcccgaagccatgaacaaggcttataggtctataatcttctattccttccactccttcttttttggggattaggaccacattggcagaattcaggaggctgaaatgcttgttccttgcatcatgcagtgcattaaaagcggccaccacatcgttttttatgatgccccaacacgacttgaagaacttccccgtgaagccatctgggcctggagctttgtcggcaggcatttcttttatcgctttgtgaatctctgcctcagtgaaaggatcatcaagcccggagaggtcaagcggtgtgtaccctaattccggccagttgaggtcgcaggaccttggctccggttgccccatcacatgttggaagtgttcggcgatgacaagttctttttctgcgtgcgtgacagcccaaccattttgcttctttaggcggtggatgtgatttttccttttccttgcattaatcttgcgatgaaaaaactttgtgttggcatctccttctttgatgttagtgatgcgcgcggcttgcttcttccttgctctctcaataactgcaaagccgaggagcctcctcttgaggcccatacgcagcctgtactctgcttgtgtcagctcacggtgctcctgtgctacatcaagacggtacttggctttttcttaatctaaccatgctttgcatcaactgaatttcaacgaagatgaattgcatctcttcagaggatccaagcagaatccttccaacgggtgctacaaatttcatactactacgcagtccttttcacctgttcataacttccaatgggttctgaatttactgataattaacaatgagatgacactatatacaaggagtactaatattgttcttaagacttgctattacaggtattctttcagcagtactctatagtccatagcagaaaacgcttctgaatcagatttacatgaatgcaattttatatctgatctgatgaattccatgaagtcataaaattgctattcatgacatgaattgcattagcgcaacattgtattgctgtcagttataatgcaatttgaaaatgtgctcaattagcagtgcttaatttccaagatagaagcatgttttgcatgaaatgtatttgcattgaaggtgaattattgcttctacagcctgctttcagttgcttgttaactgcccaagatgggactgaggctggctacagcctctcttttgaaggacatggattgcatatatttcataactcaactgctagtcttcttcacttgttcataattgtgattccaagcttctcaaaatatccgaactgagatattttcagcatcagtttgagaagcttggcatcaccgtcgaactactactcactgccggcttggtttcccaagtaagatgagctttctgccgatcgatctggatgagatgtgcttgcctcacatcgaggcgtccgtgtgatgttgttgtcgtgctgatcagtgaactgtttttgttgtttccgttccagctctgaaccttttctgtttttctttgagccaacttctgaagttcacatatttgcagttgttgattgtccagtaatccagttagtacaatgtacttgcaatgctggacctatcataacatcttcaagtattttagtttctggtatgggttggattgcattagtgcaccatgctgcatatataaagtggattttcaatgaggaggaattgtttctgcagctttctttcagttgcttcaattctcttctgaggagatctagtcagaaattcagaatccttggtggatgctacaagttagtttcaacactcagcttcttaatttgttatactgagataacatcgtcatcatgcaccggtttgagctacctgtgcaagaagta

SEQ ID NO: 20854 - DNA, 42367 bp, Oryza sativa
cagaataaagaggagaatgctttcccccgggcactcgacgggccagggaaatatcggtcgctccaaatggtggaccagggttgtgttgaccacaagattttttctcaagatgagcaattacctttttctctcttctcttgctctatcccagttccatgcatgcatgcataaacgcatgcgggctaacaaaatgcatgttgttttgctaacaaaatgcgtgcatgcattaaatctattagcatgttctaaatattttctctaaaattatttattcgatcaacgatccgatcactgctatatttggtgcaattaaatctttacaacaagatgtcatatgattatattacaattaaaaaagaaggtttagaccattgtttttttatgtttcacgtgtcagatgccaacgtttcaattggaatttaaatttgttccacattttaagttttttgtgttggaaagagttgttctttatgttgcgtacgatgctatttgggtgtttcaataagtattttctagtatttcactagttcatttgcaaatgttgcacttcagtgtggtgtttttgggtgttccagtaagtagtttgggatgtttcaaaaattacaaatcaatgtttcatgcgtgatataaaaaatgtttcaattagaaatattataatatattttttgtcataaaaatataatcatgtgagatctcattataaatatttaattataacaaatataacggtgcaaatagattatgaatcagataagtaatgtaaaagaaaaggtgatttaaagatccactaaataaatcaattttagatggaggtaaagggtttggctactcagttttagatggaggtaaagggtttggctgctacaacatgtattaatgcagcatgtatgttctatgatacgctttaattaattggcatgatacatgcaacctttgctgggagccaaccagccagaggcatggggtgtccgatttttttgggtaaaaatcgcacgcccgacgcgtagtggctctagaataaaaaattccctattactcttaagtttcagaataaaaaatgacagaattattgtcatggacattgggctagaggcccgtggggccagcttctggcaagtggatagttcaatgggtactgtagcagcaggttaggagtagataatattagattgggttagttaattaagggtaagtctcaccagctacataactgttccggtaagcaatgttcttctttctaacctaagtcctcatcccctcatcgcagtgattatcctgtcatggcctcaggtcatgacatttatcaacatgatatccacactagtttataaacatcaaggctggcatttactgacagactacagataagggcaatggggcatcttatcctgtcatggcctcaggtcatgacatttatcaacatgatatccacactagtttataaacatcaaggctggcatttactgacagactacagataagggcaatggggcatctatcttacttgtcatgtttgtgttgatgcattagcactcttgtgttaaatgatcccttctaggatacctttgcaagaaactatcaaggatcaaaaatcggctaaacagaaaacatcaaaatactgaacgtggaaattgaatttggccaattactgcctagtttgtctggttttcagccagttaccacccagaatcgctgcctttgtctggttctcagtataacactgattttgtttgaatccacttgtctttctaacaccaaatactaacacatatcaatgggtactaatcaaatcaattatcaatacaaactagccaaaaagaaatcaataatatggttagtgtttgcatgcttaaatttttcatgctaggaaatttgtgaggtccaaattaccatgaaacatgtcattgaatccaatataaagtatagtaccttaaatctgtctggttcagccaattcaaagaccaatgaatcaccatcttccaagttgtggtgcatcgcaaaacctctccatccaccacttaggcctgtacggttcccaatgtagacagaatcaaattcaccaccctcttcatcctccaagaccatcttatactctttgggaggcagatgcaatttgcagaatctagttggaagacccttgtaggatggaaaagaaacatagctatgagtactcattgatcataatatttttaacaaaattagttaatgaattccatacaacgaaaccttacaagccaaaagcagctggacacatgtgatcgaaccatggtcttaacaaacgacgggttctcagggtctagactattttgaagtctctcagcttttttgaaagcacgttgttgctgttcataagaggcaactcttccggtgtaatccctcccctgctctgtgctcctaatcctactgcccctgttcaacacaagcaagtagccaattatattgcctggccacagccacaactatcacaaatctgtaaaccatatggaagtattaccttctacggcatagaaaactgttgagttcatcaaactggcacaataaaaagagcacaacttagtaccaacatttgcatgaaaataatctttcatcacttcacgaacaaaacaaagcttccttgcgctttaactctaagtaattattccctccgtttcatattataagtcgttttgactttttttcctagtcaaacttctttaagtttgaccaaatttataggaaaaatttagcaatattttgtacataaaatgaacatattaacaaaatatatggaatgttagtttaaatgaaactaggatcatgtcattaaggattcatttgggattgtaacccatataaaaaactggactcacaaacttgttctagaacatgactacagtatctgaatagacatcgcaaaatttcttcctaaatccccaacaaaagcaacactaccaatcaaatagcactagctttgaagtggaccaactcacattctctttgtacgaaaccgagttgcgcgccctcgatgaacgcctcacttcagtggccccaacctcaaacttcttccgcggcttggggctggcacgagtgctctgcaagaagacccagagtaaatcaatccacgataccagcaacccaaatcccccgcgtgtagcataggttgccgtaatcaccttctgcaatctcgccgcctccagcaagctcttggacatcttctttatgcccagatcctgcgcagaatcaagcaccgaaatttcaaccaaaaagaaaaaaagaaagataaattgatgctgcgacagtgcatccaatccacacggaatcggcaaaggggaatgcgtggaatcccgcacgaacatccatcctctaaacgaatcaggttctaccggtggaaaaaaagcacctcaaatctatccacgatccacaacgaggaacggagaaagagatgagagccaaaaaaaaaaaaaatctgaaacgcttgtgtgcacgggcgggcgggctcacctcgaggtgcttgaggttctcgaggacccgcttccggcgctcctcctcgtaggcggcgccggcggccgcgctgccggcctccgccgccatggctcctcctccctccgccgaaacccttcttctcccctgcacgcgactacgcgaggaggaaatgggtctctctcttctcctctccgagagaaaaaaaaatactaagagaaaggaaagagacagtggagtcgcttgttgccttttggagacgggcaccctctgggctgaatttgaaatttcgaattccaacttttgatgcctcggggttcgtgcgggggaatccgacgggccgtacggatggtgggcccgctggcagccttcagctgacacgtggcggtgccattctggggtgcgcggcacgtggggccataaaacagcctcgtgcttttgcgggtctcctcgcctcctcctcgtcctagcgaggagcttagggtgcgcatccatctgccactcacgcgaaaagcccagctggcaccatgtagcaccggtccagctaagagcactgtgagaggcctaacagaaccaaccgatacgctaatatgaatcccagcatttcgacctcacatgatcaatactccttctgtcccataatataagagattttgagtttttcttacaacgtttaaccactcgtcttattcaaaattttttgaaattattatttattttatttgtaacttactttattatttacagtactttaagcacaccttttcgttttctatatttaaaaaaaattaaataagacgagtggtcaaacgttgcaagcaaaaactgaaaataacttatattgtagaatggagggagcagaaggtagtatagtcttccaatatctattactacataaatgtcaagtagcaccaaagtacagtggccttgatctctctactaagacataaattaaagtagttcatgtagtatctgcaacaataaaagctactacctccatcccataataattacatttctagaaaattagagacaaattaacaacaaacacaatttaccacaataaccctatttaataactatgctgcatacgtatattccatatgtatacttgattaataggaaggttgaggaacacattccatatgtaaacttaattaaaagaaaggtttgggtacacattccatttgttgcgtcccatcttatcagaaatacaatatttttaggacaaaatttaaatggtagaaatgtaattataataggatggaggtagtaaatcacacgtagcattgatatgtgtctcaatggatcaaagcggtactgatatgaaagccaagtaacatgtatccctgtcatggatcgaagcactactcaatggagtagtattcctgacatctatcccaatagacaagtaaccctcacactatacgctatgtcatatcacaactacttcatctataagtaaacacatggcatctacaagtaactccctcacatggatgtgtctgacacctatccatgtgaccaaaaaaacattgtgactccaaaaaggtggcttgcactgcccaaaaaattgactcctttaccgacctgcatcaaacaaataaattttcagtgctagctgagtttttctacaagtgtcctcagttaacgaggacactctagaagtgtcttacattgtggatgccttaaggggattagcagtgcgccacctatttttctcagcctggggctgtcacataggacgaagacacaagaagaataatacttgccacaagtctcacagtgctacatagcctcaaagagtagccacacaaataaaaaaaatcatttctttctcccttatcctcagtccgctccccacctacgcgcgcttctccatctccgcccacgcgcctcgccccttctcctctcgccgcacttccccttcctcctccggcgcggcggcggcgccgaaccacccagttgcggcgtcgagcggcgcggcggacgggcggcagcgtggagcagcgcagtggaagggtggcggcacgaacggcccgagcggcaacgccagaactggtcaacggggtggctcaagcgcctcccctcctcctcctcttctggcgccgcggatcgaggggcagcggcggcggccggcgggacggcccgagcggcggcggggtggtcgagcggcggctcacatgatcaatactccctccggccacctccctcggctccctcccctccccgtcccctccggcggcgctgggcacaggcctcaccctctcctcttcccggcggacgacggtggcggcgccgccgagctcgccagatccgtcctcggatggcggcggcgccgagctcgctagatctgccttcggtcggcagcaatgacgacgatggtagtggtccatctttccttcctcccttctctccggcgagctcgggtggtggcctcgccggcgacgcccgtcgcccccttgcatggggccatgccctcttcggcgatgctctcctctccccggcagcgtcgggcggtggaagcgagcggggtttggggcggtaggacgacacggcccacgagtgtgggccccacctgtgaaacaaaggaggaacggggagccaaagttggctccacggtcttgggcaagccgcgtggattgccgacgtggggacgaatattccgtttctaggggtgaggctgaatgccacatgggagcattgtgaatggcctaagagcaagtttaatagtataatcaactactaactccaaatcatctatatccaatgtaatagccaatttatacaatagttgcttgctacactattaatatctggtcccacctatcatacacatattacgtcttggagtccgtgctgcagctggctacagatatgtagcccgcttctcttctctctctttttttatctctttaaaatatgtttatagctggcttatagtctgctattgtacctggcttataactactggcgatcaaacactaaagcaatcactataaacaaatagactatagtgaataatgatcatgtatgctaattagaaactaaccaagaagtaattctcactaagcaaatcttaattactcataatgatatttctattaaagcagagtaattaacaagatacaaaagtaggaggagattaccgacaactccgggatttctccgatttcttctaccttactctctccctattctaatatacaataaagtacactagagcctcttgtaattcagctcatgctttggtggttcgtcacccgcatccaaatatacaccaacacttgtgtaaatggttagaaataaatcctaccactacgttggatgctttacttttatggttttatgcaggtattgacggcgttaatttggtatttaacagccgtcaacaacgggatctctcctagatattcgttcgacagcatctacctctcctacgacggcgtaatttggcgtaagtaagtatatgtggtattttcactcaaagcagtttggaatatagggtttccccaaaaaagggagcttttttactatcagtttttataaatttgtacagtttaatatcacaatatttatggtttttatattctccacgcgaagtattttaatagtatataatccacatgttattaaactatataaatttctaaaattgctagtcaaaagatagaaatttcgacttataacaaagaatgacgatcgatttaaaacgcaagtactaattgttgagaaaaaaatactgcggtaaacacacagacacgctatttctactagcacatttgacaatatgggccaacatatcccatgatcaaccacgtgtcaacgagtactctacttataactaaagaattagttagccgtaaatataaacacccacgtaaatctgaggagaactgaggaacttatcatcccttattgatagagatactaaggagtaaggacttccgttattgataaagaaaaaaatggtgagaaaatatacgctcaaagggattcgaactaaataggcgtgctgctcctagcagctccctgctagtcaagctaggccccgctctcaaatctatgagttaaaacttaaatagactgacttcaccataaaaaaactaacagagttatgctctgttcgctgcattgttaactcatcttggttggaagacatttttagctaatgacaaataacatacaagttaacgtccgtgtaactttcaaaagataatttgaggataatcttttatacttctaagtaacaaacttagtatttcatattggcacatcctaatactacgaatttggactatcgtactaggttaattatattatgggacggagggagtaagccgcagctgagttgcttcagtgcaggcgaccagaatgatccacaagtctacagtatcatatcaaatctgaattgttgaggactcatttggatcacataaattttacagcattcttttataggatttagcccaatacctccaaaattactttgaaattcctccctttttgcaggcgtttcgtcttctcgctttgaaagccttgttcagcttagctaaaagaaagtttagaagagcattgtgaatctaaacgggggaataagcctcatatcatctactccctccgtcccataatataaagaattttgagtttttgcttgtattgtttgaccactcgtcttattcaaaaatttttgaaattattatttatttttttatgacttactttattatccaaaatactttaagcataatttttctttttttttgtatttgtacaaattttttaataagacaagtgatcaaacagtgcaagcaaaaactcaaaatccattatagtaggggacggagggagtatttggtagcttatcagccacgactgaaatttaaattttaaaattgattttaggttttcttaatcatattccattttttacattagcttttaaaccactaactaataacggagacatacagaaaaaaatatccataaattatttctactgcttattagccatagctcaaagcctcaaacgatcaacatcttgctttctaatgtgtatcactgtatcctaacatcagcagcaactcagcaatgaaagaccttttggcaaaatttgctacaggacaccgaaagattgtggcctttgttgtgagacacccgaagatcgtgtatttgctcgtggacactgtaaaaagtggtaattagctactagacactcctattattttattattttcggttgaaatggagagagaaagagttgtgtaaataccaaaataaccctttgacactgttcttcctctctctctcttcttttcttttccccttcttcctcgcagtggagcagaggcgcgacggcggccacagcggggcggcggcggcggcgcatcgccggggttcaccgccgacagtgacgacgcacggcggcatcccggtgcatggcttcctctctctctctctcttcttttcttttccccttcttcttcctcgcagcggagcagaggcgcgacgacggtgggacggcggcggcggcgcatcgccagagcgcgtcgagtacagcaccgtcaagccctagctcttcgagtggaaggccggcgccggtgccactgccgctggccatggcgagtgcgcgcgggtggacggcaatatactgacctagattggcaaggatctggcgccgcctggacccttttggccggccacgacgccgcccggagctcaacccagcatgctcgccatggccactcacctgcatgccgttgtcccctgcagccaaactccgtgcggctggcgttgcagtggcggcgatggtggtggcctcctccgctcttcctccgcctccatggacagctgccaccagtggaggtgacagagtgggggacatcgatgacggcgagaagggagaagatcggtaccctttcgctgctgctgcgacttcttgttgtgcttcagccatggaacaatctgctgttctgatgaacaggccatagcctgctgctgctaatgctgcttcatggccacggcggagctcggcggcggtgcaatgagagagatgaacagagaaagagaggaagaagagagagagatattgacaagtggacctatgggcaaacttgtttttaaccaaagtttctctccgtttccaccagaaataataaaataatacggtcagtgtccgccaactaattaccacttttttacggtgtccacaagcaaatacacgatcttcgggtgtttcacaacaaagggcacaatctttcggtatcctatagcaaattttgcacatagaggacatagttatcaatctaagtataactgtaaggctcaagaatattccatcttgacaaatgcttcgatagcagcttgcaaacatgttgctcagacaagtcacccaaggcagacaaatccctggtactctagctcacagtaactaagaattcttcacactatcagtatctcagcactaccagtaataaataaatcaaatgttctaattatacaaccataggggaggatttcgcctcgctactcatccatcatctgtcagttatgagttaaaatgtcacatggagatcaaaattctagcagtaacagattgccgcgcgaatgccaacaccatcatgaaagctttgctcatgaaaaatttaagttgtgaaggcatggattgattgatttctcttggagggtcaaggaggaggaggaacaagcatccagtcattgtttcatccgtttcatgccaccattactgaatggagaagcactaccaggatgtgggctttcctctctaagtggtgagttcaacaaagcaagttctcggagttgctgtctcttgtagtaatcttgcgattcatcctatatagcacagcgtgaaagaattagcattcgaaaagaggcacgaaaagtacgtacgaattatgatttcgaaagacaagtatatgaagtagaaatgtgttagtactaagtagtgcactacaaaacacattaagataaaacagctgccgtaggaagatggaagttgtgaaaatgatagtgggagaaaagagcaagctatgttcagtttattacttattaattgcaaatgtactaacacaaagctcttttttttgttgcgatgtttggatgttaatgaatggaaagaaagataactgactcaagacaatatgcataccactggtttcaacaactcttctaggatttcttgtgcttttgcgagtctagcgtcaatgacattggcaggtaactcggcttcaatcaagatatgcaggggatcatccaagtgttcatacccagcccttcccttaagttgctcctccttttaagaaatgaaaggaaccacatgtgagcatcgttagcttgccaaacaatagaaacagacaatgaaatagccatttaaacacacaaaccgtatccactgcatagttccacattgatattccacaaaaggtgggttttgtttaccttgttagggtctttaattgagccctttcctcttatgaaaacacgacaacctgtagaggcctcaatcctcttcaacgaatttccccttggtccaagaaggcgaccaataaaattgaactaagggaagcacaacacagtgagtaaatattaactccaaatacacaaatatgaaaatgaagagcatacattagggtaagcatctgtcggtatttccaaccgcaagatcttcttgacaatgtaagaagagggactttgtggtgctccttgccaacctggtccttgagagaaacttactctctgctcaatgtgagaataacaaggttaggtgccacaggagttagggtatggagaatacaataaatgtagcactgaacaagaaggccaaacatagctgaagatccacaggaaatggaaccatagaagtaaggaaatcagcctgatgttcttataactagctatgctattcatccctagttcataaaatctactcaagaatatgctatgaaatttcttgttaagaggcatatctatttattcccgtgcgactacgtaatacagaattgagttgcaaaaaaaaattaagatcttgataataagtatggcaatacatccttcggtaaaagaatagttacacttcctaataattactccttaaggtcaatattacttgtcatttccgacaagcaaattgtcctaaaagcgggtcagttcaattgtctgaaacgacatatatttccctccagagagagaattcgttaagcattttaagagttaatcatatgatttgctaaatgttattgaagttcaccaatccagttgcataatataatttgaaaggcacatggaaaaacaaggaacgaaaaacaacattctctgttggaatgtattggtagtagtgccacatagaatggaaagtcaaggtttctcaaccaacttaacttagagctctgaacactctcttcattgcatttgcacaatgcagagactatatgatttggacaagagaagtaacagtttagggcaggttattcgtttggttgcctatgtaaggaagatatctaagtattttgaccacactggcacactgtccaagaaatggccagccaaaattggtaaactttaattttttttgccaggatgagaaaaataatacgacatccattgctctgttgctgtaaagcagtggaagtgttgtaagatagagggacttacatcagagtctctggactgatgattgtctgctattaggagcatgataggtctaacaactaacaccagaagtgacagtgctgaacaaaaaaaatgtgcgccctatggtaaagcacaatgttgaggtgactgagattatgtgttcaagtcacaataaagtcttctcttccttttcttctgaaggaaactaatcctctgaatcaaatatgggtagttccacatacatagcatcatttgttttttcagagcgggcagtgctaatgatacaaaatagttgtatataacaaaatttcttcattctaaaaggattttaacgactcaagcaccagagcttctggactttgaagtttcaatgttgcactcgtttctcttatatcctgaatgaaatagacatggaaagttgcagttcttgatagctctttatataaagaaaatgtatgcatactttagaattcgtgtatgggatgaaatattaaagagaaaggagagtataaactctaaacaacaatccgcgtcttacattgatataacgtttacaggtattgtggcgataacttattcagaagtccaaaggttaagaggcggcaggggagaagtggatcttgcatgacaaaagtcaagatgagctgatcaaaatgttacccattccaaataaaaatcactgacctcttctataaaccacacgaggttcgatgtagaaaagctatatgatggccataggctacctgttgtgacatgtatagtaatcattcttttaagggtatacataatactctttaaaagccagttttacttcaagaggaccttgatggattaaattgatggcaccctataaattgaggaccttgcgcattcatttgtttccatccttgcatatcgcaattctaataagtataacgcaacttatcagtgatattttacatagcagtccttttgtagaaatgtttaacagctcctgcagattagtgatcaaatacgatacatgactgcatatagcgtgttcgtgtacttggataactaatgctcacctctggacgcatcccattccatggaccaaaagcattaccacagaaattgggcacgatgtgcgacggatgcatctgatttgggcttgcaggttgcgacctctcgaagtcccctacgccgggttgccgaaacatcccagacactcgcattatctctgtcagcagcaaaacattagcacatggcatcagcatggacacacatgaaaacacttgattgccactgaagaaaagatacactgatacagtctcttgtcaagaatcaagctacaacctttcaagccctacgaaacacactaggattgcgcatagaccccgatcgagctaagtttcgcatcatcgagcagggacgagcaagagcaaattagccaaggccgtggaatcggagaagacgaacactccaatccgatccaagaatgctatccactcagtaagcagggcgagcagagctcctcaccttgattcaacagcctgctgcagattgggagcacctgcatgaacggccccagcttctgatgctcctgcaacaactccgccaagtactgcctgcttcaccaccaccaccaccaccaccaccgcaatccaatccaatccatccatccatcccgagcagagccaacaccacaagaaacacaaggaacaagccgcaattcagagaaagaaataattccttctgttgtgttctccgcgcaagaagaagaacaaagaaagaaaaaaaaaacacaaaatcaaaacccaatcgtggcgtccggtccttacccgccgctggcagcgtcgggcgggacggggggcctgacctgcggcgacatggcccgcccgggagagaagcagccgtccgtaccgtgcagcccgtccatggcgatggcggcggcggcggcggcggccccagccacccctcggattggggaggaggaaaccaaagaagggacgggacgagggggaggacgggggtggagtcgagtcgagtcgagtcggggagggggagagacgagagagaggtgttggttttcgcctcgtattctttttcttttctcggtacggtggcgaggtcccctttttaggaaaatctcggcaaaaccccccctctgcgctgcgcagtgcgcacgacgtcgtcgtcgtctcgcgcgcgcgcgcccgcgccgccgccgtcacctgcttcgccggtagggtttactataaaacgagagccccgtcgtgagtcggcgagaccgcgcgagagcgatgagatatgctcgtacgacgcggcggcggcgtatctggcctgcgagtactttgccagttgccattttcaggttacctatcttcggtttcgtaattcctaggtctgtttagattttaacttttttcattaaatttttaacttttatgtcacatcgaactttcatacacacacaacctttcaacttttccattatgtcgtttcaattttttcaaactttcaattttgacgtggaactaaacacaaccttagaagtattatttttagacaacggcatgggttttattatattttttttgattttatatattatagtatgcaaaactaaataagtaaacatttaattttattaaagtatttttttgctaatctatatatcgtattgtaggatttaaattaaatattttagaattattgataatcaaagttaaaatagtttgatcttaaaagttaagaattacgtaactaaaaggaaaaatatgtggagtgtttttgtaaagatggagtgtgtattctttttcttttacaaaatagaggggcttttatctttttccagaaaaaatgtgtgtattatagattgaggttagtatgtttttttccttgaaatgacatatttgtgccatgctagatatagtcgatatttattgtatagtactattcgccattatttggatatatatatataaataaaagagcgctacgtaaattctcattgcacaaaagaaaattggtatacatttgatgttatgaatgcggacaataaccatatgtgtcacgctcgatagctgtgatgtgacgatctcaagtgcataagagttgatgatagctagctagcaatatatgacaatgcatatgtgttgtcttcagttgtacgtttggagatatacgctgatcccttgtcactagtgttagcatcgcgctatagtcgagaagtggcggtgttgttttactaacttatactaattccttgtcactagagttagcattacgctatagtcgagacgtggcggtgttgttttactaacttattacttagaaaacatataggggttgtttagattattatcaaaataaaccttaccaaaattttggcaagttgacaatattaccaaaattttggcaggatttcttatgtatttaccaaagtttgacaacaaactaaatgtagtcattttttttacaactttatccaaaaaaataatatggttaaaaatagcatcaatttgaacatgcccataaatattagtgtcatgttatgtgtcaatatatgacatatactattatatatggacatgtctattttgttcttttaaatattgttttgataaaaattcgttttttcaagttaacttttaaggtttctttttttgtccgataaaattaaataatgaagtattttatgtgcacaagagagttccaacattaccttttcaataaaataatgagataataacactggtggagaaaccgtttgtagtcccggttgataacccccctttagtcccggttttccaaccgggactacgaatccgggactaaagatcgctatctttagtcccggttcaaataaccgggactaaagatcgatctttagtcccggttggtaacaccaaccgggagtaaagagggggaatccgggactaaagaggggaagcgacagttcctcgagattttttattattattattattttgttgttgatttgctaatggctagtgttaatctatgtattttctcccgaatcgaatgagatgcacatcccaaatcaacatcacaaatcaaatacatcacaaatcctaaaaactacacacaaattaaatacatcacagattatacaaattatacatcttagatccatgcgatgcaatgaatcacaaaattatacatccagtgaaacacaacttacaaaaaaaaaagaaaaaaaaagaaatcgagccagcgcccggccaccgcctgcgcacagccgcctgcccgccggccgcctccacgcgcgcggccacgccgccgcccgccgccgcctcccccttcgcggccgcgccgccgccgcccgccgccggccggctgatggaagacggagtagaggggaggaggaggaaggagaggggaggagaagaggaaggggaggaggggaggaagagaggggaggggaggaggaagaggattggatatgagaagagcaagagaggggatgttccaatcttatctaaatatctgtctgggacttaaccgatcggatgtgggagagaaatatttactcccggttgataacttcaactgggactaaagatcgatattaccaaccgggagtaaagatcactcgatctgataccaaccgggactaaagtggtaatttttagtcccggttggtagtatgaaccgggactaaagatcctcgaccccctgacatacatctgataggggatgaaccgggactacaaatcatctttagtcccggttggtgttaccaaccgggactaaagatcaaaattttttaaactgggactaaaaatcgtttttagtcccggtttttaatggaatcgggactattgtgaaatttggtcgaccaaccaaagatggtttctccaccagtgtaattacaagctcggacaaatttgaaatttggcacggcctaaaaaatgcttcttcaaaccgatggagagtgaccactgtatgatggcaatgggcagcatcattttcaaacatggagtagcaatcgaccaattcaatacagagtaccattatcttaaaaaaaacagagtaccattttggagtttatcgttcgcgtaacgaaaaccacaggcaaaacataaaccggtggagcatgcaaggctgtataaccagccaaaattattgaactgaattataaggctgtcagctggctcgtgtcaggaaatgatatcacatatttattctgatttttttctctcctctttttcagttccaacctttgatttggttagcgatccaactggcttctgctaattctaccagtaaaccagacgttgtctcgaacaagatgcatctgaattgtctcgatcgagatgacgttggccggagcaaaagacagtccgtcgattaagcctgagctgatgttaactaagcacaccatctcatgatttttaataaggtgtcaatggccaattaggaatctgcaacctaacacgatatatacatggttggtgatcgacagagaattagatttaatgccaaattatcatgcatgtgtgtgtgtaattgtggtaccacttctttgtcacgtgttcctcacagagactgacccagctggtttgagagcgttgcagctgacccaccgtcgatcgatctgcgacacatcgaggccctaaaagtcaacaatcaattctagagtagatcatttactgtggaattcgtcgcatggatcacgatgatgtcttgtgtagtacttttatgatatgtctatcaaacgtgtgtagacgcctgttaagtgacacattacttatatttacggctaattattctttcagtgatatatggcgtatctgtcgatatcgatgcgctcatggtgagtccggggactttattaatttcaagatatgtcggtctaatattaagcgtgtgcgtgttgtgagcgcctacgattatactacagcgaccccatacgtacattgctacaagacatacgtagagtgttgttataaattgtacaacggagtaatatagatcgagtattcgtagaactgactgagatatgattatccaactctaagagaaaaagacttatgcatgttaagaaaaaatatgtaataatctcaatctttggaagcacaactcacgaatatgaattataatcaataataatattcttttttttcctatagcgttaactttcaacaacttctatctccgtatttactagacaaggaaccaaggttatatccaagatatagcttaaaaataactattaaaattattttaagatagaggtaataagttacaattgtattgaacaagtagatagattagggccaaagaaagcatgcccaaaaaatcactctctccttctacagatttcccatttctagatcccaatattttggttgttggccatgtaggcagttagtgggaccgtcgcatccgtggttctacgtcactatttgttggctgaccgctgccttctgcgttattgtctattagttgccatacgtcgcttctattgttgtcgctcaacttacactatcaatatgtacactatacgtcttaaccaatctgattattattcattcagttctgtatttttattattaacatgtgaaaattgtcctgaaaactattgtaatgtcaagcattaccaggtgagattgcatcaaacacaagacaatcaattgacttgtactaccaagtttggcctcatactggctggcgttatgtagagttggggccacactgacaaaggaggtgaagacggttcctgcggtggagagataggtgtgccctgcagtggagagggcgaaaacagccaacgaaaggagcggcaacgtcttgcagcggagcggtggaagcagtatagctggagaaggaagcagtgacgaccaacaacggagaggatgactgacgactgcccttaccttgaacggatagcgaggttgggcaatagcgggcacaatgaacgaggataagccgatgacaacctgacgagaaatttcacgcgacagttaaaaaaaatcacgtgggagttggattgggagcatcgatcgagttgcttcaattctggctcgctttgcaactggtttttggcatgaggtacatttgagaacgattttgggtatctgttggagcccagattttctaaccatcaaaatttagttttagggatatgtttttagcttttcacggagatgctgtaacgacgctgtcacatactaagggtctgtatggatctagggactaaaataggactaaattttagtccctgtcacatatgatgtttagattctaattagaagtattaaatgtagactaccctggactaatttgcgagacgaatctattaagcctaattaattcttgattaatctatgtgatgctatagtaaacatgtgctaattatgaattaattaggcttaaaaaattatctcgtgaattagttcttatttatgcaattagttttattattagtctacgtttaatatttctaattagtgttaaacatatgatatttagtccatgtattccaaacaccacccaactcctacacactaaacatcatcattgcatcaacgtcttctctagtcctaaagcctcacttgcaggagagttcatagcacaggggcactggggatcataatatcatcggatcatgcgagtccaagagcgaatcgcaaatcgcaccccggccagtcgacacgcgcgcgccgtgcatggcgacccaccgacccaccgacccaccgaccgagcgccacgacaaaaacccccccaccatcatccctgattctaaaacccggcttccgtacatcggaaaccggggacgcccacatgcgcaaacccacggatcaccggagctcgcaaatattttttttccttttcggactgggtttctcgcgcacgttcgcgcgtggacgcgtcgtcacctgcacgtgccgctgccgctgccgcacgagtactcctacgtgcaccggcattggatgccctgcgttttttagcggcagcaagtgttgggggagccatgagtatgtacgtggaattaaatttggaaatatattgtttatttaatttttttttctcaaaaatattcgagatgcaaaacttttttcagaaatatatcgtcggtctcgcataaccgttgcacgaaaatgatatgggaataacgttatgggtagtatcacgcggtgaaagcgcgagaccgcgtggcgcgagaccgttcggtctcgctgaagcaataagcgataccgatgccatgccgatttaattagtgattaattatcctaattagtgattaattactaattattatattaattgttaattgagtaattaatcactaatcaaatggagatgctggatagtgccgctgtttgatttggtgaaactgttcggtctcgctcttctattccgcgagaccacgcggtctcgcactttcaccacgtgataccgcccgcgacgtcacgtctacgttatttctgtggaatggttgtgtgagatcaacggtatatttccgtaaaaaaatttacatcccaaatatttctgaaaaaagaaattgaatgaacggtatattttcaaatttaattctatatacgtgtacgggtgtacatgtgggcgtagcagttgggaaaagcggggggtgttgctgatgcaatcactctcccgctagcggctagctgccccagcctcgtactaccaggctaggaaaaagagaaacagtgacgctgtagaggagttgtgaaaaaagcagtggagatggagatcctcgataggttttgtttggttgcttttttgcctgcgacgcccacgcagcttgttgtagcagaggcgaagcagactgactcccaagacaaaagcgtcatctccgccgtccccaccgtgtctgccgctgcttcggcttttcgagctcggctctcgcttcggcggcgtcatggtggcctggcgggtggtgacttttcggcacaaatccagccgaccttgtcatccacccggccgaatccccaacctaccacctccgcatcagtccagtccctgctcccacttgggcgttgataacctaaatgtaaatgctattcctacattagaggaaggtatttctctttgagcagatacaataaactattttagctagtgatagtgtatccacgctgacgttattgatgatcaggatagggaacagggtgtgagccggcgactaattagttgccaactacacacgagctccaaggcgaaagaaacaatacaaaagagcaagatgaagcgatgacggcgggagcaggctgtgacgcgagatgccaaattaaaaaaaatgatatattaatccattgaagtttgtgcatatagccggctgctgtactatcgatgagtgatactcgtggatcagatgagttgagtattggggtacgttggaacgagggtctacgtagtacgacatcaagcagataaaagacaatgattatactggtttaggccccctatcgggtaatagccctagtccaatttatatgggatttatgatgatgagaacagattacaaatagagtagtcgaatcagacgatactgacgagattgtagtcgagggttttgacgagatctcccggcgacttggttccacgtactccggcttcgtaaactatggtgggtgtgttggcgattgaattgtatgcctttcatcccccctgggggtcccttttatacagtgaatcatcttgacccccaagaaatacctgaggatatttgatctggtacgataaaatataaattctatcccttccgaataggactttggaaatcgcttgactcgtagggatattttccataatttggaacatattctttatgacattcatagggatgatccgtgtacgcgaaggtataccctgtcggtatattccataagttgtaggatatgaggtatgccttatctgtaaccctgacatgtacgtattagctttttctgtctccgctattgacgtgttcttttttactgccggcagccatcgcccattattgatcttgctcttatacacacaatcttttcatgtatatttattaatacccacaaactaacaaatatcatagaaaattttatatacatactttaaatagtatgcacctatgtgtaaaattttattttcaaatttattatactttaatcataaaaaataaaattctaacatagttttaccctttaaactgtcagaaataaaagacgatgaagagagaggagaggggacgaagaagaccgttcggagagaggagagagaagaggagggagtgagaatgacatacaggctccacgtgggccccatcaattttaatttttttaactgacacgtgggtccatagtttttttattatttttcagattaaattgccacataaacaccacatcattaccacgtgagatgaagaaatagtcgaataagccatgtaggcaccacgccagccgaaataggagataatactaccgagggacctcgtttggactggttttgtaagttgagggatgagttgtatctggttttttctttaaggaccaaaatcaaactggacaataacttgagaaacctaaatcgaacttattccaatgatggcctaaagtgggaatcacggcccatccaaggcccagaagatacggcccattactctacacccacaagtcgagcaccaccccgtcggcctccacgacgcaggtcccaaccgcttctggcggatagcaagctaggctcgggggaatctcgccgtcgcatcaccgccgccgccgccgcccgccggttcgatctgagaagccgccacctcgccgcccggatcccgatggcgcggcttcactggctggaggcgatgctgccgctgggaatcatcggcggcatgctctgcatcatggggaacgcgcagtactacatccacagggccgcgcatggcagggtacgcgcctcctcctcctctcccttccgcctccgcctccgcctccgcctccacctgatccgggaacccctcgcgttctgacgacctttcgcatggtttggtttcgtttggatggatgcagccgaagcacatcgggaacgacaattgggacatggccatggcccgccgggacaaggtgctcctccatcaggcctcctccgagaacaactaggtgcggatctgaacccatgccgctggagcttgtgctgtggtctctctttgggttttctcgcggggcacggcttatgtgatgggattggtgttgggatgcgggattctagggtttgggttcgatttgggaatgtggttaggttacagcgagtgccttatgcgcatcgattagaagatttagggtggtaatcttaggtctgtggctggaaaatctcaattatcgggccgctcctgctggaaatttgcacatttctagtgaggattccactgatggattgttatggttagtacagactctgtgatcatgttagacttgatactgcgatgatgttaaattgatttcatttcagtgggaataactacttcatactgctgatgacactgctcaggttcttccgttgtatgttggtacgaaatttcagaaaaaaaaagacgtttggttgggttgtcagagtggggtgatgatgttttgtggttaggagagccttttaagctgtgttgctcactatccagtcgttgtgatgaaacctgatcaagctttgcttcaccaatctgccttttccaaacttaatgaatattgttataactacagtctaggttgctgcttagttttctccccagtctccaaaaacccttgcaggattctaccaactcactccaataaaggctcagaagtggcgtgttactgtttatttggtcgctgaagtatattcgagagctggtatccccagtgttaacatattaccacttgtcctttaggtgcttttttgttttgtgcagtactggtggttgtcggcctgtgtttctttttctgtttgaactctgtatcactgttatgggcttggttttcatagctgggtaaggaaattacctaatttctacaagaaataaaaaagactcagaagtcagaacatggatcactaacacaacaactagaagaattgcaacatggtctttgttctatattcttcttgtttttcttttttgctatcttgtgactaaatattgttgcccttaatgtgcaacaaaccttctatgcatgaaccatgaataacaccggtgatcatggcaattctttgatttaatgttaccagtaccactccagcttgctgttgtttggtcacaatgctcaaaccactgtttttcaaagctaagacttaatagtatttgctttatggaaccatttttcttgtgtccccttgcattctgatcaattgctgatgctggaatcacactactagccataatatttatgttgccaaattacctttaatgtgattgaatgtattaagtccccattgcgttttgtatctgcagcatatgggtgggtactatatttgaaatcttcctcagaatattgaatatacagtagagctagttactagtattaaataggccgtgccaatatttggctgatcatggtgaaggaaatctcaacttctattagacagatacatctcatctattggcagaattttttggaatatgctctgatctgaaaaaagaatgtgtattatctttttcttaaagaaaatgctccactgaattttgtgatatttgtgtattgcgtcacttatctaacaatggaaaagataacagtttatgtgtgcattggttacatatttttctatttgttgccgtggtaatgctgactatatccttacccttcatgttgtaggatattgatcaacaatatctagcctggatgttgatgaagttatttcaaatgcccagaattactcctgttagtttccgtgtataatgggaagctgggcttatgtttttgtttacaacttttgaatattggatgaataatgtgtatctggaatctgtttaattacacaaagtgggtgtcgcttgtcaattgtgtacccatttctccccaggagctgatcatgacgaaaatatttgttgttgttgttgttgttgtgtttttttttctctactgtacaaattgagctagtcaccgcggtactggagtttgccatccccagtgacattgtgaactctaccgttgatgccttgggtcgtctcctgatagctgttttctgccaagagtgctgaataaatgaacattagcaggacttgtttcaaatgaaggttttctttaagaatttttcgagtattgaagtttgatatgaaaattttattttccatgacccttggattgtagaatggctttcaaaatcctatgcctaatgtttacatttcctttgcgaagtctaatgcaaagtctcactgcctctcctcttctttccacgctaatatatatttcccttgacattcctgagattttctgtaattcctcggccatgacatccaatcccttacatcttctcaatcatacatttttccatgttgcagaacacctaaataacttgaacatttcattctttatttaaactgaactcctatattcaaatcctaggaaaaagtataattactgatgatctcaagggacagcaagattggttatatggagtgagataatggcccaaagcaggaggtgctttattttcacaattaacatatggggtgagataattacgtgtgctaggaattacatgcaacaaaatgacccaaaaaattaataggcacaataaactctctacatgcacacaacagtttcagagcgatcacaagatgcctttcgtcaatgctcgttcttcatctctgtcacgccattatcgtccttgaagctccggcgagttggggtcgtcgtctctgctgcaccaagatcgtcattggagctccggcgtgcaggcgtcgtcgccgtctccggcgaaccaatgtcttgcttggtcgtcggcgtctctggcgcatcatcggcatcttcttttatgctccgtcgagtgggcggcgtatctggctcgtcgacgtcggcttccttcaagctccggcgagtgggtggcgtctctggcggcgcatcaacgtcggctttttccttcaggctccggcgagtgggcggcgtctccggctcatcgacgttttcttccttcaagctccggcgcatggtgggcgactcggcggcgcggctgttcgacctcgacatccccatcctgccggcgtggcccaacggcgactgcggcggcgtgcccaggccgccgccggcccacaagccgtgcgccgcctcgtgcgcccggagatgacacccgtactgctgatggtcgtcgtctccctcctcgccgtcgccgtcgccggccatgtcctcgtcgtcgaggtcgaccacgtcctgcatgttgagctggtggaactcgacgatctcccggaggaaccggttctccctggcgtacaccgtgttctcgttcgccagccgcgccttctccgccagcagcgtctccagctgctgccgtatctgcatgggatcatggggagacggattggacgtatatccgtttactgtatttcaattaaatagttataattttttttaaaaaataataagatagatcaatatgtaatatatctctacaaacatgtaaatttaaattcaacttctataaattatataaaaaaaataaatttaattgcaaatatttttaccaggtcctcgtcggcgtcgtgcttgccgtcccggagcatgcggttctcctcctccagctgcgcgcaccgctccctggagaaggccatgtcggccttcactgtcttcagctcccgctgcagcagcttcaccttggccgccatggcgctcgccacctgatcaccgccgccgccaccaccacaagcacaccatgaaattcagagagcgcagtcgcaaatccacctccggaacggcaacaaaagaggagggcaccttacgtcgcgagaagccttgatctgcggcgactccgtgtccgacatcgtcggcgacatggcctccgggctggacaatcccatgctgctgttgcggaggtccatgctgcaagccttcctcctgatgtgcagcttccggccatggacgccgtcgcccgtcctgctgctaccctccaccttcgtcaggccctcctacaaaaataaaataaaataaaattacaatattgatcatggcattcataaaatctctgaatgctaatcttgaagagaatgcgacctcgagggcggtcttgatcttgcatccaatgtccaagggagggttctcgggcttccggacccggtcgtaggaccaacgagattgcgatgtctgaaatccatattcagaaacaggttagactgatcactgatcagactgaacaagcaaacggaaaatgtcaaagttgtctgaattaagcctgaatttgcaaacaaagaatcgatttaatttgctgctccatcagcttgctaatcgggtgatgttcttgttgttccagagctctttaccacagagtgattatcatccgtgccgccgttttcgtcgagcatcactatggcttgctgtgccaacactccccagaatccgtgcttcgtctcatttcccttcgcgccgcgcgccgatgtgtacagctgagtgacaggatcctgcaattgttgagtagcatactgtttcacaaaatttcacatcgattttttctcaaattgattcacaaattcagaggaattttctcaaatttagttttgtatcggagcagcgcaccggggtggagccgtcgggctggggagacgaggaggcggcggcgagggagcggtcggggcggcggctgtcgtcggcgaaccgggtggcgcgcggcgacgcgatggccggcgaggaggtgtcccccggctgcggcggctgctggcggtggtcctccacgaaggtggccgacctctggatcccatgcttcctccggtacgccatggccggcgggccgggggacgggggaactcgagcgatcgacggggcgctttgcccgctctcggcttcgccgtccttggattggcgtcctcctcctcctcctgccttaggtcaggtggcgcgcgctcctcccatggccgccttccgtctccgcgccaccgcgcgcaagcagtggatggcatggcattcccatggccgttgcttcgcccgcgttttgaggccgcgcgcttcccgttggatcgcagctcgctctctctaggcattttgcacggaagaggctcctccgacgtactgccctcttacgtggctgatatgtgggtccaccagctgtggggcccatatgtcatcctctcaaagttagggagcagtacgttagaggatcacgttcctgatggtatatatgctggtttgggtaaaaaaaaattaagagtaaatttcataaaactacatgttttatggttcaagttgcagaaaactacacatattttaacacttggcacttaagtatatatattttagtagtttagtttcacaaaacccactattgatgaatggattgacccatgagatgacgtggttgttccatctaggatggggacgtggcatcctatcaatttcgtgtgatggctagtaataggatgccatgtcctcgtcctaggtgaaacatccacgtcatctcgcgagtgaatcaattcatcgatagtgtggttttgtgaaactacacaaccaaaatatatatacttaagtgccaagtgtcaaaatgtatgtggtttttctgcaacttggaccacaaaacgtgtagttttgtgaaatttactcaaaaattaaacaacttgaggaaatcattagagcaagtttaatagtataacctactaatagctccgattcatctatagccaattcataaaatagttgcttactatattattaatacatgattccacctgtcataaacacattacgtcttggagtctgtactacagctggctatatatctgtaacccgctactattctctttcatcttttatctcattaaaatatgtttgtagctggctaatagtcggctattgtacctgctcttaggctgtgttctttacttctttcccatgagttctcaactcatattcttcgtttttcgcgtgcacgtttttcaatctgctagtaaacgtacgcatttcatgtgcacgctttaaataaaaaaatcatattaatccattttttaagttttctatagctaattcttcattaatcatgtgttaatctatcgctccgtgggagggattcccaacccctccaaaagaacattcccaactcacctccttcgtgtaccatgtgcacgcttttcaaattacaaaacggtacgttttttttgcaaaaagttttttacgaaagttgcttaaaaaatcatatttgatccatttttgaaaaaagaaaatctaatacttaattaatcacccgctaatggaccgttccgtttttcgcatgttagaaatatattcccaacactagtaaacgaacacaaccataagttgtggatgcatgattatgactccatatatgaggattcacattctgatgcccataaatattatgtactgtaataggtttagtgacatcggatgtatgctgctggtttctgtctctttgagcatatgctacgaggtgcatttgtaggggtgttagtgtggtgttacgtgcgtagtggtgtgtatatatatctgttgcgtaatcgtaaaaaaacaacttaaaaattaaatttgtctttttaatttgaagttagttataaatatttggcgattatttacgcttcaaaattcgtgcatatttcagaggctcacaggtctcctggtccggggcagttcagtttggccatacgtggcgtcatttcggcctttctgcgacggtcctcggcagggctccccgtccccgcgagccgcgaagccgtaaatccccggagaggcatttcctcgaacacctgccgcgcgcgccgtccgcccccaaaaaccctcgccccaaaccccgcgccggccgaagcggcggctccgtgcggatgccctcccgtcccgtcccggcgcgccccggccggcggtagtaggaagtggggggcgccgagcgtaagatgcggcgcttctccccggccgccgcggcgctgctcctccgacgctcgctcgccgccgccgccgccgccgcctcaccagcgctccgctcgggtccggtaatctcttgcctctttttaaagaaatatttgttcggtggattgaacctagctgagcccgactgcccgaggtttatgcatgggtgattccgaggcctcgttgtgaagggagattgcaatttggacgattggaatttgtagagaatggggttactgtgtgattaagttaggaatttgtctcccattagttatccccgagttaacctggagatcttggtgtcttggtggctcgtgagagcttgcatagtggatttgtgaagtttgagccatgtttaagcatttggggattgtcgtatgatttactttgtgttgttttaaggttcattcgcacagtgtaacatgccttgctttgtggcattcaaattgctcatttgaattctattcgtcttgcctacagagacagctggtgcgtgcctcgcttcttgacgaaagtttgtctacacagacgagttcagcggcttcaaccatggctgtgcagtaccaccaatggtctagttcagcagacggggatgatgatgaggttcttgaggctttcaatcgggactgttgtaccgatgcaggtgctggtgttttggatgattcagcatctactgcctatgttgagaagctctgcacatcaggcaacctccctgatgctgttcagattctccgacatttacatgataggaagatccatgtaggattgggtacgtttaatttggtgctggagcaaacaggcgaagtgaacaacttcgttctttttgccaaggtgttcaggtacctgctgctttccaaaatagctcctgacttgacttcttatacaaatgttgcaaaggcccttcagaagttggatgactatgaactaatacttaaatttgtgagacaagttatggaaattacacatgatagagatcctacagtgatgaatcgcattgttttcaccacggctaaatatggacagattgataaatgtttgatcatatttgaagaactgaagaaagatcaaagagggttagatgttgtcacattcaataccattttggacatgcttggaaaggctggtcgggtggatcaaatgcttcaggaggtgaagctaatggatgaacttggccattctcctgacattgttacatacaatactgtaataaactgcttgcggaggcttggaaggttagatcagtgcaaaatcttcgcaagagaaatggttgagagaggcatcgatccagatttaagaacatatactgcactgattgatattttcgggcgggctggccatattactgaagcccttgaaatgtttgaccagatgaaaaggtcacatcaaccttcaatttatgtctaccgggccctaatcagtgacttaaagaaggctggacagtttgaacttgcacaaaagttatctgaagagatgaaaacaagtgcttcagaattactaggccctgaagattttaaacataagttcaagggtagaaagatcaacaagaacaagtaagaaaactgtcaatgatcttccaggtgtgaatatttcgtttgcatgtgccttgtgctcatccactgtttcagccaaagattctgggataagttgaaatttttcagggaatgtatctcattaacaatgagataatcacatgggcttacaaaagagtgatgattactaacagatacaatgatatcaggccgagagaaccagaatataaatcataaacctctttgaaatatcatggttggaggcttttgctgatgtgcatttgaagagacaggaacacacttctctcatttatatcttcacggatgcaagagattatctagagacaggtcctttgcttatgagacctgaactgtttatctgagattgttccaccatagcgcaaacttgagccaatgaagagttaattctcgattgaattatgtgtgatgtgcttctactggattatcatgtgaatgacttgtgatttgttcagcactcactggttcaatttctgcttgttctgcacttctacaagttcaatttcagcattgccattcatgttcagtgccgtgaagaatagttggagccttgagtaagttgtttaggtccttgtcgtggatcactagatataacaaattaaatatagatcacattcttttattgtcctctactttgccatgcagccaagtagaatattttgtactcatgtaaactgttagtccaaaggaagtggctaaatttctgtcgatttttcctcccattttattagttttttggatctttggattgcatatcaagattcgtgcaaagaaactgaggttccacctgttttgtttttttattcgaaccccctttgttactgcgcctcctcctttttgttttcttttcaccagatggagagaggggggaagctacatgagaggagaggtgatgggggcgatttcgtcgccggtagatcctgcagcggtgagcttcctgatccctcctgtcatttttgtgttgattttgtcttccttgtcctctgcaggtttcagcaatctatgactggaggccagtggtgtcgagcttggccaggcttttgtcggtgtagcacttcttctgtctgtaaggcccccctagcttgtcgtcccttctgaatccagtagctaggtttcaccggtgctctagttcttccttctcatgctttgttgtttatatgcattagggtggttatacaggtttttagtacggttcaatcctcttttcgttttgtatgcttatggactctgttaaatttttgtggcttagagattacactttcagttgtgctcctggctatttcactctttcccctgcttcatttttgttttgatgcataatattgtatggttaacatgcaaatgcaaaaaatcaaccaataaatggtctatgtgtttttctgcaatcatatatgcatttgattagagttttctttaccagagatgtggggttgattcatgattcccccctatacacagattaggtactttcccccccttcatcttttccaattcctgttgctcttcctcttccttgtcttcgtcctctctttttttactgttcctcttattcctgctgattttttcctttttttttgttttctagcaccatgttctgaatttttatatcagctgatcttttaatattcaaatagatgtccagcatcagtaccttgcacaaaatttctcaatacatatttttcatttttttgtggttttatatctgcttcagaaataatggttttactatatttcaacaactctagtggcaatcccttcgaattctaccttttatctgaacctgaattttgttcagtcgcaaacatgcttcgacaattttcatgttttcttgagatgatggtatatatttattttacctgcaatattcaatcaaacatctcacccttttacttcctgataacaatgtgaagataaatgcatttctcgagtacattaaaatgggagtggcattagttttcaagcattattctatcagactgcagttcctgaaaaaaaatgcttgatttgtgattgcatcaggtttccacattagagatacctagctttagatgagctcacctctgaagtcagcatgctcaatcttgagcgtgctaggcaaataaagagtcgactggtcgctatatctggcatagttcacaaggtcagcttgagcattatggtatatactacaagtatatgtgaacatttatacaatgatgatatggtttattgtgactttgtgagtaattctgaagtgtccgagtgctatttccatgaatcgtttgacaggtcagggatgaactacagtgctagctagatgacgacatcgacatgacaaagctcgcttaccactcagctggctgccagtcatcaagatttgacatcgagaaagaagcaagcgagctcgaagatagtaataggtatactcctacaagacaaaaaaaaaaaaaaatcttccacaagttgataagttggtgcttcatccaaccatggacatgacgtgtgcctgaatgcagcgccagggaggacgatgttgataagttgcaaacatgcttccacaattttcatgttttcttgggatgatagcatacggagtataagccttcattttatatttttacctacaatattcagtcaagcatctcacccttttacttactgataacaatgtaaagatagatgcattgctcgagtacattaaaattggagtggcattagttttgaagcattattcctgaaaaaaaaatgttgtttttctcgcctgggctgtgtatgttgtgttgttgagttgtgtattcggctttgtgggccaaaaagaacatgcgaatgttttggcaaagaagaatccagccattcttgaccgaggtggccctaaacaacattcgaatgttgggtagacaatccctattccctagtccaaattatcttatcgtctgttgattatttgttttttccacgtgctttcatgctatcctctgtagaaatatgccatggatttcaaattcacagtacgcttctctagaaaaaaaaaatctcctcttacataatgcacttcaatctactggtcctactaaaccaaaagcaagaatttggggatacaaggctctctattagttggagatatcctgtattttacgatcaaatgtacaagaggtgctgacacaattcctttgcctcatctattgttttcagcagctaaccaaacaaaacatacaatagcaggcctctcgcaattgtccacggcccggaaaatgcaacccgcagatccaacagggtcgcacttccaatcaccttgcactttgcagcaacatgtatttcatgaacatatcatattatgtcatagtgcagttagtatctacaaaagaatcagatgaaacattataaactacaataactcgagggacagcggaaaaatgtacaaccagacacagtactgccgacagcagctaacccaggaggagcatcatattcaggcacacacacccagagggggctcaaaatcaaatacctagaacagcatggtaagatataagataatccatcctgccatggagaagacagcaaaaatgtgcacccagaacaagattgcagctgattccttgccacaacctcttaggtttgcaacagcacctgcccataaaaaatagcagattagtattgcaactgtattatactcaaaggttgattaacatgccaaatatgatgtctcagtcatccttatactttttcgtacctgatagtaccgatgtgggcatagagtgctgcagtaacaggacgaacttgaacatcttgtctccttttggaataaatccaagcttgtcagcaaatgagacgatgccaataccagcaattggaaccaatatcaagcgtgcaaatataatcgcgacggtggtccgaaccccaagtctcctacttccttcaccagggcctaaaaccataataaaccacaagtatggacttcagataaacatataaattgcagaagtataaatgtactaaaagcacacttcatattgcagcacggttctaatgagatttgagaatacaagatgagcttaccgtcaacaagattgccaccaacggcaagcaaaatgcacggaatcatagcttccctgaaatatataaaacagcattgttagcaagagatggtttttaaatgcgaatcatatttgttattacaagacactataggcatattgcaagaagaaactacaagtcatgagacaggtcaatacccaagaatgagacagctatctgttaaaaagaatagaggcgcgtcatctgtgaggatcaaattcttcaagaatggcacaacaccgagagtaattgcaagaacctgttacatgacgcaaaggaacattcagataattgagaaaaatgcaagtattgttttacggcagtgataagagacaaaaaccaaatataccgagcacttacagatgcaatgattggtggttggaggagctgcttcttttgtaggaatctaaccatgcccttgataggaatcattatctgcattaagccataaatggagtattattagttattttggtaacaactactgaagtgcctctattttttttttccaatatgctgaactagcattatgttgtgcccacttcttacttttgaacctaaagaatgaacgtcctgcccctcctcctcctcctcctcctctatagatagcaggggctcttcctcatgtgtattgccatgagcacttgatggatatttcgctacacttgacatggtattaggagccttaattggaagtttatctctctcctcatcgcagctgtcaaaggtctgcccggggggtggagcaagcatcttgaacacatatgtgtaaacaataatggcaccaacctgcaccggtaaacaatccaatagatatgataagtatttggagtagcattttaaaaagggatgtgcaactccataaacaaacggatttggacatacccattgaccaaatgataagtatgcatttccatcttgagtacatttgttcgagtcaccaaacggatttaattggtcgcgacataatgccgagataaggacaagtggtatatttccaatgttccctgcattaagtgaaatgttaaaaatataatgcagaatgcgtgatgaatcagaagctagcgatattcataagggcgtgaggaatgtacaaacctattccaatgtgagtgatggtgaacttgaagtatggataaggcggccgtacaatcaatgccactataagtccaaccaaagatgcagagactgcacccagagcaatgtttgctggaatgaaccacctgcaatgcaacatcatgagtaatgttgaaatgctttgacacaagaagaccccaaatatcgccaagggaaagatacaacttgtggctaatcatctaaatgagtactaatatgttctttcttaccactccatgatcttgtcaattgtgattgatctcccgagctgcgcaaatattaggcaaggaaggagcagagagaacacaagctgcaaaaataacaaaaaaaaaaaagacaagataaatcaacatagctagcctgaattctgctgatgttcccatagctagtctgaattccattatattctgaaaattagcgagccaccatgatggttgtgagaactactgaattaggcgccttaccgcattgagaagcttgcggccgctgggcttgagcacgccgacgcgcttggacgccatgaggaaccccatgaagcagacgacgaacaccttggcgatgggcagcacggcgtacctgaacatgcccaacaccgactcccccgccgcgccgccgccgccctgcgccgccgccaccaccatctccagcaccgacctccccatcatcgccgcccccgcctccgacacgaaaccacaagcaaccggcgaaatcgaacaggattcctccccacctaaaaccgcgcgagctgaactgatcgaacagacgcggctgcgtcgcgacggccaagcagctgcccggggcggcgaacttgtagccaaaaatagcaaggaatcagttcccgaaacggccaactcctcctcccgacttgtacaaccactttccccttccgtgtcaggatccaacccaatcactcaatcagcgtaggaatcggataccaactcgccgaaatttagggttaatccagcattattagaaagaaaaaaaaaggatatccgagatttaggcagcttagtacgagcctaccaaccgccggaaatccgagacttgagctagagatcgcgcaatgtgatcccactcatccgtgcccaaaaagggcggaaaacccgcaggggagagagagctcaaaacgccgccgcgggagcacggggaagaagccgacggcggcggaatctccccgggaatgcggcgaggcgatcgtggtagggctcgtcggcggcggcggcggcggcggcggtggcggaggattcacggccgacgccgccgcgagccgagggaagttgagaagacgaggcggcgacgagaggagaagcgtgccacgtcggacgcgtggggcccatggtccagctacatccccggtcacttttttggggcccacgtgacgtggacgagttcttggttgggagacagagagaggaggacgtgacgtgaagtagacgagtgggccgccgaaatccagcggagctggatttgaggcccatacaggaaaggaaagtaggcccaagtttaagaaaagagataggcctagttaatttacttacctttcgcaagtggttagtggatccgttggtctaccagcttgcactcctactttaagatgccctcaaccaagagcagctccaacggcgaactccgagatcaagtcgccgaggagagcgacgaccacggccacgatcgactttaacttggaaaaatgaatgatttttcaacttatagtagatctgttcttttcatctcctgcttcctactgcaaatgatagcgtgattatatttgcagtttgatcatcttcctatcgagattgtgtggtactatttcgctacaagtatatattggtagcgtgattatgtttcatgatgatcgatgagaacggttaggttcgatccacttatctattaatcctattcatagatatactctaacaaatcttcagaatcgctttaaaatataaagataaaagaatcaaacccctaaaacctaggtctaaagggttcaacccaaaaatggttttacatgtatagatggccaaggtttgtacaaagttaccaaatttaattaaatttaacaagtttttatggtgtgaacatgagtttcaaaaatttgggtctgagttttacacacacgtagcgagaatttctcgatctatttgtaatatattgtggacatcacatgtataaatggcataaagttatttctctgtataataaatcattccaacaaaatttaactgaatttgataaatttttttggtgtgaacacgagcttaattttttttaaagttttacatgcatatattaggaatttattggtctattaataatgcaaatgatccatttgggtaaccctaaataacatatcgatatgatgaactcatggtggattgatccggttgaaaaatgtatctacaaactcagtaaaaatgattatgtttgacacatatcctaactattcctatcctgagttatgtttacaacattcctttttttcatggccatttgctaactttaacgtctctttttttcctgagtaatattttgtattcaaatataagattaatactataaagttctggtcaattaaatgttacgtacacaagtgtacaaagtgaaaagagtaaaaatgtgatgtccacaattttactctttttctattcaatgaaaatggcggattgcatatgttcttaagtttccagcctaaaagcatccttggcatccgtccaatttcttgcttgttagaagagaagataaaacaataaagcaggtagttactatcatacatgagacttggtatattgcaaagataccttttaaaaagatgagatttgaagggagaaacttccctcaaaacatttttttaaaaagaaattgtgagtgcgtgggtgattgaacacaggacatgggattgaaactacacactcttacaactgcactatctgcaagtctatctcacagagagaccttttaatctaaaatcctctctgagagctgttgacgaaaaaaatcgaacacgccggcctgggagatctgcttagctcctgtgcaagtccaaagattggtcagatgcgggcgtgccagtcagtttgattctgcaactgacaagatatgcaaatagtagatcaaaacagtcgatcggctgacaagccgatggagtagttccagccgatagccgacaatagccgatgccgataccagccgatagcgatagggtttaagcaatcggctatacgtccaatgtagattctaacactttagtaaataatgatatataggcaatcggctactgataataaaatataacaataatatagtccagtataaaccaatcggctagcattgatatgatagaataagcactgatctgaaggttaaagcatacgtcggctggaggcccgatgtcatgaaatccacaagattagattaaacagtgaaacctttgttgtcatcggctaaatccaacttatatgtatatgcaatccttatgagtcgatgcaacgttcagataactcatcggctgaaaccccgatgaaacccttattggcaatcaagaagcaggctagagattatgtttctaagcacgacttagtagattaaacttaactgatacaacactaagtatgaaaagaaacataatatctagacaatcaagccgttgactgagttttcagggtggtagatgtctaagctaatctaatctagcaacgcgatttagccgataccagcaaaaaccctaaaacgagaagcagccaatagagctaaattgatatgctaagactagattaacagagacatatgataaataggtaggcaaatatatcatccaaaccagagcaatccaagaggtcgaatgtactgatgcagccttgaacgacgccgacgtagacgatacaattgcctggaccggcggaacattggacttatcccttcgctggagatcgaagacgatgcagccctgcgtcgggtgccaaattccgtcgggtgccaaagggtggcgatgcgccgaattgtattgatcgtagcgatagattacatagaccccgggtatacatatttatacccatgggttgatacaagttcttgtcggacaagaaagaaactttcctaaagataaaaggaaactaacaaactattcctaattaatagataacttgccatgccgcattctctttgaactcggtctcttctggataagcttcctttagtagatcaatttccttagccgaatatagcaagaatccgacaactgacgacttgacaactctcatcggctaatctcatgacttcgaagccgatgctgactctaagcgatgactactccgggcttaccaaatttcactgttaacaagagcttgagctaggacgatggttttgtttaccggagtatagtgttttcttcctgtccaacaattgattatcaagccatgctttacaagtgttacttgcaagagaacttttatggtacaacaaactgatagtattaaccgctggaataaatgatctaatgctataaattgatttgatctcccacttataaatagatggtagtataaaattttacagggtagattcatctttctttgctattctgcaagggtcattttttgttaaaaaaagggaagtaattaatttagataaaaaaatggtaccgtcgcctggggtgtatgagcaagacttagaacgtgtaagacctttcacacacatctgctatgttacaacttacattatttgatcggtaattggtcacttgtaaccaaagtatgtagatttttaatgatgatcagaatcgaccaggaatcgtgccactgcgatgctcgtcattgtctctcgcgggcgtacaaatgagatccaacaacaatgctagtggcccgacacatgaacgagtcctaattggaccgaattgactctcaacaacgaaattactagaaaattttctccaattttcgataggactccaaattttcctatctatataccggcagtatgttgtactgtaaaagttctaatttttcaactaatcatcggctgctaatgttcaacaccttaaaacatttgctcaaacacattaaaaaatttgctgcaatttttctctattactgcatactcattgttggttgaacgatttacatcacaggttcaccaaaactggtatactttgatgtcctgtctatctggggactatggcaagtagttcatcacctctatgaagaacttggagtattcatgcttgatcctacaatcatcactgcaaaagactacatagcctccccatccctactccacgccgcagcaggcggtcatgcactggtggctatcctccggtagcaccagcatcctactgcgacaccctccaaccttccacattgcttcctggatcacgtcctcagtgatcttccagcaccgttggcactcccggttgatcctcttgactccaacaccggtcgctgccttatcgctgtcaccctcgacttggctgatgcacttcttcctggtagcgtgagcctcattggacttgtagaggaggaggatgagcacgta

SEQ ID NO: 20855 - DNA, 5119 bp, Oryza sativa
  unsure (1)..(5119): unsure at all n locations
gcgatgtggacgatgctatcatagcaaagcgccaactctttcattgttgccgacgctgccgatggcctcttcaacttcttcgcattcgctttcaccgccatgctccaggtggacaccatagcaccttatgcgcaagacacatggtacgtgaactcacttggatgtgttaattaatcactgctaggttgatcccttcttaaactcttgtaacaatagccttatttagctatttataactcgggccatgaatgccagccaaaattagatttgaaacgaacgcgtaaaaagattacacaccttatctcatttaatttcttctctactatatattataaaaattgaataaagatgttcccttctaaatctttggtacatggtcgtatgtctgatagcccgcccgcatgattcccacgcaactaagtactatcgattctgatttcgattccgattccaattctgatttcttcgtccatcgtctctcgttgtccgtctcctcgggtcgaacattgcttggccgctgttgttgctggcggcctgctgctcaggatcctgatcaggagttcaggatgagctcaacgcaccaaagtgtgattcacattaattcatcgatttgctgttttggcacggtgataggaaacaactaattgatcgctaatgtaaaatttacgcttgaaatcaacgcatcacagtagattcatggattcttccattcatatattgacgccaggtggaagtataccaaggattgctaggaaaaccaatgctaccatttagctgaatgaaatgctgaaaatatactggtagaatttactgttagtataaatgatctaacagtatagattgatttgatcttccacttaaatatatggtagtataaaatttacaagggtaaattcatctttctttgctattccacgagagtcatagttgtttaaaaaaggaagtaattaatttagataaaaatatttggaaccatcgtctggggtgtatgaatgtgttaacctagctagcaagattcaaaacatgtaagactactttccacgcacatctgctatgttacaacttacattatttgatcagtcattggtcacttgtgaccaaagtatgcaaaactttaatgataattagaattgaccaggaattgtgtcaccgcgacgcacgtcatcatctctcgcatgcttacaaacgagatccagtagcaactccagcggaccgacacgtgaacaagtcccaattggaccggattaactctcaaccacgaaataactagaatttatttttccaattttctataactcctaatttgtccatctatatacttgcagtatagtatactctaaaagttctaattcttcaactaatcatcgagtgctaatgttcaacacattaaaacatttgctgcaatttttctctgttattgcatactcataaaaaattgttggttcaacgattttcatcacaagttcaccaaaactggtatactatgatgtcttatctacctggggactatggcaagtagtacatcacctctgtgaagaacttgtagtattcatgcttgatcccacattantcactgcaaaagactccgtagcttccccatcctgactccacgccgcagccggtggccatgcagtggtggctatcctccgatagcaccagcatcctactgtgtcgccctttgaccttccacgtcgcttcctggatcatgtcctcggcgatcttccggtactgttggcactcttggttggtcctcttgacaccaacgccggtcgctgcctcttcgccatcaccctcgacttggctgatgtatttttcccggtagcgcgagtctcatcgaacatgtaggaggaggccgagcacgtataccgccgccttgtggcccgtgatggctgccttatcgaggaagaggaggccttgctccatatcctgatgcgcgaagacgagcgtgacaccgacgatgaagcatgcgtctaggttgtcggcggtaacgaggtggttaacgacgatgaagtagcgctcgttctccatccacttcatgttgtctagcctctccagcggcacataactcccaacatcacattccttggccaccgcgtgcatggccttacagctgcagtatgcatacacccagagacttatacaagtcaatatataaatatttttacatgcgtatataaataagcttatattagcgagttagcatacgtggcacataggctgagtaggtcggtaataggctccgatgaggtggcagcgacgaggcaggcgatgtggacgatgttatcatggcgaagcgccaactctttcattgtcgccgaagccatcgatggcctcttcatctgctttgccttcactgccatgctccgggtggacatgatagcaccctatgcgtgagacacacggtacgtgaactcatttggatgtgttaattaatcactgctaggttgatcccttcttaaactcttgtaacaatagccttgtttagctatttacaactcgggctatgattatccacctgttactagtagcaaacatacacggaattgcttaatgtcagccaaaattagatttgaaatgaacatgtaagtagattgcacaccttttctcatttaatttcttctatactgttatagaaattgaataaagatgttcccgtctaaatcttgacacgtgtggtatgtccgattgcctgcccgcccgattcccatgcacctacctacttccaattccgattccgatttcttcatctatcatctcttgttgtccgtcctcgggtcgaacattgcttggccgccgttgttaccgcggctgctggccagcctgctgcttaggatcctgatcggtagttcaggatgagctccaacacgcctaagtgtgattcacattaattgattgatttgctgttaggcaaggtgacaggaaacactaattgatcgctatagtgaaatttacgcttgaaatcaacgcatcaagtagattcatgcattcttccatttgtataatgacgccaggtggaagtataccaatgattgctaggaaaaaccaatactaccatttagctaaatgaaatgctgaaaatatactggtagaatttactattagtataaacgatctaacggcatagattaatttgatcttccacttaaatagatggtagtataaaatttacaagggtaattcatctttctttgctatttcgcaagattcatttctattaaaaaaaggaagtagttaatttagataaaaaaattcggtaccatcgtctggggtgtatgaatatgttgacctagctagcaagattcagaacatgtaagaccttcaacgcacatctgctatgttacaacttacattatttgatcggtcattggtcacttgtgaccaaagtatgtagatctttaatgatgattagaattgaccaggaatcgtgcccccacgacgcatgacatcgtctctcgcaggcatacaaacgagatccagtagcaacgccagcggaccgacacgtgaaaaagtcccaattggaccggattaactctcaaccacgaaataactagattttttttccaattttctataactcctaatttgtccatctatatacttgcagtatagtatactctaaaagttctaattcttcaactaatcatcgagtgctaatgttcaacacattaaaacatttgctgcaatttttctctgttattgcatactcataaaaaaaatgttggttcaacgatttacatcacaagttcaccaaaactggtatactccgatgtcttatctatttggggactatggcaagtagttcatcacctctgtgaagaacttggaatattcatgcttgatcctacaatcatcactgcaaaagactccatagccttcccatcccgactccacgccgcagccggtggctgtgcagtggtggctatcctccggtagcaccagcatcctaccgcgtcgccctccgaccttccatgtcgcttcctggatcacgtccccgacgatctttcggtactgttggcactcccggttggtcctcttgaccccaacgccggtcgctgcctcattgccatcatcctcgacttggctaatgtacttcttcccggtagcgcgagcatcatcgaacttgtagaggaggaggccgagcacgtatgccgccgccttgtggcccgcggtggctgccttattgaggaagaggagtccttgctccatgtcctgatgcgcgaagacgagcgtgacaccggtgatgaagcaggcgtctgggttgccggcgccaacaaggtggttgacgatggcgaggtagcgctcattctccatccacttcatgttgtccagcctctccagcggcacacacttcccgacatcacgttccttggccgccgcgtgcatggccttacacctgcaacatgcatacacccagagacatacacaagtcaataaaaaaaatattgttatatgcatatataaaaaaaacttatattaacaagttaacatacgtggcacgtaggctgagtaggtcggcaataggctccggcgaggtggcagcgacgaggcaggctatgtggacgacattgtcgtggcaaagcgccaactctttcattgttgccgacgttgctgatggcctattcatctgctttgccttcgccctcgctgccatgctccgggtggacaccatggcaccttacgcgcaagacacacggtacgtgagctcacttggatgtgttaattagtcactgcttggttgatcccttcttaaactctcgtaacaatagccttgtttagctatttataacttggaccatgattattcacctgttattagtagcaaacgtacacggaattgcttaatgtcagccaaaattagatttgaaacgaacgcataaaaagattacactccttatctcatttaatttcttctctattattacaaaagttgaattgaataaaaatgttcccattaaatctatggcatgtggtagtatgtccgattgctagcccgcctgattcctgcgcacctacgtactgccgattccgattctgatttcttcatccatcgtctctcgtcgttcatcctcaggtcgaacactgcttggccgctgttgttgctcctgattaggagtacttc

SEQ ID NO: 20856 - DNA, 18872 bp, Oryza sativa
tatatatatatatatatatatatatatatatatatatatatatatatatacatatatatacatacatatacatacatacatatatatatatacatatatacatacatatatacatatatatatatatgtgtgtgtgtgtgtatacatatacatatacatatacatatacatacatacatacatacatacatatacatatacatacatacatacatacatacatacatacatacatacatacatacatacatacatacatacatacatacatacatacatacatacatacatacatacatacatacatacatatacatacatacatacatatacatatatacatacatacatacatatacatatatacatacatacatatacatatatatattgtagagagtgggaactgactaaagaggctcactgttaggttggtggtgctggtggccagtggccaccaccactaactctttttaatctagtatggataatcagtgctgacatggtttctatttcttgaaggggtaaagtgtattcctatgtgtttatatggcgagcgtggtcagtttatatatatacatttgcagttatattttttctattaaaaactctactttttgcatatttttctcttatttgagaagagtcccgtcaaccaattagatcttatatgaatttattattcagagcaatttactggctttagttctggggccaacttcaaaggagtgaaaaagacacggaaatcatatatgttgcatgctagattttaatcaataatcatgtagtttttgctaactttaaatagagatttagtaataaattgaactttgaataagctactatttttctttggttgatatggccgtcaggccatgtcgtcttttcatctatctttatttatttctattaggctttgagccaaaaaatataatttataataaaatattgcagtttcagttggagtaaacaccgagtttaatattcactattaaaataaacaactaaatcctactatttaaatcaggttacttcatgatcaccatggacccacttgttagtgagaccaatgataaaaaaaaaatcaaagtgacttaaaaccagaggatccacatcctcgacgttaaacttctgttgctgaactgcatgcttaccactgttttgctctcacacgcatcaaatgcacgcaaggcgcatgcatgcaaaagagcgttacgtgcgcgctcagcctttgtcgcgcgcgcgcggggatcggtcgtcagatcacatgatcagctagcaaaatctgccgccaattgcatgttggttgtggctaagctacctgttcttaattagacaagaacaaaatggagggacaaaaagggtgtcatgtgttcatctacagctagatcgagccaattatgcaaagcacgcccgatcgatgcatatggatcccagctagcttagctagtacgtgccgtgtgcgaccacactcctcattttctttgttggaattgctaagccatcaaattcgacggaaatatatgagcaaaatctggtaaattttcaaccttcggatctactttttgcgattcatcctccaagaagttttttctaagaaattgaacaggtttcgctaaaattcgaacaagttagtgccaaattcaatagaatatgaaattcaatagactatgggatttcttttgcctgtaaaaatatcctaccggaacccaaaatggtaaacgtggaaatttgtgaatctcgtaaatttagttacaaaattgtaaacccggttcgaaattgaagcgaaagttggagaaacaccagtgatgtggtggtgaagtcgtgagtgtatgactccacacccacccgaatttatattctagttcctaggaatcttacacatatgtagctgggcttctaatagaattttactaagatcagatatgtgccgcaggttttcatctcctagagtgtgtgttaggggagtgtattcgtgacggtgtaagtgtggtgttacgtgtacagtgatcaacagtgaaaacctagaaaaaacttatcgagggtccactacatactaattatgtagttgttggttggtatactaactaaactaatatagtataaaataaactaggattgaataatttacctggtgtcctgtgatccgggtagtagtgatatgtgtgcgtgtgcctttgttgtgtaatcgaaaaaactaaaagaaaaaaaattgaagcgaaagttagctagctaggagatcgatagatagtgcaaattatatatgtagtgaaaacttaaaaactatcgttaaattgaaaaatgatcgctttagactcgcgcattaatttttggatccaacggtattttcccacgttcgagagaggtacgttttcttaccgcgcggtagcgtacgtacagcgtgagagcgcgcggccgttcccctgagttgcgaggccctgactggtccacgtgaacgcattcatgcgctgcgcgggctggctgcgccggcgcgtcggctccagccgcgcgcgcgcgcgcggcggggctttgctgctgtgtttgtcagccaatggggtcgtcgacgtcgcgcgcccacaggtgacgcctccgctggcgctggcgccatatgggcgcgcatggccaatgtcccccatgccatgcatgcgcacctgcgcggcgcgcgcgctcctggcacctagggggatctatcggtcgccacagctagcggcacagatcaggctatgcgtacgctttgcagtgcgatcgatgcatgggccgcgcggccggcgatcgatatcggtcgcctggcttgctttgctttaggctggtcctgcatgcagtgcatgcatgcatccatgcaatgcatatggtggtcggtcgtcggcaccacgtacagctgcatgcaggatggatggatggatgcacggatgatggatccaattacctgtagattctcatcatggagacaagagtacacagtgccagcatggatgagtaaaactaccgtactcataataagcagattctgtaacgggaacttcttcaagacgtcgtcatccttctgagacagacttcacgtaagaggatctcaatctatggatcgatccacattcaccacaagaaatcaatgctgtagatttaacatgttagccttgatagcaagttggtggcgcgcgctgatgagtacttgcaggcataggcaccactgcacgcctctactacgcagggttgggagttgggagtaggcagctagtgataggttggacctggtttttatccggccggccagtttttgcaagcagagccatgacccatgagaggagaggtcctcgtacaccgtacacacgtgggagtgcttctgtgctgcgcggtggaccagcgtgtgcccatgcattgcattgcccgagacaggtcaccgcctatccgactatagctatcccgctttctcgctctctcatcaccgaccttttcgttgctctccatcagtagcggggccaaagaaaaagaaaaactaaaaataaactgccgcaaatgttttactccctccgtcccataatatttagcattttagattatttagtacagggacggagctagaacaaaaccaagcaggttccactcgcttactttactttggtttgaatcaaatttagcttgatatgggtgcctaaatttaaattaacgggatatatatatatggtgaaaatagataaactataggtaaaaattcttttgaaccgggttcctagacacccccctagctatactagctccgtccctgatttagtatagattaaagtttaataaaaaaactataatatctcttattgaataatgtatgatgggaagttgaatgatggatgagggtgaaatataatgtgaaaatttttacatggaaaaaaattgataggacaactagctatttcatagtgtaactattttgtataaaatttgaagagtaaattgcatattgggtcactattttttaccactctttcagcttggactagggatatatctacattttcatattggaccaggtaaatttacaaaagtttcaccttggggctgttctcacacctacagctccctctctcctctttgtgctctctcactctctctattccctcatcggatgctgggtgggctcaagatgcagtgtagcatgaagctgtcggtcgagctcgacttaagtgaggcaccagagctatttggactaaggtcaagcgttgagttgggctcaaggttgagcgcggcactgacgacagcgcgacagtgttcaaggtcatggtcaaacgcgtagtgacgccagtgtggcttggtggacgcttccatccaatgccgatgctgatccattcattcaccgacgaactaaccatccattcatttgtctcggacacattgatctccatgttgttgggtacatgtcaggcttgctggtcaccttcctaatggagaggatcagccgatcaagccgtttgctagccgggcgccaggttcgtcacattcctaatggggcagccagtgcaattcggtgatgattaatttggaatatggagaataggaaggagagctggaggtagaagaaccagcccaaagtgaagcaatgggtaaacataagtggtccaaagtgaaaatatttgtttacccctagtccaacttgcaacaatggtaaaaaaaagaggtccaagatgcaattcacttaaatttgaataataaagagataagtattttggaacaggggtaataagtgaaaaactttcgaataactctagtatattatagttgtaatataattttatcataactatattataacttataatataacttgtatagaaatattaaaaataagtttaattttttatcaagtatacatatcaattatgttgtaattatattatagttataactataatgtagtgtaattatattgaaaaatattttcacgtagatatgaatttatctggagcagagatcagtcgtctcctctagttcgtggaaggctcgaagcccaagttcgttgatcaagcccgaagattttactagaacatgtctttcaacatgccgatcgacccacctcttttctcaacccacctctctcattttccacgcacacgctttttaaaatactaaacggtatgatttatgcaagaactttctatataaaagttgttaaaaaaaaccatattaatctattttaaaaaaaattaatacttaattaatcatgtaataaaacagtgctaggaaggagggtttccaaccccctttcccgaacacagcacagcccggtcttcgaacgagcaaatctttgacatgggagcaagtctacgaccgaggtgtaaatttgtctcacgtatactccatatacgaatggacgcaggctttcgaatctcaagtgctgctcgaccaaagaaagtgagagagcttggcccacttccggacgagaaacctagcatcattttagatcacattatgtgccacttgccctttgaacgcactagctcttccttaattaaggatatatatgtaggtgaagaaatgcatttcttccgctattttgtatgtgacccattctcctaataattgttattgataacatctttattggtattataagataatttctctaccagcagtggcgtgcccacatataacttaccggtgtcacaggacaccgggtaaaattgttaaattctaactaatttatgctattttgattagtatactagtgaataattagataactactatatagtgtacgctgggtaatttttgttctaggttcgccactatccaccagtgaatgtaacttgagctaagatagtttcacgacaccgctcgtatagtagccatcgatagacccaaggctctataacctcgggcaattgcctagccacgatagcacgtggcaaagagaggagacacatcgctcaatggcttagaaagttggttctcgtctgacctttacaaaattttttgccccactactaaaagtatcgtggtgattggatatactaaaagcaatgacattcgcaccattaggaatagtgataggaaccactccaccctcttgtgacgtggtaatatttactctccctccgtttcaaaatcactattaagaaaaccgttttttaagacgactaaaaatcatttttgccgggggggaggggggcggcccgcctgtacacataagcctgcctgcaaaattcgcaggctgcatctccatcttcgcaggcgccataggcacctgcctgcaaaaatattttgcgcgaacaaaaaaaaatcgccaccacccccggccacccccacccacctctggccacgttgccgccgcaacccacccacctccggccggatctatggttagggttttgggatggagaaggagagaaagggaggggaggccattgccgccactgcctggagccaccgtcctcccccctccctccagccggatctgggaggagagaggggagtcgtcgctgccaccgccctcccccctgcccccttcatccggatgaatctgggagggaggggagggcagccgccaccgtagccggggagagaaggaaggagaggtgggaggagaggggaggcgaggggaggggagcgcggatgggagggatgcaaggaggagttaagggagagggacttaggtgactttttactgagtaggtggcgatttttatgatgcttaatctttttggtatttttgcaggcaagagatccgcatgtaaaaatagattttcgtaggtaaatgatgatcttgtccatggttgtcatttttgtaggcgtccatttagcttccagagggttacccacctggaaaataaataccatcctctgaaaaaatggtttttctggtagtgaatatatggtatattttattttgttaggataaggctttgactaataattgcttccctaatacttgtacaaaaagtataatcatacaaaaagaagatgaacctaataacatcaattttacttcacaaaaattttattgtaatagagtaattattggtcaatatattttttaaaacaaaataaaatatatatatatcctatatttcaaaatagatggagtacctgatatactgttttgctcaccgaataaaaacatgtacataatatcactaccacataacacctaaaagttgacagttgggaaacctccttaggtgtcggtctttccaaccggcaccatgtaagcggcactgataagtgcgccgacaccaaagccattttgaaaaccggcacctctgagaggttcgcgagccaaaaaaaattgctcaatgcaccggcttgaatcgagccgatgcatcgagctcatccaccccgcatcaatcaatcccaaattaaacaacatcacaggaaacattgaaaaacattacagaaatctttcactaaaacattacagaagaacatctaaataattacagaagaacatcacaggagggagggcgccgccgggccaccacctcctcctgccgccaggtagccaccgcctcccgccgctgggccgccaccacctcccctcccatcgccggatctggcggagggaaaggcgtcgccgccgcctcccctctcgctgccggatctggcggaggggaaggcgccgcaatcgggccgctgacgcctccgccggatccagcctgcgggagttgtcggcgagggagaagagagggggaggggacagggaggagagggagtgagagggtgcgccgttgctgatgcctcaggaaaggaggacgaggaggaagggaggagatggggacgacggagaggggaggaggagacggacggtggagaggggaggagtcgaggagatggccgagagcaagagagccgagcggggctcggtgggagagagaagcgaaagggaaaggataagatcgatggttgccttatctcttgcagtggaccccaccagctcggctcggctgtttagctggctcggcttgattcataggtgcccgtttttttaaagaaaacgacacctataatatattaaatgtgcagtgtcggttcttatttagaatcggtacctataattgcttaaaggtgccggtttttcgcgatttggctataggtgccagttttagcaccgacacctattttatgttttgtagtagtgtatgcatcttatacattaacttatatctgttttaaattatatatagtactggccggttggtgcgaaacgacctgagcccctgaactatcacagatgcaccctgacccaattgatcataaaacaagccactctcttaaatatataaaaaaggatactaggaaataaacaaagcatttctgctcatcacaatcaactctcgacggcggaactctaaagaaaacaattctctgattgcttgcctcattgactgcactagctcatatatgagcacttaaaaaatgcaacattcattctaaaataagtttatttttatacatcccacgcatatcaatataatatatttttatcaaattccaatacaactatttttactttatttactcttaatgtatttattcttttactttggtaaactctaacataataattacattaaaaataagcttatttgaaataaacatgagaaacctaaaaataaacttatcctagaccagatggagtaccagcgttgatctttctgctttacaaaatactccatgggccccacacgcaccagccgagaaggggaggggggcaacggcatacagcaagaatgtggaatgaatgcgagaaaccgcaatacctaccgatttgacacgccacttaattaaggagagccgcattaactgagacagactttccctttgcatttgccgccgtgtttagttctaaaatatttcttcaaaattctaacttctttatcatatcaaaaacttttctacacacataaactttttaaatttttcatcatatcgttttaattttaaccaaacttacaaatttaacgtgcactaaacacaggcattcgcatccatccatgcatgaaaccagccgctctgttcctgcatgaaaccagccgctctgttctgctctgttctggtactgtgtgctctgggcccacctggctagccaccccctctgctggctgcctaggaacaacgggaaaagctatcccttgtgtctccctgtctgtcgccgggggcaggcatgtgatcacgtacacgcatgcccacctgccggatccatcagtttttagctacccacagccagctatatgctctcccctttccagaataagtttatttttaccttttcacctatatgctaagattaatttatttttaaataaccattgcatatcaaagtttacaaaagtaagatatatataaatttattgaaatttgagaaagtaaagatatcttgatatttttattttatattgatatgtgtgggataagtgaaaaataaatttattttagacggagagagtaggtagcccttctctctcttaggctgccctctctgggtgatcactgttttctccttgcctttccctttgttactgttgcatataaaagatcatcaatgtttaaagaattggagctactgtagtcggttgatccggaaatctagaaattaccatgttacttcaaggacgaagaaaataaagacatgttcgacgatgggtttaaattacaatggtattagattagatcattttacccggaagatactccctttgtccttaaataatttagtcaaaaacatcttatgtatgaaagagtttaaaaaaactattatgtcctttatatatggaaagaaaacgaggaagatgaggttttactattggtgtacaatgactaaaaatgagacggaaaatatatagtagtattttagaggtacactaatatagtacgccaatagtattttagtctaagaatttgctctaaaactaaaaagttttaggtaaaaattcttatactaaaaccacactttttttgtaatgggtggagtattaatttgtttggaatgtgggtggtaagtggatagcatgttatgaaagatattctagattagtgttggtgaacataaagctttccatgtatgggtaaaaatgggaaattgaacattgatttccatgtgttgccaaatatttgtaaattactttttttttgtttaaatcatcacttaaagaaaactgagagtgatgtggcgcatctccggcctttctggccttgtaatatatatataaagatagaaaacaaatttgcctggaacaataagcccttgtgtgaaagcaactatgtttgatgaaaactagaaaaataagcacatagtatctaacctaacctagtggtactactctacgcgaggtgatagagctagtacgtaccagctagctagccaatcacgatatacaattatacatccgtatgtaaatgattcacaattggattggttaaaattttaatgttaatttatataatttcaaagtattaaatattaattttacgtacaaataatgtgattttggactcgtgatgacttttttatattaatgattaattaataatcaagtgtcgaacacgttttgttaaaaactaagcatatgaccaaactacggtttccagtgtgttcttttctcctttattaactctactttttcatcatccacccacccacaaggacgtttttaggaaaaaaaatttacaaaaactgttttaaaaatcatattacttttttaaagttcttttagctaatatttatttaataatgtactaatctatcgctctattttacagtatttagaaaaagatttctcgaccattcaaaaatacagcctaaatgattcatcttgggcatggtgtgaacatgttccacgattagtttgaaacgtgtatggaaagattgctttcctaaatatctattcaacaaaatcagccagattaaactgcacgaattacgtacgcccaattaattacatgccaaatgaagcaactgcacgccggagagatgacatatatagcaccatgtaaacctgccatatgccaccctcttgcagcccaacccaacccaataaggatataaaaccactcgcggttttgcacagctagcgcggcgcagtgtgtaaccgtccagggtgacacaattgacttataaatcacgcttttaattaattaattttcttcctaaacatatccgctaatcccccatcccaggtggaatataaacccccgcaagagggagaagaagaagaagggcgaggtgagcgaggcgagactcgagagagaggagaagatccagaaatcgcaagctgcacgctatagctaggtagctatctccggggaaagagagagtaggctgccatggagagcttcttcgtcttcttcacggcggcggcgttgccggtggtggtggcggcggcggtgatcgccgggctgtgcattacggcggcgtggctggcgaggccgcggcgcgtggcggaggtgttccggaggcaggggatcgacggcccgccgccgtcgtcgttcctggcggggaacctcccggagatgaaggcgagggtggccgccgcggcgtcggcggcggcgccaacggcggacggggaggagaccgcctccgccggcggcggcggcggtggccgggacttcgagaaggacgggttcgacgactactgcaccaggatcttcccttacttccacaagtggaggaaagcctacggtacgtgtacacaagcctctctcctctctactgctcgatttcacatcactagctacatgcatgatgcttgcttgctttgcctgttaattactccgctcatgtgtgcttaattagcttaattaattcacactccggttaatcaagtcatgcaaaacccacaattaatcagctatcaattgagatgagtatataccagaatatatatacttacagtaaatttaataaaaaaataaaaaaaagaaaagaaaagctctctcgatctctctgtgacgatgatacaagaaatttgtggttgccctagtaacaagttgactagagtataaaagctgctaaaatgtcaagagctctccatataaaaaagaacagtgggggagaataattaatactgtcccaaacagcgagaggaagagagggggcaaacgagaaaagagagaataaacaaaattaatgcaggatggaaaccgtggttgggacgaactactcggtttgcttccagtcaaccgtcctgcatcattaagctatggattaataattaattaactgcagtatataaatatatatactcccccacatatattaatcggtcgttggtccaattagacaacagcaaagccatgcctaggtacctgtctaggtaggctatgactgtagtacactcgtactactcacttaatagcacattagtgctcttattttgcgaattaatgaaactttaatcaataataactatatataactataatatatttagtataatttaacaatatatctattcagcgtgctatcgtttcttcagcctatcaatcaacttaaaaaacttagtgttaaattgattttggtgttttcttatcgtaatttttcttcagttttggattgttttttaagttgctaacaattttagttaacaaagctatttggaaggagaggaataatgcatccatgacaaaagtatatgcttcataataattttcatataccagatcttgcccctggtggtgacgtgttaccaaataccgactggaattaatttcttctctctttctttttctctctgccggtgcaatgaggcgacatttttgagttataactgtgcgtatgaatgcatgtattaattgctgtttgctgaggttaataggctagcaataccgttgttttgggggaccccgcagtttgacctagtagagtttatcatggacgcagactgcccctacctgttcttcttcacggacagcatgattaattagctatactagtggtagtactcgatgtcattaataattggtctctccgtacgtgaataattatcgatttttgactttgacaagtactccctccgtacttgttaaggaagtcgttttagacagcaacacggtctccaaaacacaactttaacttcttatttctataaaaatatttattgaaaagtgatatatgtatacttttatgaaatattttttaagacaaatatattcatataatttttacattttaaaacttaatggaaagttacttttccaagatttgactcaaacattgttctaaacgatttcctttatgagtacggaaaaagtatgttttttcactgttcttatgaagtgtacatggaaagtgatcgaatagctctgagcagtactctaggtagggaattacttttagttgcgtacaaatctaacaattaattaatatgccatttttagtgaacataattgtatattttctccgtttcacaatgtaagacattctagcattttccacatgcatattaatgttaatatgtctagattcattaacatcaatataaatataagaaatgctagaatgacttacattataaaacggaggaagtaatttatgctagaatgacttacattataaaacggaggaagtaatttagtacatcaccttcgtcgattattacgaaaacatccatcatatcgatcgatatctgtgtatttgctactccagaaaaatattttctgagaccgacccacagatgcatatatatgcacattattgtggcggttttcctttctttttagatcaatcggtggcctgacggccggcccagcttcgattgaaattaagctgaataattattgtggccgtcatgtgctaatcacccatataattaggcgtggttagaacctgactaagctatttaagccggtcagttaggctttcccaaaacggccatcaggccatgcatgttgccattagctgtccgagcacgccggccaaagctcaaccctcgtgatcacatcaactcgatctccccgatgcttatccctttttgcaagcaaccggtatgtggtgcttagataattaatgcaagaattaacagtgtacctcctatcaatttgccgttagctatgcatgtaatggattagaaattctatatgcatgttttcgtctaacagagtttgatcagcagcagtacttagctaactaattattctgtaatttatataactactataagctagagtttaagcagagtatgtaagtatgatattttaactaatttagttcttgtcatatggcactgtagttgaaaccataaaccgatcaattaataggacaaatattcaacctggttgcctcactgcatgcgttgttttagtttgacaaatgcatgcatgtgtatgatattttatttgcttggcccttaataagtatattatgttgaagtcatgcatcttgacacagaaacttggagcaaaaactatataatatatttcaagaaccaaagggcctgaatactagtacttgcctacatcgatcacatgatgctagtgtcaatcttatttaaggtttttatttcttctttaatgtcaaaatggctattgtttaactatctaaaaacaccaataattagaagactcccactagaccatctcatgatgcattgcacgtaggatcgatatatatggcaacattaattattttacttgaacatctaatcgcgttcgctattattcaacttatgttacatgttctcccctaatttaagcaaaggccggtttgaccaacgggaaacaaataattaaattgatcttccaggcccagtacttatattaattacctagtcattaactacattttctccatatttaatttgaatgcttcgttctgaaatatttaaaggccattaacactaacacggcacacaagaaattaatttaaatatttaatttggctagcatgtatacatatatatgttgatatgcatggatatatatatatatatatatatatatatatatatatatatgtatatatatatatatgtatatatatgtatatatgtatgtatatgtatatgtatatgtatatgtgtgtgtgtgtgtgtgtgtgtgacaatagctaactttagatatgtttttttttcgatgatacatggtcccggcctctgcatcacaaatgcacacatccaacgaatatcgtacaaataataataaaaaaagtgatgggacaaaactcccgactcctacataagacttaggactagtgagctaagggtgtgtttagttcaccaaaattggaaatttgattgaaattagaatgatgtgacggaaaagttgaaagtttgtgtgtgtaggaaagttttgatgtgatggaaaatttggaagtttgaagaaaaagtttagaactaaactcggcctaactgaaaacaaatcaattgatatttgttttcagttatgccgagtttagtttgacaaaattaaacgaaaccatacaatatataattacaaatcaataattaattcctaatgctgcttgatgctactagcttctctcctacacagtgccattgactaggtaattgctcctaaccctagctagctaagcatgcagctcgatcgaatcgatcgagcatgaaagcaacaggtcgatcgatagatggtaagccatgacgatcaatatgatcatatcatgcatgcatgacactgtagagtgtgtactacgtactaccaccactccaccaaccatgcatgcattcctcccccctctctcttgcaccttttaaagctagctaggacgtgtggggacttcaatatatttcttgtgcattgtctctcctacaaggattcacatggagatgtgcatatgcatggggttacaccaattaaaagtgcagcccacactctatggattgaaggtgctagctagatctctgtactctatccgtcccaaaatataagcatttttagttataaatccagatagatagttatccagattcgtagctaaaagttattatattttaggatggaggtaatatagtttagatggtggaaattaagtctagtagctatggggaaaaatggcaaaaataaaattacagtatggggttgtactggaaaattttcatttgaatatatctcttcacaaatatgtaagcctaaatttaatctaaatatatatgggcacaaatgaattaaaaaacatattttctatgaacatatatagcaggaataatatgcattcctcgattttattcccttcaagtgttcatatagtacgttaaaagtttgggttaaaaattttaaataatttctttagttattttgaaatggtatgaatgaaataagagcgtatacccttaagtcataaaagatcatccagattgaataaaaaaacaaagttaagataattaagtagatgaatgtaaatgtgcatatacatatcttgtctttctgttgactagttgtctgttcagaaattatatggcggaaaccctaactgaggtgaaaattcatgtgtaccaagacaaaaaaagaaagttctgaaatcacacaaacaatctcataagtagataagatgatagtgaacaaccatgtaaagatcttttccaaatttaactttcatttgtcagatataaaatgacaaattttgaatcagaaaatattttttttgtttgaaatttaccctcgtttcttgatctgaacagtaccactagatacacctagctacatgtatggtcgattgtgataggctcacacacatgctatagcttgatggttgtcatggtggttgcctagttggcaaaagttcgatgtccagctgtgctactatcatgataattggcagcagcctagctagctagttcaaggggacaatattacactggctttaataatttcctcgtcaccaccttttacctcaaaaacatattcttgaaaaaatgaagaatatgatcatttcaccaaaaatcatggactggccatgattaaccaactcattttggatggttttgttggattcctcaaaccagacacatcattctctgtgtcgagaatggagatgacgtgactagcttttatgactttagaaacatactccctccgtctcaaaaaataaactttaggtttctgtgtccaatgtttgatcgtatatcttatttgaaaaaaatatgaaaaaaattaaaaagacaaatcacgcataaagtattaatcatattttatcatctaacaataattcttttcgtgcttgtgattgtgagtattggaattcttttaatatatgctgaatatactaatgagcataaagtataacagactaatcaagtatgtgagttattcaatccttggcaatttccaatacaaatacagacacactatgtatggaacttttttatatatagtctattaaacaatatatctttgagccgtctgaaaccaaattatatgatatttttttagttaatcataccaagatcattaattgagtaggaatataagacttcaagggggaatcaacaatattaattgtttctgagaacaattattcaaagcaattcataataaaagcatatttattttaggagtgggtacacacactatctagcttgtaccatatataagtcaatgaccacgatatatggctagccacctccctccatcatgaaataaattaacctcatacgaatttagatatagaatatgtccagatttattgattaaatcctagattgatttattttaggacgaagagattacctgcctgcctgcactaaccatctgcgacgccgacgtgtcatccatcggtcgacaaaacgtacgcaggccaacacatgcatacgtacacacaattgcccatttgcaccccgctccccatgtccacgtcagacggcgacacgtacacattaacacatgtacacgtcgttttcacgtacgagctaagcaaatccaacgtacagaaaatagttaatttacccggttgccaactgggacacgtacgccggccacgtcacaggtctacgtggcgcggtgtgggccgggctaggagggttaaaagcccacgcttgtgtgctttggtcaactcgtgcacttattactctgaagagttattagccggttcgatgtgtcgcgattactgttgtaattaagtctgtctctgtggcgatatgtacgttgacgatgattaaggtggtgtttggatctagagacttaactttagtctctgtatttagacactaatttaaagtattaaatatagactaattacaaaactaattacataaataaaaacttatttgcgagataattttttttaagcctaattaatccataattagaaaatatttaatgtagcatcacataggataatcatgggttaattaggctcaatagaatcgtctcgcgaattagtctaagattatggatagtttttattaatagtctacgtttaatatatataattagtgtccaaacatccgataagatagagacttaaaagttttaggtggtgtttagatctagggacttaactttagtccctatatttagacactaatttagagtattaaatatagactacttacaaaactaattacataaataaaagctaattcgcgagataatttttttaagcctaattaatatataattagagaatgtttactgtagcatcacatatgctaatcatggattaattaggctcaatagattcgtctcgcgaattagttcaagattatggatgggttttattaataatctacgtttaatatttataattagtgtccaaacatccgatatgatagggacttaaaagttttaatctcatctaaatatggttttagtctcatctaaacagggtctaatagcagaaagttacgtgagattcgtatactcgtacgtacgtatttgcatcggaattttcaaaatcctagactctttctagtactggtggtacagtttggcaaatctgg

SEQ ID NO: 20857 - DNA, 9210 bp, Oryza sativa
caagaacatctacttcgccgggcacgagacgagcgcggtcaccgcgacgtggtgcctcatgctgctcgccgcgcacccggagtggcaggaccgcgcccgcgccgaggtgctcgaggtctgcggcggcgacggcgccgccgcccccgccgcgccggacttcgacatggtgtcccggatgcggacggtggggatggtggtgcaggaaacgctgcggctgttcccgccgtcgtcgttcgtggtgcgggagacgttccgggacatgcagttgggtaggctgctggcgcccaagggcacctacctgttcgtcccggtgtccaccatgcaccacgacgtcgccgcctggggcccgacggcgaggctgttcgacccgtcccgcttccgcgacggcgtggcggcggcgtgcaagcacccgcaggcgtcgttcatgccgttcggcctcggcgcccgcacctgcctcggccagaacctcgcgctcgtcgaggtcaagacgctcgtcgccgtcgtcctcgcccggttcgagttcacgctctcgccggagtacaggcactcgccggcgttccggctcatcatcgagccggagttcggcctccgcctccgcatccgccgcgccggcggtcaggacgccacgtcacaagttgacacatctactgcacccgtgcatagttctcataattaattggcttctgtaaacagctagtaagtcgtgaactgaaaaaaatacatcacacatacagagacaacagaggattaccattttaccagcatacatccatggcataccaaaacaatttactatacattataattaacatgatgctatacacagtataaaaggacatgcatttttctgcgattaatggattaagccgattaactgtttgtcaagtgattacagtgtttaattcagaatctagtaattaatttgttgaatttagatagtctgtagcctgttcctctctgaaagcaacagagcagagcaaaaggcaaaatcaagtttcagaagcacatggaaaagtatgatttctttggcaaaattgttgtgccattctcttatgctataggcctgtggttgagtgagcggccgtttgattgggacgccgacgaacaggtgtcttttcgtttctgctttctaatttctggcactaataaaaacatgttggttgctgagttaaaatcaccaaagtggagtggagatcgcgatgttatcctgtagacttgttgtatctggtctaatggtctctgtaagcaaaacgatcagaagtactgaattagttcaattttttgatagacctggtatggtcttttaaattcaacttttgaaagtacagtgaaatacaaatctagtgatgccatattgtgggcttgtgtagtataaattgtgaatcaagcctacggaattttttgctgaaatacagtacgtgcctgtcttataagaaaaacctgaaccgagaagccattagcgttgtcacatacgacgccacgctcggtgactcggtgagccagcgtgtgcaccatcagctcgccagcagcgcgcgccaagaaagaccagcagccatgtcggggtccggcgacgccgcgccggcgcggcacaacgcgggtcacggtcggcgacgacggcgcgtcctcgtctgggccagcttcgccgcgctggtcctgctgctcgtcgccgcggcggccgccatcgccgcgctcgccgtgctccggccgcgggacccgaccacggagctcctgtccgtgaacgccacgggcgccaccccgcgcgtcgccgcgctgccggccgtctccgtccagctcaacgtcaccttcctcctcgtcgtccgcgtgcgcaacccgaaccgggcggagttccgccacggcgccgccacgacggcgctcctgtaccgcggcgccgaggtgggcgccgccggcgtgcccgcggggacggtgccgagccgcggcgcggcgacgctgaggctgaacatgacggtgcgggcggacagggtggtggcggcggccggggtgggcggcctcctcgcggacgtgctcgccggcgagatggagttcgaggcgaggacggaggtgcgcgggcgggtgaagctgctcgggctcgtccggcggagcgccgtggcgaggtcgctgtgccgcctcgtgatcggcgtcgccgacgtgaaggtccggcgccaggagtgccacaacgagtccaagctgtgactggctctgatacgtattatacgtatgtacgctgtctttgtatttgtacatgtatacgtgtgctgaagacagtcgatttgtacgtactctgatatatgtgcacgaatttgtcgtggcaataaatgtttaggctattcataagctgtttctttggtagactgtatatgtatattgttaaaagttactgcagcctcattgtcattgttgtgtttccaaaattttggagaaatcaacaatatggttattcaatttacatttgcaacccctaaatatattattcaagtagataaagtggtcgcactgtgtgtttttcttccattttttcaaagagataattaaacttggtctgtggtgcacattgcagaaagctactgtgaaacggatggactattgaactactctcgttgtcattggttggcctaatgttagattacatttttctacctgaatatatgttttgagtaattcatgtgtgttttatttcccgtggcattacatatatgctgtaacattccgagttgtatttttctttttttatttttataatattcctacgtttcaaaggagagtctgtgaaacaaaaaggtagattagaacaacatatagctctcaaactagtgagaaatttttgctcttaatgcaacagaggcacaacaaggagaaaatattcaacaaacacgtctaggttgctcctacggcaacaaatttgagaaccgtaggaagtcaaagattcaaccttttgctgtgacaatgtaagaaccacaaaactatttgttgtcatgtattacaaattaacaaaaatagggtgaaattacacgagcgtgctggaactttgagatgaaaatatgagcacatatagatttaattcattctgtaaataaatcataacatttaacgtataaactagcaaaatcacatcatacaattcaaacatgtaaataatgaatagatcaaataaacgaaacacggtgaacacgtaccaagggttctggttctattgtaaactgggttgacaaggagcggcacgcgccgcaggaacaactctgtggtgtcagatgttgtcgtcggcatgcaacccttgagcatagaggtgcaggacatcgaaggcaaaggttccggagacctgctctccggatcgtcggcgcacgccggtgagtgggacggagtagactacaagcgacggccggtgcacgccgatgagcgaggtgcgtgattttgatttcacgtgtgttgcgaggaggcacctgcattacctccccctagagtaaccgtgcacaatgagtgggcacgtgatattgatttcacatgtattgcgaggaagtgctagcacgatctccactttgtagaatcaaggagttgatttagattttgttatgaaaatattgatggtttgctaatgttaatttggagattttataagatggttgattttgtgaagtgtgcagttttggttgaccttggcggtcagaccggctgagtgccgccggtcagaccgtaggtgttgcggcggtcaaaccggccggcccgacggtatgaccggcaggatcctgatcgatgtcggtttcgggttgttttgttggatttggatatttccttcggggatttggcttctagatagtttctatgcgtatggatactgttgctatactaatgtgagtcaagttgggacaaatttgggctcggaatatggcttcttggttgttgcatgtgcaggtgatagatcggagtcaacttgggagaagttgatgtctagggatcatgagatcatgcgggatactaaaggctagaggacaatgcacgtggtgatgaagaaattcatatggtatacaatagggatttgtgtacgtatggaaagaggagtcgaatttggaagggagtccgaattcgggaagtttgattgagataaggaaagagataagatatttacttacaagagagggtttcatacatggttaggagtcctaagttgtgttagattcatgggctttgcacaacctacttcatgtataaatagagagggagggtgagacatcccggtatcgagtttagagagactagagttgagagaaagttagggtttcgagtttagttcgagattttggtgaggagtgatgttggtgcactttgtaaacactagttgatgcaataaagtcgaaaagtttcaatctacatattcgagtttgtcatctaccggtgtttttgggtcccgacggtctaaccgcaagtgtgcgcgcggtctgaccggtgggatagcggcggtctgaccgcaggtgatcgggcggtctgactggcgaggcttcggcggttcgaccggcgacgacaggacttcatcgtcgtcttcgttcgagggtaatctttaattccgcaaaagatttttgggtttttggttttccctatcattcacccctctttggtaggtttgtttggacttgtgcgatcctacacactttgcagaactgaactggataagtcacacgtaacttaactagactccatgacatatacgcaccgcctgcctagctaggcgagacgagcgtacgcatattcctctagttctctccactacacgtctcgagtggttaggagagtattctccccttaaggaaatccctccctctctcttaaaataggaaagatggtactaaacgtgctcatacatgtcatcccaccatatggtgagcttttgttatttttttaaagaattaatcttcaaatgtgctaagacctatctattaattctaacactttgtaccgatgcacaaatataacacttgtatgctagagcttgttctatgcataagcagaacatcactgctagttataaattaattttttttgaacgaatcgacgagcgccaatttcattgaatagagaagtcgaactttacaaaaacaaggtattattttcttgtttttgtcaatgctgtaccgacgctgtggcaatcattcgtcatacagtagttggccaaatttcgctataccacaacgtgcacaattgatacatttccgcacaaaacacctacggtcagcgcacatgattaaaacatctatgattagttcgtcgattatcgcatcattcgcttcattgcgcatgaattggaccatgagcctcacaaaagtttctcaaattagctttctttttagagctaattaacatggctaggcgtgtggtagtggtacacgatcaggcacgtttctaaaatttcgttacctttttatacggcagcaaagaggagaaaccaggcgctgcatttcaaatttcgaattcccaaacctatccattccaaaaggggcaaacactccgcagtccaaagtccaaaccacagcgctacttccaaattcagctccagctcaccacgctggagaaaaaggtaaaaaagaaaaagaaaaatgcccagcaagtttcccatcgaagccttacccctaacatcccctactttactcactgacacgtgggcccaagaaattctgggcccagacgtcagtgacaactcggagggaggagcctggtcccgcttggttcggacacgaccccgaaaatattcaaaccagcagtagcccaacgtttcgatcccgccccgcgcctcccgccgcctccctcactgacgggtgggccccacatgtcaggggtcgcctccgccgcgcctcatctttaacacctgtctatttcctgcacgaggcaatctcatctccctcctccccccccccctcattttctctctcctctttctctctctctcttcctcccaatctgcgaagcgagagagagagagagagagctcgaggcgagctctccccgcccttctcccaaaccctaatccttccgccgcgcggaggagagccgcgtctcgggcgcgcgcgtggaggcgtgaagcgatctgtattggtggaggggaggggaggggatggaggcgcggcggatctcggcgagcccgcggccgtgcagcgggaggagggtggtggcgaggaagaggccgaggcacgaggcggcggtgaacagcgtgcggaagctgcagcggcgggagatcagctcctgccgcgaccgggccttctccatgagcgccgcgcaggagcgcttccgcaacatacagctccaggttcgcccgcacgcgtccttgcccttgccctaccgtttctagcttcgtttcgatttttttcttttttgttcgcgtgctcctgcggcgaggtagttttttcgttcgccgtgtgtggggaatttgtggctctgggagagcgtgcttggcttcgttttagccgatttgtggtcgggatgggttgccacgattgactaattacttcgcatggggacctgagatctgttcaggttgggccatctgttggtggtaactggaattggagtgggttcatggatgctgtgctgtgctgattttgcaattatctaaaaaaatgctgattttgccagattgtgatgagaaggctgcgtatttcgttaagtaggttagggaccactgctgattcgtggaagtcatgtgcagccgccatctgcatggcaaattcctgtatcgctccgtgcagctgcttgtctggcttaactacaacaaactttataattttagggtttcgttttcgtatggtatcatgttggcatattatttattgcattgtcagaattaacgaagtgtggattaactgtcagattgcaggattggtgtaattgtacatagagaatgactctatctgctgtctttgccctttgcagcaagtatttttttagatgttaaaatttagtacttgcctcgggtatcgttgtcttggttacttgttgttcatgacttctgtcactttgctgctcagataacgatcttagtggctttgatcctccattgaaaaaacaatgtgggaccctgcttggactaattcatgcttataatggcccacagtcaccttatgaaaactgtcaagcttgcacctttggcctgcttccattgtttatgttgtagtggttttacctcacggctgttttagtagtttctcttgactttttatctgtatttttaatcatgcactttactgtcactttcaggaggagtttgacacccatgatcctaaggaaaacagcttgctactaccttacttgaggaaaaggtcaaaaattattgagatagttgcagcacgcgacatagtttttgctttatcacagtccggagtgtgcgctgcttttagtagaggtatgtttgtgtcattgtggtgcacttctgcttcctatgatcatactaagaacagcttcatgtattatcagagacaaataggagaatatgctttctgaatggaagtccagatgaagttatccgcagtttattctacaacaagaataatgagtcactcattacagtatcagtgtatggttctgaaaatttcagtgccttgcgatgcaggacaactcggatagagtaagctttgtgttctatgagtttccgttgttgtgaattccatgctatgccatctgcttaagatactggcaactctttcaaggtatatacgccgagcaaaaccagatgctggtttccctctttttgagagtgagtccttgaaatggcctggattcgtggaatttgatgatgtcaatgggaaggttttaacttattctgctcaagacaggtacacactaacttctgtaatgattataaagtatgtttattctgaaactgtactgatgccattgcattctgcaaacagtacttacaaggtgtttgacttgaaaaactacactctgctgtattctatatcagataagaatgttcaagaaataaagataaggtaccccctctctgacccacctttttttttcttctgttcccatttcttgcagataccctaactaagaagttttttggatgcaccttattactttgaattcaacaggctgttcatcatttgaattcacctcatcttagtagaactaacaataaactcaacaagcatgctttagattgactgaacttgtaagaccagaatgcactatagtgcacatataaatggagagagtgatatcataactgtggtgttgccatgcagtttaacagaactgttcttttttctatagactcttagcttatattatatttttttaattattaatggcaacatgatgtggctttatatgtataatcctgtgttaatttgtggcagtcctggtataatgctattgatttacacaagaacaagcagctctgttcctctgaagattctttccattgaggatggtaccgttttgaagtccttcaaccacctcctccatcggaataagaaggttgatttcattgaacagttcaatgaaaagctcctggtcaagcaggaaggagagaatcttcaaatacttgatgtaatttttcccctaatgccacaattgtcatttacaatcaagagaaacaaattacttttattgtttaggtttttaacactcggtattgtaggtacggaacttccaattaacagaagtgagcaggaccgagttcatgactccatcggcctttatctttctctatgagttgcaactgttcctgactttccggaatcgatctgtagcagtttggaatttccgaggtgaactagttacatcatttgaggaccacctgttgtggcacccagactgcaataccaataacatatacataacaagtgaccaagatctaattatttcttactgcaaagctgattccaacgattcatcttcagaagaaaatggtacgatttttttggtgtttttttttggcatatttgtatatattttactcatcatacaattgaaatcactgcttgctgtattttactatttatcttatgttttcctctcagacatctttgtttgtttatgtgcccatcctcttgccacatcgaactattttaattagacctttgcatgatatcatgctttgctgtgaccaaatatacggaagtctgttgttttgctcactttggtagtgtgcttcttgttggtgctgatatttacgattagatgtactacaacttttgttttgcttcatctcgttttcttgtattt

SEQ ID NO: 20858 - DNA, 887 bp, Oryza sativa
aaaaacaaccccaaggctgtacacatcacttttatccgtcaatttatgagttaggaagtattctggatcaagatacccctgccaaagtaacaaggatatagttagtatagtatagctgtaaaagagaaagaacaaccgtgtgcaactagtacttacaggggtgcccttaacaacggtggagacatgagctggtaaagccccttcaacatctggtactggagcaagcctcgaaagaccgaagtcagctaccttggcgacatatttagaatccaacaaaatattgctggccttaacatcacggtgaaatataggaggatctgcatcggtgtggagatacagaattccctttgaagcacccaatgcaatgtgcagcctcaaaccaaaaccgagaggtggtttggactttcctgcgattgaaaaataaaacgaggagattgaagtagaacaaggatattggcaacagaacaaagtattacacaattcactataagcaggttcaagaaggcacatcaactataagattcagtaaactgacaactgaatggctgatcttgatatcaaagccataggagtcagttcaggattgcagtagatcagtgggataaaagaactagccatgtgcttaccagaaagatgatcacgtaaagtgccattcggcatgaattcataaactagcatctgtaaaaaaaacacaatttttatcttatcaggatgattttgccagaatattatttccacacaaataaataaaatcaaagagatgcacctgttcattttcttcatcacagtaaccaaccaacgcaaccagattgcgatgatgcaatctagacaacagctctatttctgtgcaaaactctgttgaaccttgaagagaatcctcgtgtgcc

SEQ ID NO: 20859 - DNA, 1203 bp, Oryza sativa
tttagccttggaccaacttcccatatgtagttctcaatatatagctggtaaggaaacaactgcaacaaagaagttaggtcaatcttgaaagcattttcgtatggatgaaagtctgtgactcctggactcttcaaccgaagtccaactccaagtggcaccgcacaaaaacattggtccgagaatgaaggattgtactcataatttttttctgtcgggcaagctccacaaaccatggcagtgcttgtttcctgtttagatttttccaggtttattgactggaggcggcaaaggttgattatcagagtttcactagaattctcacatataggatttccatataacctgcacaaataacattggttgtgacaactataagaactgagtattttatgtaagcaatattcagttatagtccagattttcactcataatacgatgatgaataaactgtttttggttatgatgtccattctcaaataagaatagtgtagcctgaaaactgttatataagcagtataagcttgctttaaataaatgaaatggtgttaatcatcaaaatggaaattaactgcgaaacttgcgtgctcacagttaaatatccatccgcaacacagaatttttatgcaggaatgtagattgatagtgtattgcatatatgtaggaacgtacacgacagtaacatttggtggaggaggactaatttcagctggaagcatattgagagaattattttggaagtccctgcacaattgacaaccatgtcaaatatatgttattgtcagaacttagaacaagatgaaaaaatatatatatatattcccaaaaagaatcatacagtacaaggcttccgtttctgttagggttgacgccagcccaaatttccgagggaacagaaccatctaaaagattatttttaagtgacctgcaaatttgcaacattgacatgtttttaaatgcattgtttttaaaaaaaagttcatagagggtttaatttgtgttatgtcaaaacgagtggaaattgtaagcaataatgagtggatcacaatatgcaccagcaagaactgatataacctcaagtttgtatgtaataaataagaaataatgtaaaatgcatgagaagaacagaagaaatttttaaaatcaaattcccccaaaccaccaggttgatcacatgcgagcacctctttaaatttgctatcctct

SEQ ID NO: 20860 - DNA, 686 bp, Oryza sativa
ctaacaacaattgttaattctacaacaaatgtggggggcttagaatggtaggagaccagtattcgccgaaataaatatgaatcacctcaacacagacctcttcgtggccggcaccacctgaggcagtcgttaaatcaattcaattacagatgaccaacaccttgttggcaaaaagcagtattcacggtcaattcgaccacacatgaacgaggccttgccggtttccagtgtagatctcgtcacgctcttcgtcatagtacagcgctgtgatgtcctcgagggcctccaaggctgtactctggaacttccaggctttcttctgcttgcacaaatcgctggccttaattttggccaagcatttcccagtcagtatgttgctgatgtttattgagccagctgcattggagtagacagagaaagtgtcccaattagattacggaagcaatgtttgcatgtttagttacgtggtgcttctttacagaagtggaaaaaggctatgaacaaacttatataagttaatgctatctagttatttggtcgaacattagaaagatcctaaggccttctcaaactcattcagagatcagaaggtccaaggattctcttgtattgtgcagtttgacaaaaaatacaagaaaacgagatgaagcaaaacaaaagttgtagtacatctaatcgtaaatatc

SEQ ID NO: 20861 - DNA, 2814 bp, Oryza sativa
aacgtggagctaagaacacggtagaagctcaagatagagatgacaagttcatcatccccaagaggatgatggagctttagatgcctgagtggtggattcatagagccaagcaaataatctattttatctcctgcagtagcttgagctagtggcggccgatggaactggtggttgaggatgagaaagagaagggaaatggaggaataatattgaaaaatgtgacatttcactagcttaatggtactgttagaattttgagaagatgttatgttattaattggtaccttaaaaatccgtggtattatttgactacgatggaatctaatgttggaatttaatttgactttgagtaaaatctcttgtctccactcttcttgctctctttttgtgtttcttgctctagtccttgtggctcctgtaactctgtttctatgttgaaatctaggggtgaaattaggataaatgatcgcggggtcagtactaactagggtctatgttttcaaccaaacctggtcgaaaaccatgcaatctcgatgttccaacgtggaatggaagtagattctaagtaaaatttttaatagttttctaaaattcaaatttgaaacgataaattcaaccaaaattaataaaaatttatgaaattttggcaaaaaagtcatatctctatgttcagaatctaatattaaatcgaagaggtgaaccttgatgcaatctgggtttgttcagatctatctacaggttctaaacccttccctcccagcacacacaatggagcgaggattaacacatgattaattatcattaaaaaacttgaaaaaacaatagattaatatgttttaaagcaattttgtatagaaactattttgctagaacacttgagaggttgttggccactagccttatgcatggtctcaaatctcaaagactcaaataatgtatatgcatattcggctgtataatcataagttctagctaattttctctttgatgcttctagtatcgttcctagttgtcaattgggctttaacgcagcaatcaacaattaatgtcactgaggtcatagctggtaaaataaagaggatatgagaggttaaaagcgacaactttcaataccaagtgttcttaactctgtttttccctgattaagatacatgttttatttcggttttcattagatgcttttcaaacttctaaactgtgcatcgcgtgcgaaaaattttctatacataagttcctttaaaaaatatcagataaatccaatttcaagtttgtaataattaaaactcaaacaatcatatgctaatagctttctcatttttcgtgacctaacttcatcttcattttcagtaaaaacgaacacctaattttaattttctattaatgtgatactccctccgcccaaaataagtgtagttttgcactattcacgttcaacgtttaaccgttcgtcttatttgaaatttttttatgattagtatttttattgctattagatgataaaacatgaatagtattttttgtgtgactaaatattttcaaatttttcaaataagacagacggtcaaacgttgggcacggatatccacggctgcacttattttgggacggaggtagtactaagtttcaccttaattgtatctttcttttttttttcttatcctaacggtaacgggagttccaaacatggaaatgacaagttcatcatcatatccaagagcatgatggagctccacatgctagggtgaattccctggagctaagcgaactactaccttgtctctgataatagctcgtgctagtggccgctgactgagctggtggctgagtctgagaaagagggaagggggaagaataaagaggaaatatgtgacattccgttaggttaatggtatagttagaacttttgagaagatgttgtgttattaattggcatgttaaaaatttgtgatattatttgactccgatggaatcctcatgctattaataaaatttaattcctcaaaggaaaaaaaaaaccattctagtgtaataagatgaaacagcatttctttggccagcaacctcaaggttatttggagatctctatttgtcggaattagcgacaagggatagatagaggaagtgaaggtcaaatgctatgagattataaatcagacgagtgtaattgattaccacgagctagctaattgatggctgaccgtagaataaccctcttaaaagtggtatgcatttacatatgagccgtatcaattacaaagtgacggtagcacaaaaatgttgttaaaaaaaacagaggtgttgacgatttgtttttgaaaataaaccctctaaaacccttattattagaaagatcgaaaattttccccggccaaaagtaaacaatggttgacggagctcgtggctcctcaccgggagaccgcgcaggcccccctttgccggttcggccgggggcttagggtgagatctcaagctctctcggtatgtggaaagatcgtctgttagcaagaaaacgcgagactcggacgatgtatacaggttcgggccgctgagaagcgtaataccctactcctgtgttttggtggatctgtgtatgaatgagctacaagtgtgagctgacttctcccccgttctaagctcaccatctgggaaagaaccaaccaaccccccccttcatgggcaaggtcctccttttatatttcaaggggataccacatgcacccttctctttccaaactggactgttctttttctcttgaatgggcggagatcagcacggttgccgtccgaatgacgctccgatgggacagcccacac

SEQ ID NO: 20862 - DNA, 41181 bp, Oryza sativa
  unsure (1)..(41181): unsure at all n locations
tttgcccttcttcacacaacatcttgcctgtaatggttaggatgaagcctggcatatatcgactggggctaacgtgtcatctctaagagataacacgcttaactccggcttgagacgagcgcctagaggctttcgtcttgacgggatggggcaaggagtgcgtcagaccgccagtcgccacctaacccgtgatctgaccggtctgtgactgatcacagaccggataaaagaacgcgccgtactgcgctgcatgcagcgtgacgcgcttgaccagactgcaataaatgctgctaggtgagcacagctgtgctcacttgccccatatatgtggcgcagatttctttaaggggtcggggtgcctcggccctcggggccggggcaagcacaacccgaccccccctcgggggaaatcaggaggagggcggacacctcaccctcgggcccgacgcccccgaaggtgccaggccacgtgggcgattgtgtctgcctcaagcctctggtcatgatactcccggtcccatattaccgacagtagcccccggcgttatgccagagcaatttcccttcccaagggaagcggtcaggtgtgacgccaccctgtgacaggtgggaccggtctccgtagttgggcaaaatacccaacggtctcaatccatgcacattggtattggtaactttggttgtccataatgggtggtctattcaagactgccacaccacttgagcagcgcgcgaatctgggtgagcagattcgtctcgcccggagatatggtaacgccgcttcggtcggcgagcgtaattaacgcgcgcacgatacaatccatttcgattgccacaaccgcatatccacttaatgcgccgtaagcgggcgaatgggattagtggatgcgtgggcacgggaaacgagggagcgagatagcgagatacgagggagcgaggtagtgggcgcgagaaacgaggagtcaggcctagcgatggcaagggtataaaagcatcgaggaaaggatttgctcccttcctttcgccattgttcctcttgccttcgccgcctgagctctaactctttctctgctacgccctactttcgccacacgcgctcgttcccaaccatctcttcctccaccgccatggcgcggggctctgctctgctcgacggcagtgtactgccgccttcccgcatcgtgaacgagaggcacgtcggactgccgcgccgcttcatgccggagtccgccaccggtcgggagatagtgatgctgggcgaggggcgcccggcaccagactacccggggcggtccatcttcttcctcccctttgcaatggctgggctggtcccgccattttctcacttcttcatggatgtcctggagttctacgatctccagatggcgcacctcacccccaatgcggtgatgacattggccatcttcgcacacctgtgcgagatgttcattggggtgcgcccctctcttcagctgttccggtggttcctcaccgtgcagtcggtgtcaccgccgtcggtggttggcggctgctacttccagccgcgggggccggtgttgaaccgctacatcccctgcgtcctccgcaagaagtgggacgactggaagagcgactggttctacacccccttcgccgacgaagcgcgcctccgacttccaagccagcccccggcgccggtctccagctggcgggcgccggtagatctgggggaggagtacgacgccgtcctcgaccgcctggcgggcctgcgatcccaggggctcaccggggccatggtgttcggcgattacctccgtcgccggattgcgccgctccaacggcgcgcccgaagcgcctgggagtacactgggcctgaagactacatgcggacccaccagggagccagatgggattgggctcctgaggacttcaagatcgtagtccaaagggtgctgaatcttagctctgcggaggcgtctcgccttcctcaggagatcctccccctctgcatagatcccgaccgcgtctccattctaaccattatgttgggggtcggggcctcagaggagagagcccctaagggccacgacggcgcgggcgagagccgccgggggaaacaatctgccccaggagggggtcgtgcttctgggccccgcgtcgggggctcggggagcagccgtcctgccgacgccccggggaagaggaagctgggaggaacacctcccccatctcctccccgagggggcggggcggcgcgtgccagcagtcggcgcccggagggggccgcgccgacatcgcagcccgagggggtgcgcaagaagaagcggctccgcaagacgggggagacggagccatgccggggaaacctgatttcccctccaaggtggtcattcacccgtccccctcgcaggttcgtctcactctcattgcaaccatctttctccaaaaagaagttttttcttgctcattttgttcgtcttctggttttttcttctgctttagcgatgtcccgtcgcattcctcccgccaccccaagtccggccagtccgaggccgaagatccagcggccgcagaggagcggaggcgagagtctgaccggcgtgaagccgcagcccgccttcgggaagctgaagaggccgcccgggaggtcgcccgggttcgccaagcggaggaaactgctcgggaggaggccgcccgggctcgccaagccgaagaagctgcccgggaggaggccgcccgggctcgccaggctgaggcgacagctgctgctggcgcgtcacttgggcccactccctcgggcggccctcaggcgacatcctccgaggcggctcgcgacgtggccgcgggcgcatcgcctgggcctacctcaccgggcgacgcccaggaccaaacgggcccgggggacatccccgagctcagcgcgtcctccggggggccaagccgcgtcgccttttctccaaggcggcttttctcctcatcttccgtcgccctggtgagcgccgagcccattatgcaggccttggccgccgcaaacaccgcggtgctagatggatttagcgcccaggtggaggccttgcgagcggaacgagcggagctcgaggccgcatgggcgcgcgtcgaggaggggcggcgctcggtggacgccatggtggaggtgggccgtaaggcccaccgccgccacatctcggagcttgaagcccgcaaggcggcgctggcggagatcgcccgagaggtggaggaggagcgagaggccgccctcatcgccaccaccgcgatggtcgaggcgcaagacaccctccgccttcaacacgcaagctgggaggcggagctgaagaacaagctcgacgccgcccaaggggttctcgactccgccgctgtccgagagcggcgggcaacggaagccgaagcagcgtcccggcggcgcgaggaggccctcgaggcccgtgccatggcgctggaagaacacgccggcaccgtggagaagggcttcacggaccgcgaggccgccaccgctctccgggaggcgacgctggcggcgcacgaggccgcctgcgccgaggaggagtccgcgctccgccttcgcgaggatgcactcgctgagcgggagcgagctctcgaggaggccgaggccacgacgcaacggctggcggatagcctctccctccgcgaggcggcgcaagaggagcaggcgcgccgcaaccttgaatgcgtccgtgccgagagagccgcgctggagcagcgggctgccgacctcgagacacgggagaaggagctggccgcgagggcgcgcatcggtggggcggctgcgggcgaaaacgacttagccgctcgcctcgcggctgccgaacacaccgtcgctgacatgcagcgcgcgctggattcctccaccggggaggtcgaggcccttcgcttggcgggcgagatcgggcccgacatgctttgggatgcggtctcccgcatgaagcgcgccggtcggcaagcaggcctctggagagaccagacgacggtgccccccaccaatctggaaggcctcgctccgcacctcaacaggatggcttgggtcctcgaacgactccccgaggagctcgagaagaccatcaagtcatcctcgagggacctcgcccggggggcggttgaactcgtgctagcgagttaccaggcccgggaccccaatttctctccctggatggcgctggaggagttccctcccgggaccgagnacgacgcgcgcgcgcgcgtcggggatgctgctgaccacatcgtcaacggcttcgagggctcggcccctcggctcgcgttcgcccccagctccgacgaggagggcgacgccagcggcgaggacgacggtggcgacgaggccagcgacccgggtgcatttgaatgagcccccaggcccccgccaatctttactttttttctttttctttcttctaaggccttcatgcctcttttgtgtatagatcaacttaatctgcaatcaaaaatgatgaaaaattttctatgttaactttattttgctatgcatgtgagttgaggatgatctgtgccgtgatcctctttttgtgtcttagcctgatttaagggctcgtgctcaagtcccaatcctcagatggctcgggtcggggctagtgcctggggagatccacatgtcgagactggccaggccgggaacatggtgaccgagggttatgggtgacccgattgtgggtttttgccgattcccccccggagttcaccatgccccggggcacggctcggttctgggccccgcttggcgattttagctgaccgaaccgagcccccgagggcaaggttgagcacgagtgaccttatttcaagttaagattcttcagaaggaaaaacggcacagacacaacctttaggaaattgaaacttcttttattgaaaagctgaaataagaaaagtaagactgtgcatgtgtggtagcccccggccaaccctgcacacccgaggggggtgcggggttggcccgagccaaaacctgacacccgaccccccctcttcaggggtagaagcgacgaaggtgttcgatgttccacgggtttggcagctccgtgccgtcgcccgtggccagccgtaccgagcccggccgggggacaccgatcactcgatacggaccctcccacattggtgagagcttgctcaatccagcacgcgtttggacgcggcgtaggacgaggtcgtcgacgcagagtgatcgggcccggacgtggcgctgatggtagcgccgcaggctctgctggtagcgcgcagctcggagagccgcgcgccgccttcgctcttctaagtagtcgaggtcatctctgcgaagctgatcttggtcagcctcgcagtacatggtggcccggggagacctcagggtgagctcggatgggagaaccgcttctgcgccgtagacgaggaagaaaggcgtttccccggttgctcggcttggtgcggttcggtttgcccagagcaccgctggcaactcctcgatccatgaatcgccgtgcttcttgagaatgttgaaggtcttggttttaaggcctttgaggatttctgcattggcgcgctccacttggccattgcttctggggtgggcaggtgaggcgaagcagagcttgatgcccatgtcttcgcagtagtcgccgaagagttcactagtgaattgggtgccattatccgttataatacggttaggcactccaaaacgggccgtgatgcccttaatgaatttaagagcagagtgcttatcgatcttaacaaccggataagcctcgggccacttagtgaacttgtcgatcgcaacatacagatactcaaacccgcccggggcccgtttgaacggtcccaggatatcaagcccccagacagcaaatggccatgacagcggtatgatctgcagggcctgggccggctgatggatttgcttggcgtggaactgacacgctctgcatcgccggaccagatcgactgcgtcattgagagctgtcggccaataaaatccttgacgaaaggccttgccaaccagggtacgcgaggcggaatgggctccgcactcgccctcatggatgtctgcaagaagctcaacgccttgttcctgaggaatgcacttcaggaggattccgttagccgcgcgccgatagagggtcccttctaccagcacatagcgtttggaaatgcgttgtacgcgttcactcccttcgcggtcctcaggtagagtcttatctgtgaggtatgtttggatctcagagatccaagcaatcaatctaagggagcttggagcgctcccttcgggtcccgaggcctggactccgacaggcctcgggggccggtcaggcgcatccgtctcccctaaggggtcgggtcgcgccgacggctgggtaagcctttcttcaaaggcgcccggtggggtctgggctcgcgaggacgcgagccgtgagagttcgtcggctatcatgttatcccgcctgggcacatgccgaagctctattccatcgaaatggcgctccatacgccgcacttggcgtacgtaggcgtccatctgtgggtcagagcaccggtactccttacagacctgattaacgactagctgggagtcgcctaataccaagaggcggcggatccccagtccaactgccactctgagtccggcaaggagtccctcgtactctgccatattgttagtcgctcgaaagtcgagacggaccaaatatctgaggacatctccgttcggagaggtcaacgtgacccctgcaccggcgccctgaagagacagagagccgtcgaactgcatcacccagtgggcggcgtgaggcagctgtgtggggtccgtgttggcctcgggtattgagacggtctctggagccggggtccactctgccacaaaatcggcgagggcctggctcttgatagcgtggcgtggttcaaagtgcagatcgaactcagaaagctcgattgcccattttaccactcgtcctgtaccctctcgattatgcaagatttgaccgagggggtaagacgtaaccacagtgacccgatgcgcctggaaataatggcgcagtttcctcgaggccatcagaatagcgtaaagcatcttctgggcctgtgggtatcgggtcttggcgtcccggagggcctcactaacaaagtagacaggcctctgcacccttcggtggggccgatcctctctgctaggggccgtatccccggggcgttcttcgttcaagtggcctttcggggcgcacttgtcttctgtaccgatgacctcggggtcggaggatgaaaggggcggccttccctcagtggcctcggggccgtcctgggggtcgggggctcctggcatcgtcggacaagcgggcaaagggccaactccggtcgtcaggggcctctggcctccgttcgactcgggggcctcttctccctgctctttcccgggtcgagtcagcacagggttagcctcggggtcaaagggcgttaagtgcggccttcccacagtggcctcggggccttcctgagggtcgggggcacccggcaccttctgacaagcggggggagggccgactccggtcgtcgggggccttaggccaccgttcgactcgggggtctctcctccctgcctgctcccgggcctagtcggcacagagtgggggtgcgcagaatgaggattatcctcatcgcgctccacaaccaacgctgcactaactacttggggggtcgccgctaagtaaagtagcagggactcatttggctccggggcgactagaaccgggggagagctgagatatgcctttaattgagtaagggcatgttcagcttcctccgtccaagtgaacggccccgagcgtttgaggagcttaaacaagggtagcgccttctctcccagccttgatatgaaacgacttagggcggccatgcaaccggtgacgcattgcacatccctaagtttgctgggggggcgcatccgctcgatagctcgaatcttctcggggttggcctcaatgcctcgggcagagaccaagaacccgagaagcttgcccgcaggtacaccaaacacacacttatcggggttcagctttatacgggcggagcggaggttctcaaaagtttccgctagatccgaaagtaaagtttcttggttgcgcgtttttacaaccaagtcatcgacatacgcctcaacattacgtcctatttggctacccaaagaaattcgagtagtacgctgaaaagtgggacctgcattctttaacccgaagggcattgatgtataacaataggttcctacgggggtaatgaacgcagttttttcctcatcctccctagccatgcgaatctgatggtaaccagagtatgcatctagaaaacacaaaaggtcgcaccccgcagtggagtcgacgatctgatctatgcgaggcagggggtaaggatccttaggacatgccttgttaaggtcggtgtagtcgatgcacatccgaagcttgccgttcgccttgggaacgaccaccgggttcgccagccactccggatggatgacctcacggatgaacccggcctccaaaagtctagccacctcctcgcggatgaaggcttgacgttccggggcttgccgccgcactttctgccggaccggccttgcgcccggccgcacggcgagacgatgctcaatcacctccctggggaccccgggcatgtccgctggtctccatgcgaagacgtcagcgtttgcccgcaggaaggagacgagcgcgtcttcctatttgccatccagaagaccaccgatccgtgtggtcttggatgggccgtcgcccaaggcaacctccttgaccgggacctcgtcgcctgtggccatccgctgcctcggggcggtgggggcagaggggccaagcctctcgtcaccgccctcgggcttggacgcagcagcgaggcggtccgcgcgctgctccatgcaagcaagcgcgactttaaggtcgccacggacagagatggggccaccggggcccggcatcttcatctggaggtaggcgtagtggaccgccgccatgaacttcaccaacgcgggtctccccaggaccgcgttgtagggcagactgaggtccgccacatcgaagctcacccgctccgtgcggaagttggcaggtccaccgaaggtgaccggtaggtcgatgtgacctaatggccacgtgtgccccggcgtcacaccgatgatcggttgagacggctggagcaccatccccggggccttgatagcatcaaaggccgcgggggaaaggatgttgagagccgctcctccatctatgaggacacgtcccaacttcacgttgcagatggtgggggaaaccaccatcgcaacctgccctccccgggcaatgcacggtgggtggtcggtctggtcgaaagtgagagcaacctccgaccaccgcgcccgacgcatcgcctcatgggtaggggccatggccagaagctctcgcttcatagccttgaagctccggcgagagacttgagcacatgctcctccatccacggtggcaatggtggccccaggttcttggaaacctaggtcatcatcaccatcatcaatgtcaacagcgggggccttctgcttggcctcacttcgccgtttgccggagggaaccgccggggacttgccctcacggcgttcctgcctcctgtcctcctcccacttcctcgttcgctcagccaggtttttgactgcgcgacagtccgcgagatcgtggagggaggtgttgtggacggagcaccacctgccggcggggcgctccctgctgggagtaccagcctctttcttcttgtcgctcgcaggcctcccctttcgggtggcccgcggagcgccctcgacggcgaggacatgaccctcgtcgccagaacggtccgacctcttcttcctcctcctgtcacaccgccctgtctgagcggcggatccgggggcggccgaagctgccactccggaaccggaggagttccatgtccacgcttcctccttacgagccactcggtccgcgagctgaaaaagctccgcggtagtctggggctctttggaagcgatcttttcgagcatgcggttgtgccgcacgccccccctgaacgcgtagatcaccgcgtgtgcagggatgcatggtatagtattgcggacttggcaaaaccgctgaatgtacgagcgaagcgactcatcatcgcctcgctgtactgcatgcaagtccgcttcttcgcctgggcgtggatatgtgccttggaagttcatggtgaactgttggcacaaatcttcccaggagtggaccgacgcgggtggcaggttcattagccaaccccgcgcctgtccttttagggccatgggaaagaagttcgccatgaccctgtcgtcacccccagcggcctcgatcccggtcgtatagacctggagaaactcggtggggttgacgctcccatcgtacttctcggtgatggtgggccggaaccttgggggccaacggacgttccgaagactcgccacaaaggctctacagccaacaccaccagccgggggcacggaaggctgatcttcacgtccgtgtcgaggtgacactctggacgaggaggcaccctccgttgcacggggagtacgccggctattacgccggcgcccgatgttgaggcgggcatccggctccccatgctgatcctccctagtcgacggtgtcgacgagggagtggcagccgaatgacgtgcagccgccgccgctcgccgcgccctccgccttgatgacacggagccggtggtagcggcgccggaggtcttggtggtggcggatcgtccaccagcacccaggcgctgctgtgccgtcatgaccaagttggccacgtcttccagccatcgttgggctggagactccgggtcatggacgacaggcgggtgtcgtagaagcgcgccagcagcctgaagcgcaccctgaggcgtgctgccgtcgccgtagacgaggaggcgacgctccccatctcgccgttctcctgcatcacctgcggccggtgacgccgcggacttgtcgaccctctcaagcgcctccccctgcttagggctttggcgcggaggaggtggaggagtacgagctcgacggcgtggattcggctccccgtcgtcgccgctcacactcggcgagaggtcgtgcgtttttccttgctcggccattaggctgaacaagaaaaacttggggcacacggaagagtctgagagccctgaaagcacacgctgagccccctacctggcgcgccagatgacggagctcgtggctcctcaccgggagaccgcgcaggcccccctttgccggttcggccgggggcttagggtgagatctcaagctctctcggtatgtggaaagatcgtctgttagcaagaaaacgcgagactcggacgatgtatacaggttcgggccgctgagaagcgtaataccctactcctgtgttttggtggatctgtgtatgaatgagctacaagtgtgagctgacttctcccccgttctaagctcaccatctgggaaagaaccaaccaacccccccccttcatgggcaaggtcctccttttatatttcaaggggataccacatgcacccttctctttccaaactggactgttctttttctcttgaatgggcggagatcagcacggttgccgtccgaatgacgctccgatgggacagcccacacctacctccacttccgccgggggtgagcgcgtcgtgggaacatggctgtgcgctgacgatatgatcagtgtcagaccggtcacaaatcggtcattcttgtctaccgcgtgtaatcttggcaatgtgcatgtttgcccttcttcacacaacatcttgcctgtaatggttaggatgaagcctggcatatatcgactggggctaacgtgtcatctctaagagataacacgcttaactccggcttgagacgagcgcctagaggctttcgtcttgacgggatggggcaaggcgtgcgtcagaccgccagtcgccacctaacccgtgatctgaccggtctgtgactgatcacagaccggataaaagaacgcgccgtactgcgctgcatgcagcgtgacgcgcttgaccagactgcaataaatgctgctaggtgagcacagctgtgctcacttgccccatatatgtggcgcagatttctttaaggggtcggggtgcctcggccctcggggccggggcaagcacaacccgaccccccctcgggggaaatcaggaggagggcggacacctcaccctcgggcccgacgcccccgaaggtgccaggccacgtgggcgattgcgtctgcctcaagcctctggtcatgatactcccggtcccatattaccgacaatggtagtttgttacttatagttctattgcttatagcacctccataagtaatgtgatgcaatctttatcacacgctagggtttttaacctacatgagtacatgacaacgttgttctaccgtgttttgaccaaaaggttagtaaacttgaaaagggatatatgttatactttttgtctccgttccaaaatatcatgatttttagtttgtttaacaaataccaaggttagaataaaatattccctttttaatcatgtcagttgtcaatatttgaattttaaattacttaaattcccttcgcaagcatgcgattggctttataattattgaaataattgaaaccacgggaatcactgcatagatccttatattgtaattcccccattccaaaatataaaaaaatttagttagatgtgacacatcgtaatattatgaatttaaacagactccctatctaagatttatagtagtagaaagtgtctctgattttagttcggactaaatcctaaaatttcttaaattttgaaaacaagagattaaattctactaaaaccgtggaaacataaaaggaaaagtaggccgagagcaaagctcggaaatttgtcttgtcagaaagggttgacacttcaccaaaagctagtagcaggcagctggctatcgatcagctacccatcaaatcaatatagagttccacattaaaattaaaaatttaaagaaattggaactatgtgatgaaaaagtttgaagtttaaatgcgtagaaaagttcgatatgacggaaaagttaaaagtttgaaggaaaaaatgttggaatcaagacagcgccgtaatcaaacggcgacgtcaatcaggcctggataggcatcgtcatgtcgccgtggcatcgatcgtcgtcgtgtgccgtgtcgtctccggcagacctcgccggaaagggacgcgagccactcgacgacaggcaccggtcgtctccgtctccgtcgcggtcgtcgccggccggccgtctctatccctccgactgttacacagaatgattcggccgtgcgtgccagctaagggcccgattagttctctaaatttttttccaaaaacatcacatcaaatctttggatacatgtataaagcattaaatatagataaaaaatgcatgaagcattaaatatagataaaaagaaaaactaattgcacagttatagggaaatcgcgagacgaatcttttaagcctaattagtccgtgattagccataagtgctacagtaacccacatgtgctaatgacggctcaattagtctcaaaagattcgtctcgcagtttccaggcgagttatgaaattaattttttcattcgtatccgaaaaccccttccaatatccggttaaatgttcaatgtgacacccaaaaaatttcttttccccaactaaacacaccctaagctagctagctagctgcaggtgacgtgaaaatttcagctatttggtactttggttttttaatggtcgtctttgagtatgcaccggtgtcgtcagccaatgacgccatcctgcattattttcgttatttactattattacagtttgaaagatgagctcatgcaccatgttggttcttgaatgcacaccgtaccagtgagtatactgtcaatatataatcttctaggaaaaaaatatttgacttaggtgtgttagattagtactcctatctttaaacattattgattagaggagtggtaaacagataaaaagaagttataaataaacctaataaaatcctatcaaaacgtagttacaaatacatatattaatttgggtagaaggatttgaactctaagaatataattgtgctccaacgcttttaataagaccactccttcaaaaagttaaactcgaaattcaatatattggacctcggaaaagaccgagggtgtcattacataggtggtacctattagggcacccacaatggttatctataggctctctacaaaagatctatgtcaacatattttcctacatggaagatattaaatgaagagagagagcaaaactatctactaacttagagatagtctatagagaaaaacgaggcaatgcatgagagagctatagatacccatgtagacatactattgaggtggtttactattaatctagtctattgctgagatgtacatgttttatagatagcaccttactttaccattgcgggtgctcttaggactcttttttggaggctacagttattcatagaatatccggcacctccaaacaatctagatttttatctagattatgagaaattatcgctgaaacataagctaaaaattgagttttccagcttctctatatacttatcagctggtacctatgccagctgttttgcagaatcttgaggctacgttcgttccccagctctagcacataaaatggagcgacccattaacacatgattaattgagtgttagttatttttctaaaaaatagattaataatatttttaaagtattttttttataaaaaaattttataaaaaaattgtaccgttagccgtttaggaagcgtgcgcacgaaaaaaagatggcgagttggaaaagcaaacaaaaaacatagcctacggctgcgtttggttggatccaaagtttggattttggttgaaattggagatgatgtgactgaaaagttgtgtgtgtatgacaggttgatgtgatggaaaatgactgaagtttggatccaaattttggatctaaacacagcctataaacgcttagaagtccggttgacttctcagacaggagaactggaagaacttgcccaaatcaactagaggaggggcttgactcctggtaattccttcgcttggaatctcaggaaggaaagagatgcccacgttttcaatggtacattcacctcggtgcaagcactggtcaacctcatcctgcaggaagccagggtcgaagcaggcgcgccggccacagcttaattggagacctccttacgccttcctccatgttatgcctgcctatatatgcagcttgttcattttcaagatcatggatcctatttttacttcactagttcactgttgtttgcgtctacacaccaggatttacaaaaccgtacggttatcacgataatcatgtcagtaccttagtttttgaaaccacagtatatcttacggttttcatagtaataaccacatgtttaccacgataaccgccaatccatagagtaacggtaaccccaccaaaaacggtttgagaaaccttggtacacactgctagtgactatataaaacgagataattatgggtgatgatatttattttaattagaagtttaggtgttttttgtgttctaaaaatatttatgtttgtattcgtgtccggttatatttgatccttatttttatttgagataattcatatttgttttcgtatatgaattattcatatttatttttgtatgtgaaaaaaaatacaaaaataaatatgatattagcattccatccgtatttgttctttttcattcctagctgcgggcggcctaatcgttattctcagcttctaatgtattcatggcaaagcttttgcgtactcgaaaaataaccagcttgtaaaaaataaaaacaataaaacgagcaagcatgtgtgtccccgtcatacatgcatcagaaaaaaggatgttcatattttagcacgaaagatggaagtcatttaagtggaaaaaacattttttttttgggttatggtggttcattgggccaaaaacaagcccaatgatgtgctaatcgggccaaggcctttgattgcaggtgatgaatgaaatttctaatgtatagtctagccaggtgattccaagaaatagctgatgagttttcaattgatgagaatgcgaaccagacgagggtgtttttactattattattattcacattttacggctgctgagtttcagaatctggaaatcagctatctcgtttgcttgctagctcaattatcaaccatatctaaattatgaaatataaagcttatattttaagttgatttcgaggtttttctatcgcattatatatttttattagtctttatgtcgctaaaaatatatatacaagtagacatacacattacagatgggttgtgtcgtagctaaaacacaacccacccttaccccctacccacccaggtgcgctttagcgcttccttatgtacatactttatatacaaacgtacatatgaaaaaaaaaaaggacgcattgcgcggagagtggcgcgtgactaggcaccggttcgcgtgactcttacattcgcgccaatagtagctaaactgtttgctaccaaaaatacatttggacaagcaaataacgatttttcatgcttatttatatatatggcaaaattagatcaggcaaaatatgttcccaagagctgacttgaaaagcaaaaccgagagcaagaattcatcagtgcacgtggcagctgcatgacatatactgcaattagttcataaaactgtgacactgcgattatatcttaattgtacaaagttataacaatacattgatcaaacataataaatacaacaattaaccacttaaaaaaggaggggaaactgcagaaacatattcagttcctcatccctgtcgccctgcttgtcctacgtaccctatatattttcaaggatacgtaccctatgtatgaaatacggtacatacatacgtatatacgtactgctgcactgtaggcctgtagctactggtacaacaaaaaaaatcaatggtaaattaattaatcacttagtaataagtaattaattagttactatgcttgatcgattaattagcttagctaattatcctttgctattagcttgcaatggatcgatatcgaatcgatcacggctcgagcttgacgaactcgtaatcgccttcctcccctttcttggaccccgacccgccgccggcttgctgctcgccgccggcctcgccgccgccggccttcctctgcgtgagcgcgacgccgccggcctcgcccttggggctgccggagtgggggctcgccgccgcgtggtcgccgccggcgtcgccgtgcttggatgaggacgccgccgccggcttcttcttgacgccggcgcgccagttcttgagcgccttggacgtctggtcgtcgaagattgactgcttcatcgttgaccccatctgaccgtgcacggacacgtgtcagtccagggatatgaccacgtggcaataatatttttttaaaggaagaacacttaaatataataggagtactcgctttgtttcatatttgcgatatgctttaactttttttaaactcctttaacaaaatttatacaaaaaaacgtagtagactgtaaatatataaatatattattaaaatatattcgatgttagatttaataaaattaatttgacgttacaaatattgctaatttttttaaaaaattgatcaaatttaaaaataagtttaatcaagaaaaaaaagttaaaacaatttataatataaaagggatggagtaatatacttgtgagacgagtgcatagagggggagagtgacatagctacacaagaactgaaccacaactctgcaggcacacaaaatcataatcaattttcagacgataaatcaaaaccaaattcaatgatcacaatatctacaaattctggatcgaaacttatcgttctgaaatgaaaagtttggtgttaattaattattacccgaggcagaggcgagcaaagacgaactctttggagtcattgaagcaggagtccatgccgtactcgtactacacaaacacacaacacagaagcagtgagacaagatcaatcaatctactgaagattttcatgaagcagaactgaagaaattcagtgagcaaagattgggtcaccagtatccagaggaagtagatgatctggaagccattctgcgcaaaacaagaagaagaatcaatcaaaggtcaggtatagtttatcactaattgcaatggtggatggtgacaattaattcatggagatcaatggagagagaaaaaatgattgattgagaccaacctggaagagggtgaaatggatgaggaagaggacgaaggttggtcggctgaaccagaagtaggagtcgctgacctgcaccagcggtatcccctggatcaccgcgtgccgctccgtgatgtcgatcgccatcctgcagatgatcccctgcagcttcgtccccaccgacaggatcgtctgccattttcacccaatatatcactcactcatcactgattcatcattcttcagttcagctcagcacaattcagttcagttcagggcagttttgtttacttcagctcagttcagtttaggattgaaatgtatatatgaacattgtactacttaccaccaatgtcatgatggaaattcagctaagtcagctcagtttagttcagttcagttaagttcagttcaggattgtggtgatgtatgaacattgtatacttaccaccactggcatgatggagatccaaagcatggtatgcaaccctggaacatatgaatgcagaggtcagtaattcatcaagtatatactcgaacaaatcaggcaagatcactgcatatttttagaaaaagcaagaaatgtgcagatcagggactgaccgctgacattgaggagcaggaagatgagagcagatgcccaaaggggagggctgcaataaacattcagaccaacaagaatatacttaattcgtgatggttcagtaccaagaaaaaaattgacagattgcaagatgagaatgtgattagcatttagcagcacacctgattccgacaatgaccttgaaatcgtcctcgagagaccgtttgatgtacttctggaaatcgaacttgctgccaggagctaaatgaacctgcaaaaacattattaaccactcaaaagcaagattatctgggatataatatgttttgcacgcagatgctgagagatcatccaagcttgtgttgtactcacgttgacgaagctgtgacgcaacgcgcagtagtcggccctcctgactgatctgaagaactgcctgaagaaattgctctgcatttgacgatcatcagagaggaaattcatgtcaaacgaactgaatttctcgtcttcttgtggcagttggtttttcttgtcagaaatggtgaaccgagctgacagatcgatcttacaatgtagaacgacgccggcgtcttgttcagcacgttcatgtgctgcctgacgaacgacgtctcgtgagtaaatctgaacttcgtcggatctgcaatgcaatgcatagagttaattatgcggaaagtagtattttctggtattttccgcacctactgtatgcatgtggtataaatagttaaataaaaatatgaaaaagtttgacaagatatattatgataatataagttaatatacaaactagaaaggtagcccgcgcacatgcgcgggcacgttgctgacaccttgtttaatgttgcttgaaattttatgaataatattaacacgtgggtgattttttttggtaatatttttttattatattctaaatctgtttttgtccataatttgtttaggattgctttgaatgttggtcatgattttcttctaactaccctatcaacatataaattctacactaaaactatttgaattcgtaaaatcttgagtttatgagaaaatatcgtgtcgtggaaatggagttgattcacatggacctatcatttgtactatatgtgtttttaatatttagtatatcttatttttggagtttctaaactttacgtaatatccttttcttgtgtactatagatatctttatggaatttaggatatttaatggaagaaactttctattaagatatatggtaagaggaaaattttatcaaattatgacaaatttatatttacttctgctacctccttttttcatatgcttactatgttcttggaaaaatgaatttaaaattgaaataagagagcaattatataaataaaatcagtatgtgtagagtatttataaataaaattgtaaatgacatttgttgaagttaggcgtttgtctatagcacttttggattttgtaatcctatttagtcgtaaatatttgtcaactgataacatatatataatgatatactttatattgtcatttgttatataattttcatgtctgtttggattacatgaaaagaatcaaaatgcgacctaaaatataattttattttataagttgaaatatattcaaaacagataataatatgatggtctaaacttcgttttcaattgtagagtgaatttagttatgcatgtttgtaaaagtgatatatgataaaataatatatgtcgccatttgtttgtcatatacgatgaaaagggtcaatatacgacccaaaaaacatttatttatttattataatttaaaatatgtcagcaccactttaagcctatctcaactattacattatatgtatgtaaaaattgtatgtgtaattttgaatttatagttgtttagaatttattatgataaaataacaaatattatctcaactactataaaaaaaattaaaggaaagggaagagaaggtgaggagggccggttgcgtgcatgcagtatgaagtgatattttttaagggttaattggatccatgccactacaaacatgccaatttagaaaaatgtcattattattcacgttattggctacgtgccactggaatttgagaaaattagaaccatgccactccatcacgttttccgtcaaaaatctccgttagccccaattgcacgtgggacctagctgtcagtttcatcttcacctccctcccctcttttctctttccccttcctctctctccaccactgtcgttgaccaccaccgtcgctgccgttgtcattgaccatctccgtgaagaccttgggagccactgccatcgccgctatcgttggccctatccgcggcgggaggcttgggagccggcgccgccgctgccgtctgtggcaggaggctcgggagcagccgtcctcaacgctatccacgtgggagggctcgggagcccctaccgccgtcactatactcgaccccatccgcgacgggagggctcggaacctgcagccaccgccgccgccgctatccttgacgccatccgcgtgggagggctcatgagccgccgccgccgtctctgtcctcgattggatccgcgatgggaggtctcaggtgccgccgccaccgccatccttgacgccattcgtaatatcgtgaatagtagtggtatttttctaaaatgacatatttgtagtggaagaaaatataagtgattttggttgaatgggatagcatagtactacgaatctaaatccatgtccatgcatccaacaaaaatttcttctattttgggacgggggaatatgtagtttctaattaacttctttttattttaatcttattaattagttttgtgtgttttatattgtctagtgtaaactacgtgttgttaatcacatggttttaaactctatgtgtttttccattaaaatgtatgttgagtggccaatagctggtccaaagcaatgtatttcttttacttgttaaatacagttaatttgggacttgcattataaattttgttataaatgatctaatagtatacatggataaaaaaaatagctacatatatatgatgtagatgttacagttgttaaaaaaaattttacaacaaaatatgtttcaatctaatagggcatgaaaatagaaaagaggagatgcacctgtcagttatgggcgtacgtatgtgcagtttgcttcacacgtacatgtacaggccctatgggccttttcttttattattaaagtaaatgcaatgaaggaaaatagtgggtcctttgttaaataatagaaattggtgggtccaccttatttaaaagtgccacgtgtcgaatcaagagcgtttgtaggaagacatgtggcagcttaggagtgtttttaggaagtttaatggacttttattagttagtatataatagatagaagatagatagatagataatagatagatagatagataatagatagaagatagatagatagatagatagatagatagatagatatgaagctacaaattctatctaaagtttacgaaataaaaataacagattttatctacattctgcggtgtcaatttttttttcttgaacgataaatcatatttgactatgtatgttaccatatacttctagcatcacaatcaatctaatcatttttatttttttctacaactattcatgtaataaataataggtgccattgcatctagttgtaaaaaatatatatccgttaattatgttagttaatcttcagagggtgaagaaataacaaaaaatgcaacatatcaaggcgtatatatgtatatatgtaccattagcgaactcgaaatcttggcccgcggcttctttttcccactctttccatccacgaatctgcagcagcgtcgccatgaacgcggctcgaagctattagccgggatcgccatgaaagaagaagaagaagaagaagaagaagaagaagagaagaagaagaagaagaagaagaagaagaagaagaagaagaagaaaaaagagagctttgccttggccctgccaagcgccatggtgatggcgctgtaggtgacgtggaagacggcgaggaagaagatgaagatgtgcagctggtgcagcgcgttgattgagatcagagacaccttcccctgcacaagttgacagcatccatggagcttgttaatcactacatccattttttacgtgtgacgtcgttggctcttcgcataacgtctaaccattcgttttatttaaaaaatagtatatatatatatacatatatgtgaaaatataaattaaaattatagtttttaatgatagaataagtcacaacaaaataaataaaattatataattttttaaataagacaaaatttgaaacgtcacattaacatcctttcgcaatcggtctcgcaggaggaggaggaggaagaagaagaaggaggaggaggaggaggaggttgtgaccgacatcggggcatttggttgccatcttggcctcggcgagcaaacggtggtgagggcgggagaaggcggcggtgaagggagggccgacgccgacgaggctgaagtgctcggccggcgtggcctcgtgttcgccgccggccggcgtggccccttgttcgccgccggccggcgtggccccgtgttcgccgccggccgtcgtggccccttgttcgccgccggccggcgtggccccgtgttcgccgccggccggggtggtcccgtgttcgcccccggccggcgtggccccgtgttcgccgccggcttccatggtggtggccccgtgttcgccgccggccggggtggccccgtgttcgcccccggccggcgtggccccgtgttcgccgccggcttccatggtggtggccccgtgttcgccgccggccggggtggccccgtgttcgcccccggcctccatggtggtggccccatggccgccggcgtcgccgtggtgacccttgccggtctcggcgtggatggtggaggccttgaggcggcacgggagcatggtgtcggcggccttctcagtgatgcagatcttgatgatgtagttctggccgaacacgagcagcagcgagatgaaccctagcaccatgagctctgtcttcaccttctccagcgcctccaccatcgccttcttcttccggtgcgagaagaactccccgatcttgtggagccccttctcgaggaggatggagatgagcacgatgacgccgcacacggaggcgacggcccatgtcggcgtctggtcgagctccctcgtgttgccgccgccgcctcccccgccgcccatggcctcccgcgccgcctagagctcaccgccgcgctcgccggtgggattggatggatcaaccaagaaagatcaaaccaaacgagggagacaaagaagaagaagaagaagatgatgaactggtgaagcaagcggagctaagctagatcaaagagaggaagaggaaggcgaggaggaggaggagagggggacggcaatggtggatggcaacggtgatcgatttgccaataatttcttggtcgcgtaggattagggcatgcatgcatgcatgcatgcgaggagtgatgaaggattgggaattttttcctatcaaaaaaaaaaaaaaaggattgggaatttttgaaggccgctattttggacgcacgcagcttttgcgcgcgaagcgtggagggtccgttaatccatttccgtttcagttttcccgcctaaaaatagccatggcatctcttctagcagtgctacttgtttaatagccagctggtgaatatcttttcgatgtcatatggaagatgaatgcgtgctatgcaatttttcattttaaactagatttttgaccttagatcgcaaagatcgcaaagaagttagttaattcattaaggttatgcttataccatgtagaaggttacatcggaacaattataatttatttcaagccatttgggttctttcttaatcttcacaaagaaagaaatttcgtaatggaaagatagaatgaaaaaaaagaaaaaaatctgagcacatattggcgatgtgaataatctgcatttaagaaaaatctctattttttttttggaaagttccattcgcagcttagttacaagcacggctatacaagttattgtcgtttatcaagctagtgccagttgtctgtgcatgcatatacacgcatacgagaatgcatgcatttgcttaatggaattgcaaattaatattcgacataaaacttaggagaaattatgttgaattttcggatggactttaagatccatgcaggctggacggggtaaaaatatgcaaagggcttttgtttaatggaattgctatttaacattcgataaatgtattttatgaaattttcctatattttcactatttttctttatttttccattcgatattcatattccctattttctttatttttctgacacaaacggttttcccatgttttttaatttgttccctataaatttttcatatttcttttccaaaattttcatgggccaacattgcacggttaccgtgcctaccagtatgtaccataatgggctatgctaatactgggactatatccttggtaggcagggttgttcatttggccttcttaagatatcatttattatgccactgtatagctgttaccaaactatgtgatgataaataacattgatgcttccgatactgaacggttgttcattttatttctaaaattaactctactaagttttgtcttaccgaaatgtggcaaagcaacaatctaaacattaccaaagattgcctcaactatgaatgtttggcaattataagatcttcctctcaaaaaacttattaaaggtattaaaccaaacaacccatatatctcaatcttattaaaaaaatgatatttcaaattttgaggctaccaaaattaacccttttaaattttggctttaggcatcaaagcgaacaaccctcgattatggcaactaacacatttttcagggcacttgtccaccacggattcgttgcttgcacacattcattgaggaagaagtctgaagctgaagtcttatactccctccatccctaaatatttgacgctattgacttttttaaacatgttcgatcgttcgtcttattaaaaaatttaagtaattattattattttcctatcatttgattcattgttaaatatacgtttgtgtataaatatagttttacatatttcacaaaagtttttgaataaaacgaatggtcaaacatattttaaaaagtcaatggcgtcaaatatttagggacggagggagtatatcctcgtatcagattgcatgtatgtggaacttgttcaaagcttctttttcttctgttctttggaaaaaaaaacaggtatgtataacacaaattgttatacacacacacttcttactaattctgatgtggcgtattatgattaaatctagcttttacataacttccaactacttgaattaaatggtcgagagctttagttagtaagattttttttaataatttgctagtacacatagtattttccatcatttgtttcaatagttcttcgatcaacgaatgagtgttggtcatcctcatccatgaatgagttaggcagaaatcctaatatgcgtatgtttttgtgggctgtgtcacacacatccagctcacgagagtccacgtgggggcttaaccttgacgcggtgctagcgtaccatgtatgtccgtgtgtgacatccaattttttttaagaagcgtgcatgcttgtagttttgcatatatctgaaactcaatatttttcaaaaaaattaaactaaaattagaacttaaaattgaaaaactttcgttcaaacgtagaaaactttcaattgaaaaatttaaactttcaactcaaaatttaaaactttcaactcaaaattttgaagcagggcgatgaaccctcaataatgagaatatattgtaaagtcaaaaattggatccaagaagataactaatataatacaatcatgatcaaatgtgcgcacgtgtgtgggaaatggatgtgtatgcggaaaggtggaagatggggttatgattcatttctgtgtgatcctcttccttgcactttatatggagaacatggttatttttatattattttttctctcttttttacattatgcgcgagaatattttatccttctcttgtaagcatttttatgaacatcattttttagctcatatctcacttggcatggatagttggagggacaatcatagacatgtgaagtttttatttggtggacagataatgtatgctgacttccggcatgtaagtttatcatatggtggtgaatggaatattttgataatcctcaagtgtaagcaaaataatgtgggtagaaggtatattcgttgctaacctccactgtggaggaagaacaaacttggtgcgtgtacgtgattttgatcatgaaagcataaaaagaatgaaagaattaaaaagggtctcaacaatttgactacactcgaaataataacaaggaacatatgcataaggtttgcagtatgatcgacgtatggcttgggtaggaataagacattaatgaggagcatgcaaagttataccatttttttcatttcataaaaattccctagaactcaacaaataggagtaaagttcctttcattaggctatctctcattcatcaattacttagatgatatgtgttcctatagatatgtgttcacaagcagtagctaacatgcgaggaataaaaattatgcaacgcatttccaggaaaatcatatactctagttgaagcatccaactccattgtaatcttgagtttaatttttttcagatattttctatggtgagaacagattaaactcaaaatttcagggagtttcagggaaaggatgcgcaaaccatcacttagtataaagtgtaatatgagggggctcagggatggtttggccgacgcggctgacccttccccagttccagtcatcttgctccttctcatgtatgttctgttagattaattggctaggcccaattaaatcctaataaattccattgcctcacattaagtgtgacggagcgtgaggctcctcaccgggagaccgcgcaggccccccttttgccggttcggccggggaccctgggtgaggttctaagctcctagtctgtggaaggttcgcgagaatggaagaagcacaagacacgggcgatgtatacaggatcgggccgctgagaagcgtaataccctactcctgtgttctggtggatctgtgtatgaagaagctacaaagagccggagagtcagagagcttttactctagaaaccctctcctctggttcccaatccagcctcgatcgttctggatcccctttctcagtgcgcaaggtcctccttttatacctcaaggggataccacatgcaccatctctctcttttgtgtggggacttatcctatctttactcaaacttgacttctcttcataaatggacggagatttgtaatggttgccgtccgaatgaccttctgatgggacggcccatacctacctccacttccgccggaagcaggcgcgacgtgggaacatggctgtctgctgacgacatgaccagtgtcagaccggtcacaaatcggtcattcttgtccaccacgtgtcagtttagcaatctgcatgttcgcccttcttcatacaatatcttgcttgtaatggttaggatgaagcctggcatatatctgaccgggaccaacgtgccatctccaggaggtaacacgccggctccggctagggacgagtgcttggaggctctcatcctgacgggatggggcgaggcgtgtgtcagaccgcctgtcgccacctaacccacgatttgatcggtctgtgactggtcacagaccggataaacgagcgcgctgcactgcgttacatacggcgtgacgcgctcgtccaaaccgcaataaatgcggttaggtgagccccgctgcgctcacctaacccatacacgcggcgcaaaacctacaaggggtcggggcgcctcagccctcggggccgaaacgggagcggtccgacccctcggggagacaaagaggggggcggccacatcaccctagggcccgacccccccgagggggtcaggcctcgtgggtgattgctcctgcccaagcctctagtcatgatactcccggtcccatgtcaccgacagtagcccccggcgttatgccagggcgatcgccctcctcgagggaagcggtcgggcgtgacgccacttcctaaggcctggtgacaggtgggaccggtctcctcagttgggcagaaacccaacggtcgccaatcacgcacatcggcaatggtaactcgactgtcaataatgagcggcctcttcaaggctgccacattactcgagtagcacatgaatcgggatgagccggttcgttttgcctggagatatggtgatggcgcttcggtcggcgagcgtaattaacgcgcgcacgatatgttccatctcgactgccacagccgcatatccacctcatgcgccgcaagcgggcgaatgggattagtggaagcgtgggcgcgagaaacgagggagcgagatagtgggcgcgagaagcgaggagccgggcacaacgttggcaagggtataaagacaccgaggaagagatttacttccttcctctcgccattattccccttgtcttcgccgcttgcgccctaactccttgtttcctgtgccctaccttcgccacacgcgctcgctctcaaacatctcttcttccggcgtcatggcacggggctccgctccgctcgatggtagcgtgctgccgccttcccgcatcgtgagcgagaggcaggccgggctgccgcgccgcttcatgcaggaatctgccaccggccgggagatagtcatgctgggcgagggacgcccggcgccacgctacccggggcggtccgtcttcttcctcccttttgcaatggcagggctggttccgccattttcttctttcttcatggatgttctggagttttacgatctccagatggcgcacctcacccccaatgcggtaatgactttggccatcttcgcgcacctgtgcgagatgttcatcggggtgcgcctatcccttcggctgtttcggtggttcttcaccgtacagccggtgtcgccgtcgtcggtggttggtggttgctactttcagccgcgggggccggtgctgaaccgctacattccctgcgtcctccgcaagaagtgggatgactggaagagcgactggttctacaccccccttgccgacgaagcgcgcctccgacttccgagccagcccccagcgcaggcctccaactggcgggcgccggtagatctgggagatggctacgacgccgtcctcgaccgcctggcgggcctgcgatccgaggggctcacaggggccatggtgtacggcgactaccttcgtcgccggatcgcgccactccagcggcgcgcccggggcgcctgggagtacaccgggtccgaggactgcatgaggacccaccagggggtcaaatgggactgggctcctgaggacttcaagatagtagtccaacgggtgctgaatctcagctccgtggaggcatccctcattccgcaaggagtcctccccctctgcagtgatccagatcgcgcctccatcctgaccatcatgcaggcggtcggggcgtcggaggagcgggctcctcgaggccacgatggcgcgggcgggagccgcaggggggaacaatctaccccgggagggggtcgtgcttctgggccccgcgacgggggcccggggagcagccgccctgccgacgcccgggggaagaagaagcaggaaggaacccctcccccatctcctccccaagggggcggggcggcgcgtgccagcagcaggcgcccggagggggccacgccgacgtcgcagcccgagggggagcaaaagaagaagcggctccgcaagatgggggggacagaaccatcccggggaaaccttatttcccctccaaggtggtcgtttaaccgaccccctcgcaggttcgtcccacgcccgtcgtggctgtattcattctctcaacgcgagttttcactcacccatcttgttcgtcttctggtctttcttctgtttcagcgagatcccgtcgcgtccctcccgccattccaagtccggccagtctgaggccgaggatccggcgaccgcagaggcccggaggcgggaatctgaccggcgagaagccacggatcgcctacgggaagccgaggaggccgctcgggaggccgcccgggctcgccaggccgaggaagccgctcgggaggaggccggactccgccaggccgaggcgacgacatcctccgaggtgacccgtgaaactgaccggcaagaggccgcagatcgccttcgggaagctgaggaagctgcccagatggccgtccgagctcgccaagctgaagaagccgctcgggaggaggccagacttcgccaggccgaggcgacgacgacttccgaggcagctcgcgacgaggccgcgggcgcatcgcttgggcccactccctcgtgcgacgctcaggacaagccaggtccgggggacatccccgagtccggcacgtccatcggcgggccgagccgcgcggcatcctctccgaggcggctcttccccacgccttccgttgccccactgagtgccgagccccttctgcaggccttggccgtcgcaaacaccacggtgttggacgggttaagtgcccaggtggaggccctgcaagcagagcgggcggagctcgacgccgcatgggcgcgtgtcgaagaggggcgacgctcggtggaggccatggtggaggtgggccgcaaggcacaccgccggcacgcctcagagctcgaagcccgtcggaaggtgttggcggagatcgccagggaggtggaggaggagcggggggctgccctcatcgccactaccgtgatgaacgaggcgcaggacaccctccgccttcaatacgggagccgggaggcggagctagggaagaagctcgacgccgcccggggggtccttgacgctgccgctgcccgagaacagcgggcggcggagaccgaggtggcatcccggcggcgcgaagaagcccttgaggcccgtgccatggcgctggaagagcgtgcctgcgtcgtggagagggacctggcggaccgcgaggccgccgtctccatccgggaggcaacgctggcggcgcacgaggccgtctgcgccgaagaggagtccgcactccgcctccgcgaggatgcgctcaccgagcgggagcgagctctcgaggaggccgaggccgcggcgcaacggctggcggacagcctgtccctccgcgaggcagcgcgggaggagcaggcgcgccgtaatctggaaggtgccagcgccgagagggccgcactgaaccagcgggccgctgaactcgaggcgcaggcaaaggagctggacgcgagggcgcgcagcggcggggcggccgcgggcgaaagcgacttagccacccgcctcgcagctgccgaacacaccatcgccgatcagcagggcgctctagactcgtccgccggggaggtcgaggccctccgcttggcaggcgaggtagggcccggcatgcttcgggacgccgtctcccgtctagaccacgccggccggtaggcaggcctctggggcgggaggaccgcaaagtacgccgccaaccaggggggcctcgcccagcgcctctcggagatggccgggactctccaacggctccccgaggagctcgagaggacgattaagtcatcctcgagggacctcgcccgaggagcggtggagctcgtactggcgagttaccaggccagggatcccgacttctccccatggacggcgctggacgagttccctcccgggaccgaggacggcgcgcgcgcgcaggtccgggacgccgccgaccacatcgtccacagcttcgagggttcggcccctcggctcgcgttcgccctcaactccgacgaggaggacgatgacggcggagtgggcggcagtggcgacgaggctggcgacccgggtgcatcggattgagcccccaggcccccgccaatctttaaatagtttcttcttccgaggccttcgggcccccttcttgtatagactaatttaatctgcaatcaaataaagaggaaatttttgtgtcaattctatttgttgtgtgtatgagacgaggatggtctgtgccgcagtccttttgtgtcttggcttgaacaagggctcgtgcccaggtcccagtcctcaaatggctcgggtcggggctagtgcctggggagatccacatgtcgagactggccaggccgggagcgtggtgaccgagggttatgggtgacccgattgtgggtttttgccgattcccccccggatgtcgcgtcccaaatcggctctaaaaattcatcctcaaaattgtgccaaagaataagtaaaatacaatgtgaaagcctccaacaattaaaatgtgcaaagataaaagtcaaatgaggcttggaggatttttgtatatttcctaaaagcctaaaatgcttaaataaattttagtggaattttcagagcacaaatgataattgaaaagaaataaacaaagttaaaaaggtttataaaaagaaaaccctaaaagaagttctctttcccccccccttccctcttgggccggctcggcccattccctccctccctctctctcctctcccgcggcccatcggctccccgcgcgcgcgcgccgctgacaggcgggcccgcccgccactctcgctgacgggtgggacccacctgtcatccccctcctctcgccgcgcccgccgccagcgcccgtgccctagcgccgccgccgccgcgaatcccgccgctcccgtccgctccgcgtgcaatcaagaggggggatttactccccgtaatcccctcccccgtttccccctcttttccctctctctctccctcggattcgctcggaatcaagcccgaaatcctcgccggcgtattcaatggcggccgaatcttccgcgcgcgattcctccctccccggccgctctttccttcccccggcgctatttaaaccctccccgagctccgcccttccgtttccgccgctcaccgctcgctctcgccgtcggaatcgtgctcgcaccgtgctcctctctctccgccgtcgccgccgagctccgttccgtcgccgtcgtcgctccgctcttcctcccggctcggcgacccctccgtaggcttcgccgcatcgtcgccgaccccgtccgccgctccgcttcgcccgtcgactgccggagcaccgtcgtcatcgtcatcccgagccgcgccgccgtcttcctccgctccggccgccgctctcgtcgtcgtcgttgtcccggggtgagccgaagaccgccgttcgccttcccccttccctcctctctctcgggcgccgctccgccgcgccggtggtcgccggcggtgaccatcggggcgcgggcgcgccgctcccgtcggccgtgccggcgaggccgccctcgggcgcgccctcgcggctgccaagtgggcccggccgtcagccgcccgcgcccgcgggtgcggctgacgcgcgggacccacggcgccgaccgccgccagccgcgtgcgcccggtccaccgtggaccgagcggctgacgcgtgggccccacttcccgtggacccggtccgcgcgcccgcccctcggctgacgcaataaatgggatttttaattgaaaattaaatgaagaaattcgcaaatatccatttaaagagcatataagcttcaaatggccatatcttggccatttgaactcggaattggaccgttcaagtctctaatttttccttaagatgtaaagaacccatttttgtgctttgtttctgctgttatgtggagttattttgtgttaaggcctttttcttttccgttggtcgtgtagacgctgcagcttcggaagatccgctcttcgttgaagtcgaagccgtcgattgggaaaacgagcaaggcaagacacatcatcttgatcatattgaatcccagtttataaaattatgttgatttaaattattgcattatcgctttatttaaattcccgcgttatcactgttttatttagccatgcctatttacctttgttatgaccttattattattgttattgttattattattaccttgttcaccctagacaaacaaaaccccaactagtggacactctactcatggtatccctagtataattttaggtagatgcttcgcaatctaattaggtaaccttaggtggttttacaactatagactttgggaaatattcatatcacctggacaccatggaatggttggcttatgttggaattggacacacacctctcttcctctttcaaaacccctaaaacctgttttcggtggggtttgggtgcatgccagttgtgggaagtagcaccccggccactataaggactaaagctcgggcctctgttgcaaagcactaccgtacttccacatgtctaatgggtaaggcttagtttgtggctcagtctagtcataaacaaaagtacacggattggagatggatgaagtcgggggtcgatggacattctccagggcaaatgaaggctacacgagctgcggcccggtagtcgagatgtcatacggcggagggttggtgcccaatgctaggggctcagttccgtctgcctgtcccgggggttccggccgtaggcgggattgggtcggtactcttgtctaaggctaggatgggttggaaactatgtcacgtcttccgtccgtataccgtggtggtatgtggcacgtggttacacgtgaggaagatgtgtcttgtgggtaaagatgtacacctctgatcagagtaaatctattcgaatagccgagccctcggatatgggcaagcctagcaatgtacccaagtcagtgttacaattcttaaaatttgctcaacaactaaaatgtggaatggttggcctgggttggcttaggacgagctgggacccagggtcgggttgccagttcggtctgaatcatcataggccttgggttaaggcaggttcgtgtgggttcacggccttgattaataatattgtatagttctaagatcgtgtttacaaaatggcctggagcaactaaatgtcttaaaatgctgttttctgcaactctaaccctttatattataattcccttgtactcccttgcatttattatgcattcgtgggtgtgtcttgttgagtacggtggttgtactcagtcttgcttaattttcccaagcccagatgaggagttccctgaagatgaaggcttcggtgtctagctcgtgcctgccgtcaagcgcctgtggtcgtcgccctagtcttccgctgtctttcgttgtctttgagtgtgctgggccttcgttgcccgtgtaataattttatatacgcttccgcttgttaaactctgaattgtatcaacttttggtgtaccttgcctcctgggacaaggaataatacacgcacgtcaggaacgcctgttgggtgatttccggtcgtgacattgcacctttaactgactcagactaggctgcggtggttgaggatggggcttcagttctagaacttcttatcattcatatctttggcgtcaacctcataccagttaccaccttcgtgacatgcgtcgacatcagctttgtcattactaggatatcatgtttggcaacttgcccctaactgcctcatattagctttcctggtctccgggtgctagctacttctgctattcgatttgagggtcgataactttgcctttgaattatgcttcccaagagaaccaatttatcccacttgacatgctttgacgtcttcccgaatgactttgctgctggacttgttattgtctggtcgtgatcctgccagatctgaagcttcgttgttagaggtgattttaatctgacctctgtagactatcttcgaacatatcacttggttcatcactgggaatagctcccacgaacaagcaactcagattcactttctttatgttcagtttactttccgctattctcttcatgttgtcatcatttagcattcaacgtattcctgtgcaccttcagccttgatgtgttctttcccatgggatcatctcccaagacatggcgttgcctggtaaccggggcttgcacttttcactccgtgtagcatctgataccgagttgaagatttcactccttgccttcatagaaacacttttacctaggtcatcttgcttacttaatgacaaggtgactgttgtgggggaggcaattactatcaggggtcttccttgagcgatgcagagcatgtttctgtttatcaatcacctttcggcctacttctttcatgctagagaacatctttgccaatctcttttatcaatcatctttcggcttatctctaacaggtggtattctttaatgtggattgcggacgcttctggggacgatgaggtcctttggcttgctgcctttcggtgaaaccttgatgtggttcgtcaaaaagctgcactgactaccttcagggaaatacattgcttgctatctgtatctatgccactagggtttagtgcttcctcgagatggggagcatccatattgttcttctgccatatcacctttgacccttttctgatacctgatcgactaattaccaaccatcgactattatgttctcaaatattgatgtctcctggatcttcttaactgtttgcaggtatatccgaacttatcaatgtagaggcatggcgggtacccttatgggtttcatccaacaatccttatcttgatctgtaacaggcgtatccaaactcctattccccaactactgtctcattggcttttttttttttttttttttttaacccaatacagtttaattggttttcttttccatcaacaggttggttattaactcgaggttagaacatagttcctctgaaatgagaccctaggtctcctttatcagtaagcaattatacacataatcacatatccgcatcttccaaaagaatcctcatggaacttgtctgtattacacatttctcccacattacatgaatacgaggcactgccttaaacaaaaagggacggtgcttaacatcggtacattgtatcctcaatatgaatcatccataagcatagcaagctcactgtttatagacatgaatatatttatgtattacatgattgctgcaaactttcgattacaccatgataagtagcgaactgaaaaccacaaacatggctgctcattttgattctggagagatatagctggcattgttctagtgactgcatccttgattggttctgtgatgatgtgataggactgcataatgctatcattcacaggagaagcttccttctgattgctggttgaagcggatgacggtcttttgcttggtatcgccctccggaggtcgattgccctttgcttggcctggagtaggtcggggagagacacaacttcttccatggacgacaattctttgctggggctgtcggtgcagagaatggttagtgctgaaggtattattgccatgatttattgcagagttaggtggagcaagaggagcattggtgctgtggatgatatcatcgatgttgttgttggagctgactagctgacgagacaatcgtagggtcgttcgttggatttctgcggtcttggtcaacaacacactgagttggcaatccttgggcacatggtttgttccttcgcacagaaaacatgtcaccttgcgagtgggacactcccctggtggatggtcttcttcatagggagtgcagagtgtgagacacatgctagcaacgtgtccaatttctccacaacgggtgcatgcctttgatccgaagaagacacatctgaaactcttagtccaaacaaatgtctcttgggttgatcacttgattttcttcgccatcaatcgcgaggttatttgattcataatagattatgagcttacggaaatgagaccctgggtctccctaatcagcaacaaagtgtacacaactcaccgcacttgcaatcttaacatggatccttcataaacttatcaaactccttcataatctcatgtttctctgttattacatgattgacggggaacaactataaaacataagtatatgattactgatataagagtattatggttgcttctgactagagctaggcttaacaggtactgcatttgctccagcgaccacttggcgatgggcatgtccgcttccttaacaggtaccacagttgtaacagacaataactttctcgcgctcgggttcttcatcttgtacttgatttcttggctgctgtgctggaacatccaaaggtacgatgccgatactggcctctgtcttgtcaactgctggctggggctgaaattgagcattgacaccttgtggtaatgcgcctgctggagttggagctgttgcaacgcgggctataggactgcttcgggatgcatggatgacaattcgctgaggagcaagcttctgattgcagggagttgtgtggactgacgtgctggcagctatgtttctcagttttgggcacttgtcggcgaaatgacccattccttgacaattgaagcaacagatatcttcccggactcggcattttcttttctcattttgattcctctgtcctggcactggttttaagctgagactgtaatcttggcgaggattggtgttgccttgaggcttctctccgttggaactggcgggttggttagccatcttcttcgtcagcagaaaactgaattgacaattttttggtacatgatcagttccttcacaaaagaaacaagtgatcctgctcgttggacacctgtcgggtggatggtcttcctcacaatgaacgcatatagtggcacacgagctggcgacatgaccgatttctccacaacgagagcatgccttacgttccatttcatcttcatcatctgaggagacttgatctgaatcttcactatcagacactctacctccattagctaaaagatgctctgtcaactgtggtgcacctcggaaggtatttcttctctgacgccttgtcattcctggtggaggccattctgtgctggtaatagtcatcttacgtacttcttcttcagttcgcatcggtgcttttctcttttgattcttactcttcttgcctttggcttgcttagtacgtgaccccacgtggtacgaaaggctaggaggaaagcattttctaggattcaatggattgtctccattgggctcttcactttgcacactaggctgcaagcttgacttggtgcgaggaggctggtttagcgatgtctgccctgctgaaccaaaggaaggggcttctttgacatatacccatggacaattcagggcatagtgtccttgctctctacaatcgtgacaaaaggggacatcctcttctagcattggaagctcattgacctgggtggcaaacgctcgatcaaacacatactgattttggtcttgacttccaactaatggtagctgtgaactaagcagcatgcttggaatggaccgagggtgtgcccttgttaactctcttgaggccagtggcggattgagttgaaaacttgagttactggaggcatacccgctgacattctttcctttttctctgttaaacatctgttacagggattgaggtgagagaggaaaccaaccaggaaagaatagaccagaactagagacaggaccttaaaggaactaactctttttgttgatgtgttgtttgttttgcttattctgcaagttgattaagcaaacaacctagcatggttacatcacaacccactgatgcaaaccacgcgctacacacacaagcaaggaacacacgactaacaacactaccctatagggtggcttaggttctacgacgggttctccaagatcttcactcctgcttcacagctggcttcactgcttcctttgcttcgctagcggatcctgcagtcttccggagcttcggcaaacaactgacgatgtcttcttcttcacaaagctgaccaactagtactaattgaaatttgaagaaggaagaaaagggtaaaccttttgcaaatagcattaggggaaggagaaaaagaggaactttcgcaaatagttttatttataaaatatgtccttaggttttatccacttggcttatcctacagtcgagatggctctgataccagcttgtcg

SEQ ID NO: 20863 - DNA, 6704 bp, Oryza sativa
atgtggaatggttggcctgggttggcttaggacgagctgggacccagggtcgggttgccagttcggtctgaatcatcataggccttgggttaaggcaggttcgtgtgggttcacggccttgattaataatattgtatagttctaagatcgtgtttacaaaatggcctggagcaactaaatgtcttaaaatgctgttttctgcaactctaaccctttatattataattcccttgtactcccttgcatttattatgcattcgtgggtgtgtcttgttgagtacggtggttgtactcagtcttgcttaattttcccaagcccagatgaggagttccctgaagatgaaggcttcggtgtctagctcgtgcctgccgtcaagcgcctgtggtcgtcgccctagtcttccgctgtctttcgttgtctttgagtgtgctgggccttcgttgcccgtgtaataattttatatacgcttccgcttgttaaactctgaattgtatcaacttttggtgtaccttgcctcctgggacaaggaataatacacgcacgtcaggaacgcctgttgggtgatttccggtcgtgacaccggagttcaccacgccccggggcacggctcggttctgggccccttttggcgatttaagccgacccgagcccctgagggcaggattgagcacgagtgacctatttcaagtcaagattcttcaaaaggaaataacagcacagatacagcctttaggaaattgaaaatgcttttattgaaatacagatataagagaaataaaaatatgcatgtgtggtagcccccggccaaccctgcacgcccgaggggggtgcggggttggcccgagcccgaaacctgacacccgatcccccttaggggtagaagcgacgaaggtgttcgatgttccacgggttaggcagctctgtgccgtcgcccgtggccagccgaacggagcccggccgggggacgccgatcactcgatacggaccctcccacattggtgagagcttgctcaatccagcacgcgtttggacgcggcgtaggacgaggtcgtcgacgcagagtgatcgggcccggacgtggcgctgatggtagcgccgcaggctctgctggtagcgcgcggctcagagggccgcgcgccgccttcgctcctccaagtagtcgaggtcatctctgcgaagctgatcttgatcagcctcgcagtacatggtggcccgaggggacctcagggtgagctcggatgggagaaccgcttccgcgccgtagacgaggaagaaaggcgtttccccggttgctcggcttggtgtggttcggttcgcccagagcaccgctggcaactcctcgatccacgaatcgccgtgcttcttgaggatgttgaaggtcttggttttaaggcctctgaggatttccgcattggcgcgctccacttggccattgcttccggtgtgggcgggtgaggcgaagcagagcttgatgcccatgtcttcgcagtagtcaccgaaaagctcactagtgaattgggtgccgttatccgtaataatacggttaggcactccaaactgggctgtgatgcccttaatgaatttaagtgcggagtgcttatcgatcttgacgaccggataagcctcgggccacttagtgaacttgtcgatcgcgacatacagatactcaaacccgcccggggcccgcctaaacggtcccagaatatcgagcccccagacagcaaatggccatgaaagtggtatgatctgcagggcctgggccggctgatggatttgcttggcgtggaattgacacgctctgcatcgccggaccaggtcgaccgcatcattgagagctgtcggccaatagaaaccttgacgaaaggctttgccaaccaatgtgcgcgaggcggagtgggctccgcattcgccttcatggatatcagcaagaagctcgacgccttgttcccgaggaatgcacttcaggaggattccgttagccgcgcgccgatagagggtcccttctaccagcacgtagcgtttggagatgcgctggacgcgttcactcccttcgcggtcctcgggtagagtcttatctgtgaggtatgcttggatctcagcgatccaagcaatcaatctaagggagctgggagcgctcccctcgggtcccgaggcctggactccgacgggcctcgggggctggtcaggcgcgtccgtctcccctaaggggtcgggtcgcgccgacggctgggcaagcctttcttcaaaggcgcccggtggggtctgggctcgcgaggaagcgagccgtgagagttcgtcggcaatcgtgttatcccgtctgggcacgtgccgaagctctatcccgtcgaaatggcgctccatacgctgtacttggcgcacgtaagcgtccatctgcgggtcagagcaccggtactccttacagacctggttaacgaccagctgggagtcgcctaataccaggaggcggcggatccccagtccagctgccaccctgagtcccgcaaggagtctctcgtactctgccatattattggtcgcccgaaagtcaaggcgaaccaggtatctgaggacgtctccactcggcgaggtcaacgtgacccccgcaccggcgccctgaagagacagggagccgtcaaactgcatcacccagtaggcggtgtgaggcagctgcgaggggcccgagttggcctcgggaatggagacgggctcgggagctggggtccactctgccacaaagtcggcgagggcctggctcttgatagcgtggcgtggttcaaagtgcaaatcgaactcggaaagttcgattgcccatttcaccacccgtccagtaccctctcgattatgcaagatttggccgagggggttgtcgcgaccgggaaaattgccttttcccgaacgctagtgtattaatccccgtcccaggaaaagccggggtacaccatacaaacatgatataaaagacacctctttattaaatcgataatatttacattattacaaaggcatttaaggcctgacaatcaaaaataaacagcagcggactagcgggcctacggctccatcttcacaggcgctcaactggggtataagccaggactccacctaagacttcttctccaaagcttctcttactgaagggggaaaagattgagcaagaatgagtacaaccacagtactcagcaagccacaccggcggatgcatgattaatgcaagggggtacaaggggataataatataggggttaagttttgcagtaaaccgcatttaaaagtcacttagttgcccaaagccattttataaagacgatcctagagctacacagtattattaaacaaggccgtgaaccctcacgaacctgccttaacccaaggcctacgatgattcagaccgaactggcaacccgaccctgggtcccagctcgtcccaagccaacccaggccaaccattccacattttagttgttgagcaaattttaagaatttgaaacactgacttgggtacattgctcggcttgcccataaccgagggcgcggctattcgaatagattatactctgatcagaggtgtacatctttacccacaagacacatcttcctcgcgtgcaaccacgtgccacataccaccacggtatacggacggaagacgtgacatagttcccaccccatcctagccataaacaagagtaccgacccaatcctcctacggccgggacacccgggacaggcaggcaggactgagccccctagcagcagggcaccaaccctctgccatgacatctcgactaccgggccgcagctcgtgtagccttcatttgccctggagaatgtccatcgacccctgacttcatccatctccaatccgtgtacttttgtttataaccagactgagccacaaactaagccttacccactagacatgtggaagtacggtagtgctttgcaacagaggcccaagcttaatccttatagtacccgaggtacgactaacaaaacccaaccacgcacctcgagcctagcctaaaccattttgggggttttgaaaagagggggaggtgtgtgtccaattccaacataagccaaccattccatagtgtccaaatgataagagaattcccaaagtctaaagttataaaaccacctaatgttgcctaattaatcagcgaagcatctacctaaatttatactagtggaaccatgaatataatgtccactagttagggttttgtttattctagggtgaacaaggtaataataacaatagcaataataatgtcttaacaaaggtgaataggcatggctaaataaaacagtgataacgcgggaatttaaataaagcggtaatgcaataatttaaattaaaaataattttgtaaactgggattcaatatgctcaaggatgatgtgacttgccttgctcgctttcccaaccgacggcttcgacttccacgaagagcggatcttccgaagctgcagcgtctacacgaccaacggaaaagaaaaggcttttacactactaaactccacataacagcagaaacaaagcacaaaaatgggttcttgacttcttaaggaaaaattagagacttgaacggtccaattccgagttcaaatggccaagatatggccatttgaagtttatatgctctttaaatggatatttgcgaatttcttcatttaaattttaattaaaaaatctcatttattgcgtcagccgagggagagggcgcgcggaccgggtccacgggagtggggcccacgcgtcagcctctcggtccacggtggaccgggagcacgcggctggcggcggtcggcgccgtgggtcccgcgcgtcagccgcacccgcgggcgcgggcggctgacggccgggcccacttggcagccgcgagggcgcgcccgaaggcggcctcgccggcacggccgacgggagcggcgcgcccgcgccccgatggtcaccgccggcgaccaccggcgcggcggagcggcgcccgagagagcggagaggagagggaagcgaaagggcggtcctcggctcaccccgggacaacgaggacggcggaaacgacggccgaagcggaggaaggcggcggcgcggttcgggatgacgagggcgacggagctccggcggtcggcgggcgaagcgaaggggcggacggggtcggcgacaacgcggcgaagccgatggaggtggcgccgagtcgggagggagcccggagcgacgtcggcggcgtaccggaggtcggcggcgacggcggagagagaggtggacgtcgcgagcacgaatccgacggcgagagcaagcggcgaacggcggaaacggaggagggaggcacggggagcaaatatatagcgccgagagggggagagcgcggccggagagggaggaaacgggcgcggagatctcggccgcccttgaagacgccggcgaaacttgcgggattaactccgaacgaatccgagggagagagagagggaaaagcgggggaaacgggagagggaatcgcggggaatgattcccccctcattatggcgcgcggggacggcgggatgcggcggaatccgcggcggcggcggcgctagggcacgggcgggcggcgggagcggcgggaggaaggcgatgacaggtgggccccacccgtcagcgagggcggcgggcgggcccgcctgtcagcggcgcgcgcgcggggggaggccgatgggccgcgggggagaggagagagagggagagaagtgggccgagccggcccaagaagggaaggggggaaaagaagacttcttttagggttttctttttataaaaccttttcaactttgtttatttcttctcaattattatttgtgctctgaaaattccactaaaatttgggggctccttttagaccaaggagaatttaacaaaaattctccgggccacatttgaatttttcttgtacgtattttagtgtttgccaatttctttttgaattttaattaattctattattccttttagagaatgatttttaattcgggatgaatttatcaggacgtgacaaatccaccccccttacaagaatctcgtccccgagattcgaggaggctagcaagaagataggttgggcggtcttctcttcttgtctgacttcttccgctctgtcttctataacaaacttgtctaactaaacttctccactctggactgcttggctcgatctcctgttgcagatgaaatcttctcttcacccgacttgtccctggttgcatgtcgcgtcccaaatcggctctaaaaattcatcctcaaaattgtgccaaagaataagtaaaatacaatgtgaaagcctccaacaattaaaatgtgcaaagataaaagtcaaatgaggcttggaggatttttgtatatttcctaaaagcctaaaatgcttaaataaattttagtggaattttcagagcacaaatgataattgaaaagaaataaacaaagttaaaaaggtttataaaaagaaaaccctaaaagaagttctctttcccccccccttccctcttgggccggctcggcccattccctccctccctctctctcctctcccgcggcccatcggctccccgcgcgcgcgcgccgctgacaggcgggcccgcccgccactctcgctgacgggtgggacccacctgtcatccccctcctctcgccgcgcccgccgccagcgcccgtgccctaacgccgccgccg

SEQ ID NO: 20864 - DNA, 14518 bp, Oryza sativa
cctcacctaatttatcgttattattaaaaaagtatttgaattgatttgtaaattatcagaattgatttgtaagggaccaaataattaaatttctgtttgcatgcagtcatatggaaatctgcgactttggctgaggtggtgagaattatttctgcatgattttggactactcgatcagtcacaagtcacaacgtaccttgctagttaggaaaactagtcttgccattttatttgtctttttgagagatcattactaatttggacgcataaatccagacaaaaccacaagcatatgcctttgttttctctgcaaacgctcgaatatgcatgtagtggcaccttaaagcaatggcacgtgtacgtgtaatgaacgtgctaacgaaaattttggcttttaaaggccctccttgtaatgttagaaaattttcttgatcctatgaacacgtcgtctctgcttgttgattatcagccctagtattctattgaaatccagtatgagaaaaaaaaatgagccacatcatcaggtaatattaattagttattggattcactagaagataaaagaggatgaattaatcttgaatggattagatggatggtataaaatttgaattaatcttgaatagattagatggatggtataaaatttattaaggtttccggagatttacgaagctattggaaaggattagctagatggatggtaaaattcaagactttcgaatatgcatgaagttattgaaagaaagaaaagaaaagaaaaaagataaagaataagcacaagaagagatcatgtggtgcatataattttaggatctacacgtacagtaaaaactgttttacaaataaaccctcgtcacattccttccaaagaaacaggcagccataatcgcctaattttttagaatgatttcgtaatgatttttttataggtttattaatttcacatgaatttaaaatacaaataacctattttcttacaaaacccaaaaaatatatgtgcatgatctataaaagcatatgcaccaacagaaaataagaggatggtgagaaggcaaacgataatatagtgactcgtacaaatataaagtttgcactgcatattaagccatttataataccatcataatatcatttatcctagccaacgttctcttccgatcaacgagagaagtccaatatagaaagattgccacttccacgtaaacaagatgtttatagtcgtgccattgcgcgatattataggctagtaattttgaattttaaaaacatgattttaaatttatttaaggttttctttcaatatagcttacttttatgcatttgcttttggaccccgaataatgtagatgcaaaaaaaatacatgtaaactatttttatttggttcattcatatctttgcagattatcattataactcaaccaatcaaaaatagattcatgtatttcaaagaaaatataaaaacaataaccatggtaacaaatatggacatgttcagtaaatgggttataaaaggtgggattgtgatagggtaatgaacagagggttgggatgaaattaagcatgaaaaatgaatggccagtacttaaatatacccttcagtgggtgtgatattatttcctaaacctctttgccaaccaaacactatgccccaattacaccgacaccaggctcagattgaaacagactattcagcaggttatctatttaattatagggttaaattaaagattttttaaactaaacttcataaataacttagaacaatgattcaaacaatgtcataaaagaaatatttttttgagatgatatatttttagaggcataaaccaatgattcactaatgatctaatgaagtagtcggaaaaaatcaggaccctttaaaataaaaaaaaagattgttgtggtacgagcaaacgcatcaagtgcagctcagggatgcgtcgacatcaaacgatagtggaattgacatgtgacgtatctcccaaagcaaagattagctaaaggtccatggatttgacaggtgacgcatctccgaaccttcggatcaaagccaagctcgccatcccagaaagatccgggaagccaagccaagaaagccagccacctcgcgtttctcaggccacatggctgcatataaattgcgagcctcgccgccctgaccatttatccattaccatcacagaagaaaattcaccggtgaaaaggttcagcactgtgcaatggcggcttccgtaggactgaaccctgaagctttcttcttcagcaactcctactcctactcctcatcccctttcatggccagctacacgccggagttctcggccgccgctatcgacgccaacttattctccggcgagctcgatttcgactgctctctcccagctccggcccaggagtacccggaaaatgaaaacactatgtaagaaggtatttttggtgttggatatattgattgattgatggattaaaattggtactgaattgtttttgtttgatttgattttattaggatgaggtacgagagcgaggagaagatgagggcgagggtgaacgggaggatcgggttcaggacgaggtcggaggtggagattcttgatgatggcttcaagtggaggaagtacggcaagaaagctgtcaagaacagcccaaatccaaggtacacgaatattgacgtcactgccactatgcccatttggctatcaatcttaattaattagtaccacaagtttaatcactagcttaattactggcgttctggccaatcaaagttttataatcaccttttctgaaatatcatctgttcagggttaaaaattttagaatgcaaaaaaattgcggagattttgaactgaattttcagacaaattttgtaatttgaacaggttttcactttacttgaaccgaatttgagaaaattcaatcaaattcagagtgtttggtcggtattacttcctaccgggactcactgatagacccaaattgaatttcattctgaaaactgtaaaccttaggagtgcttcggacgaaatttcgttccaaattaaatttgcattggatgatgaaattcatcaatctccctgtcaattttttcagaaactactaccggtgctcgacggaggggtgcaacgtgaagaagcgagtggagagagaccgggaggaccaccgctacgtcatcaccacctacgacggcgtccacaaccacgcgagccccgccgccgccgccgcggcgctgcagtacgccgccgccgccggcgactactacagcccgccgctcagcagcgccggctcgccgccggccgcctattcggcaggcggctcgctgctcttctgaggctgatgagtttgtctagtactagacacgcccgggagctctagctaggatagaaaactagagaaagtttaattatacctgaattttaattaatcacctcacaaaactctgatgtatcatattatatcgtgatagtgactgcttgttaatttaattttgccgatcgatgtgatcttcggttcgtgtgttcatgacttaacgtcttcatgtatgtttttagcagaaagatcaactgctggttttaatatacaatttttaggaattttaccccgtaaggtcgaataccattacttcataatttagtgggatcattttcataaattttaatgaattggcatgtaaaaaccaagagttgtaatgatgtttgtgaaaaagttatagggttaagtgaccccaaagcctcatacatagctccaccactgactgagcattttcttttctttcgcttgctgaagtgatccactttctgagcgccgcattccaaatacaatagatcaatggacacaaatgtacgatatttgttaataagattagccaaaccctatacatctggcgtactaattatgtctacatctctcttaatatacgcacaactacaatataccaatgacccacaacaaactagtttcatcgatcgcttcctcgcctatgttacagcaaatgcggcggttatctcaggtggttctctttattttaaaaggggctaggatattagaatattagaagttaactctatttatatctttaatacctattacaactttaaaacctattgatagccaactttatatagtagatatatttaacataaacttaacaaagttcaccgttttgcaatgaaatttataaaatgtcaggtctatctcactgtaggaaaaacaagttcaccgcctctagccagaattttagaatttatttgaattcaacaaattaaaatgtttgaaatcagtgaaaacatgtttaaagtttaaaactcttcattcaaaaatttatgtccctttctcctgatttgtttttcgttcgcaatgtaaagccttgttgtctctgagcaccatttcaacaagtaacaagtcattaactggtaactacaagtacccttgacccagcaaatgagctaattagccggtctgttattttcttcctttagtccaaatcgccagcaggcaaattaaaccggttgaattcccagtcaaaatacgagacctgcatgatcgatgataggcaggaaaagactcgtgtaacgtactcctatcattctccgaagtttctatactccttaatctctcgcttgtctatcttatcaatcaaatgaacaccactctttaacatcgaatattcatttgaaaaataacaatccctgaaatggttccatcaggaactaacttattatttggcaaccatacattacatgttccttatgggaccaagaatagtatgtgttggactttggaatgttcttttttgttaattactccattgtggcaagaattgaaatagtttttagtgatattatattggttcatgtcttaaatggattctaatttgcttgtcatgttacgaaagtatggacatgaaatttgcaggaaaaaaactaaggatggcaacgggggtgagggcgggttgtaggcagagctgcaatggagttcagggcctgtctggtacagctccaactccaactccacccctcctagagttggagctcagccaaacagtttcagctccatcaaaactgggagtggagctggatggagctctctcataaaatgaactagagttgtgtagctgggtttaggcagctccacaactccactccagacccaactcctggagctaaatttaggagttagagctgtaccaaacaggcctagaatcttggtgtttgctagagctattgcagggcaaggataaacaaatatgggtgggaactcaccataaacaagcattggttcgaggtcaattggccaccttcactcgcaggagcaccttctccctatcgtgccatctatctcagctctgggacttctgtccgcccacgaatccatgatcaccatccacaggcacggtgagagtaggagttgatttggtgggagtcaaaatggaggtatactgtagcagaatggtctaaaaaaaatatttctactagcgtgaatggccgtatcaacacccgagctgcgtcatctacactttgaatcttgggtaatacaatagatcaaaattaagaactgtggagattatgggtaccccatacccacacggcatggttatccgactagttataggggataacttatatatatggaatatgtaacagatcatgacttgggtattacgtttccttatatattacggaacagcctaaagtcctggtttgataatattgtaaagtagatttaggaaaccgataccgtattggttaaggtttctatcttgtaatcctgccccccaccctatataaggtgggcaggaggccctatagggggcatgagacaacctgatcgtcagatcaatacacactcggcggattcaaatccccaaacaggagtagggtattacctctcattgagagggcctgaacctgtctaaatcctttgtctccacatccatccacttttaggtctcgtgcgctaccccgttttattattgccgaattcatgtttcgacagttggcgcgccaggtaggggttgcgtcgaattacctgtcgaaaagtgcgatggaatcaacttcagaagaaaccccgagatcaatctcatcaatttcgatggctcaaatcttcaatcgggtctaccgttccaatttaatctctattagattaatttttaatcattgtttgatttcctgatattttgacgaatttcatatactggatgagatcgaaacacggccatcatcgtcgcctacttgggtgcccttgccgtgtccgagtgctcctctcttcctttccttgcagatggacgtgttgcaggagtggcacaggccgccaggattcgattcctgtttgcatgtatgatggttgatgggctccgccggctacctccgatgatggcatcatgccgaaagaacatcgagttagctgttagttgccggggcttatacatgttgcatggcacgtcgccggctatcactcatgatccagcctcactgctcgacttgagtttttcgtttcaatttgttatcaatatatattagattgatttctaatctcagattaatttcttgctattttttgttgttgttcgcatataactacgcggcactattgaggcgattgatgctggtcatggactcgaggcgtctcagctttccggtcgatcggccgcgagtccactccgccggcttgtcctcgccaccgccattgctgatagcaacaacgacttcaccgccggcctgcctccgtcgccgccgactggtgtcatcgcctatacggttggtcggtcacaccaccgttcatgggcgtccatgtcttcaccgaccagctggccttcgccgccgccgactggtgtttccgcctgcacggctggcctattatgccgccgctgttgggcgtctacgacttcaccaccggcctgcctccatcgccgccgactggtgtccccgcctatacggtcggttggtcacaccaccgttgatgggcatcgtcatctacactgccggcctgcctccgtcgccgccgactggtgtcatcgcctatacggttggtcggtcacaccaccgttcatgggcgtccatgtcttcaccgaccggctggccttcgccgccgccgactggtgtttccgcctgcacggctggcctattatgccgccgctgttgggcgtctacgacttcaccaccggcctgcctccgtcgccgccgactggtgtcctcgcctatacggtcggttggtcacaccaccgttgatgggcatcgtcatctacaccgccggcctgcctccgtcgccgccgactggtgtccccgcctatacggtcggttggtcacaccaccgttcatgggcgtccacgtcttcaccgaccggctggccttcgccgactggtgtttccgcctgcacggctggcctattatgccgccgttgttggatgtctacatcttcaccgttggctcaccttcgttgccgtcgactggtgtttccgcttacacggctggcctattctgccgccgttagtgggcatcttcgctttcaccgtcgaccgccttcgtcgccgccgactggtgtcttcattgttattgatggacgactttgttcccacattggccacttctgccatcaccaaggggaatattacaaagctaagtcatcatttattttattctttatatgatatttttccttttcctctgcctcactacaccaattggtcttccattgagtagtgagtcgggggctacagatgttatatcatatttttcataatatttatcttgattgcttgcgacataatctgagtacaaaagtacctatcgagttatggagttctatcttcctatgctttccgtttggttcgttggatggaccgagtaacgcaaggtgctaagtattattcggaataaatcaaaagcatagagatgagataaatttattttctgctcttaataattgcaaaagtacctgagtagtaaattctgatccgtgaaactgtgttccattaatgacgaactcatgtcactcatatgcatgtttgggaaatgcctaggccgactcccgatgcttgggggcaatgactagtcggacagagtgtttaaacgtacagagtcatctgctcggggaaatcaaaattgacaagaggagaaatacatatttataaatattttaaaatacttgattttttctcgagtattatatttatatcagatactactcatcctatatgtttgttctgcaggatccagatccagatatgcataaaagggattcatggctttaagcttatctcttatactccaggaatggatcagtcagaacatcaccgaccggcttgccttcgccgccgccgactggtgtttccgcctgcacggctggcctttatgccgccgttgttgggcgtctacgtcttcaccgaccggcttgccttcgccgccgccgactggtgtttccgcctgcacggctggcctattatgccgccgttgttgggcgtctacgtcttcaccgaccggcttgccttcgccgctgccgactggtgtttccgcctgcacggctggcctttatgccgccgttgttgggcgtctacgtcgtcaccgaccggccgccgcatccgccgctgactggtgtcaccgcctgcacggctggcctgttataacgccaactgatgctatcttcttcacggctagctacatcgctgtcactactaataggcatcagtatcttcaacacaagctgcctacgtttgccatggctgccgactggtgtttccgcctgcacgctggcctattatgccactgttgatgggcgtctacgtcttcaccgaccggcttgccttcgccgccgccgactggtgtctccgtctgcacggctggcctattatgccgtcgttgttgggcgtctacgactccaccaccggcctgcctccatcgtcgccgactggtgtttccgcctgcacgctggcctattatgccaccgttgatgggcgtctgcgtcttcaccgaccggcttgccttcgccgccaccgactggtgtctccgtctgcacggctggcctattatgctgtcgttgttgggcgtctacgactccaccaccggcctgcctccatcgccgccgactggtgtttccgtctgcacggctggcctattatgccgtcgttgttgggcgtctacgactccaccaccggcctgcctccatcgtcgccgactggtgtttccgcctgcacgctggcctattatgccaccgttgatgggcgtctgcgtcttcaccgaccggcttgccttcgccgccgccgactggtgtctccgtctgcacggctggcctattatgctgtcgttgttgggcgtctacgactccaccaccggcctgcctccatcgccgccgactggtgtttccgtctgcacggctggcctattatgccgccgttgttgggcgtctacgtcttcatcgaccggccgcctcgtccgccgccgactggtgtcaccgcctacacggctggcctattatgccgccgttgttgggcatctacatcttcatcgccggtcgtctcgtctgctgctgactagtgcccttacctctacgtctggttatacagctaccactactgatggacatcatcgtcttccgtcgccgactggttatgccgccgccgactggtgcttttatcttcacaactgcgcgtcttcaccaccggatttctacttggacatcttcaacacatatcttcaatcaggcaatgactattcgacgacaagaagctacagttctcgactctatgttcagttgtttcccaactaatcaaagagtcgggggctacacaaatacaaggctcaaaatttgacaaattttatgtcaagctgaagaaatcaattcatcaaccaacgagtcaactccaggagtcattatcttcatctttgcttcagaacagacattctacttcaacaacatcaaatattttgatttagacgagttggacaacagcatcaactctcctccaagtgaagcatctacaacagctataacattaatttgatggattattgtcactgacatcatcaccagcacctttgcttcatcggccctgacatctccgctgttgctaatggatgattatgtcttcaccgacttattatttcaccttcacggttgacctactatgcaaatgctgatgagcgtctttggcattatcattggttgctacactgctattggcttgatcaccgacatcgtcatcttcatcatatcggttgcgtttgtcgtcgtcaagtatgaggctaggtcttcatgattggtggatttcgtcatcgcctttgatttgcctcgtctgtcaccgactgattatttcgctgccatagctacacaactttatcgctgagcgccttcatattcattgctggctgatctgactgctgccgactggtttcttcgcctccacggctgtgcaacttcatcacttttgattggtatcactatcttcactaccaccaatatttttgccacctctgctgggcaatattatctctgtattggtcgtcttgtctctatgccaattgcgtcagctaccatcaatgaacaattgtgactacgtgctcaggggcttactagctcaaacacaagtatcataccttcaatttggacttgctctggatacatgcaatatggattcatgatcatgggtctattttctatgtttaaagactggactatttattattccccgtaagggttatcaaccgaatacttgcgccagtcgggattcaatttttatatctattttggagtattccataagggataatcactcagatcacatggtctatatcacccgggagcatgttacatgcgtcatcctttaaagggtatcgaaggcatattttttggcctaggcctaatatgtctgcagcccatattttcaggtgtggcctgtcacgttcttttagggacttaggcactttttgcttaggccaaagtgcgcgtgatcaagtgcccaataccttaaaatccttttataccgcagttactcaactttttaggagttggtacaatgcatcttaaaaggtgtcaaacagtaaagctttatatagctgccccgctgactttttaatatagtcatggtgctgtttgggtttttaagcaattgattggatacaatatcgttgctttttgccacgtaagtgtgcatttttattgaccaatattatggcttagcctgattatatattgtggtcatttttcaggcggttggtaaatcctttatgagtttatttactcggattttataccacatatgccatatatttccaggtgtggtggaaccatgtgtcttctagggacttaagcacatctgttaaagcagtgtgcgcatggcgtatgcccaatactttggaaatttctttattcacaacatacaagcttttttatagctgttttgctatgtgaattttcaataatgtagccaactttaggttacactcatcatattttacaaagcagtcggtatatcactcggatcatgttattcagggatttacaccgcatatgctacatattaatatcaagtcgcttggttaactataattattgaagccactcggttggttggattatttattccttgactatatgcttggtttgttcacttaaccgcatagtcgagggctacacctattaggtgcatctagtcgatgcacctgactttatttttcagccctccacagtcttcagatttggtaaaagtactcgggagaccatggcaaagatgattgaagtactcggctttggagtaatctggtttgagagaagattatcttttcgactgtgaaggtctcaggggctactgtggagattatgggtaccccatacccacacggcatggttatccgactagttataggggataacttatatatatggaatatgtaacagatcatgacttgggtattacgtttccttatatattacggaacagcctaaagtcctggtttgataatattgtaaagtagatttaggaaaccgataccgtattggttaaggtttctatcttgtaatcctgccccccaccctatataaggtgggcaggaagccctctaggggcatgagacaacctgatcgtcagatcaatacaccctcggcggattcaaatccccaaacaggagtagggtattacctctcattgaagggcctgaacctgtctaaatcctttgtctccacatccatccacttttaggtctcgtgcgctaccccgttttattattgccgaattcatgtttcgacaagaacataggtttgaactttacaagtgttcatgtgcctagatgaaaccaagttcaagtacgtatcatgtattttactttgattgtaaaaaaaaattacaattaacacagtggtgtgattggatcctaaattaaataagggttaatttgatatgtgccattgtaaatatgtcaattcagataaatgctattaccattcatctatccgtatcacgtcattcgaattcgcacaaaattataaccgtaccatcaccgtcacgttttccatcatcatcatagaccaaaatatcccttgacgtgggacccacatatcagttccatctttccaccattcttccatcttttttcctcatcttcttttttcctttttctctcgatctttgtctcgctcatctctcctcctccgttgctcacacgtggcatggcaccaccgtgcctcccagtcagcactggtgataccgctgctccacctcacgtcggccgctgctacctttctccacgcctcatctactgtctcagtgtccacttcgatcgtctccatgcctctgcactctcctttgcaccgtgcaccgctcaccgctgacttcgtggcctcgaaacctccttgcatcggcgctctgctcatccccaggctgtgccgtgccaggtccaccactgcttttggatctgccagaccatgtcggatgccatcacttcacggccgatgctgccatttgctccaccaccgtcgacgctacctcttgctcgagctccaccccatcgccactgcttgctgccgttgtttgaggatgacggtggtgatggaaaacgtgacggcgattgcatggatcatattttagaaagtttcagtggcatacaaccgatatcacaaatagtaatgatatttttctaatataaaatatttttaatggcatggatcaaattaacctattaaataaatagcttaagataaagtatttaaagatcatgcctttgaagctttttagttgttgttactagacacatgcaccatgcaaagcagagtcacagagagataaaagagaatggggaatggggatggaagtagtacatcgatacctcgctggtgagtcttcggaaggagtggtggcgtccacactctgacatctgacttgatgaattttagtactaataataactagatgaaactccacacgttgctaagagattttttttatgataatagtaaaaatatttataagatagctagacataataattttatataattttcatctttgatcgattactaaataaaaagatgtaaacaagatggtgtggtttataataatctaagttaatatataggttaatcactcaaaagaaaaattaagataatgtggctcaatgagagaagaaaaataaataagataatatagattaatcatctaaaaagaaaacttaggtgatatgacttcgtgagagaagagaaagaaaaaagataatttggatataaaccaataatccaagggttagaaaaaaataaggtgatgtcttactgagaagagagagaagtggcattaactgtatttagtgggaatgaacctataactattgattttttttatttccaattgctaagcaatggtaaatcacaaccggaaaggaaagcacccaaaacctataattaccctttccaaatttgagcaactttgctactataaaactgcaaagctgtagccatcagaatggacctacacgtcaatcaattaaatgtttatttattttattttggtatctaaatcaggttagtactgaaagatcagcaaaaatcagctagcgtatgaccgtatgagttgaaatacgagagagaaaaaaatataatttacaaacaaaataatgactacttgaaaaaaaatcttaaatactgaaactaaatattgatcaaattttgaaataaatattttacacaagcatttacaagcttgaaccatagaactaaaagttcaggaaatagccagatatgtactcatttcatcctaaatatagcaatcttgtaatagatatgacacatcctagtcttacgaatttttggaagaaacacggtacaaatacaaacgctcacaacgattacgatttttaaataagtgtaggattcctgtccggattccagtcctaattaagtactccctccatcctctaatataagggatttttgacattttgcttgtactgtttgaccattcgtcttattcaaaaaaatttgaaattattatttattttatttgtgacttactttataacccaaagtactttaagcaca

SEQ ID NO: 20865 - DNA, 6151 bp, Oryza sativa
aagacgagtggtcaaacagtgcaagcaaaatgtcaaaatcccttaaagctactatagtagaagatttttaaagtacctctgtaatttgaatttgaattttaaagttactatattgccagttgatgtaacagcttgctcgattttcagtcatatcgaatccccaaaaattttaaaattaaactacacgaaattaggttaggtttggttatagttcggtcaaatcggtgagccgaacacacccgaaaatcactgttaggttcaggttcggtccagttcggtatgtgggccccaccggtcagcctcagacaagaaactccccaaccccatcccgtcctccatcacttcgccttcgccttcgccgccgtctcccctcctcgccgcggccgccaccccgccctcgcgcctcgcgaaccctagcagccacgccaatcgccgcgcgcgcgcgtgggagggcggcgccgcacccgggagacggacgatgtccggcggccaagacgagggctcgggtgatttgggttcgccgaagctagcgcaaggtatcgtgggggattcaactgcaattccttcttgtttttttttcttttggaatgatagggagaagggcttggttgaatcgcgtgacctagtttagtttgttcagtgattgctcttaggtgatccatatgcagcattaggctaggaatttatttcattattatcgcgaattcgttatggcctgcggtgatatgacttagggattcgatggataaatctaggagcaaaatcgagtagtgagtagttcgattgaaagccgcagagtgcttattccaaacaatgtatgcgcgtattttgtgtgaggaaaaattcgacgcgttcttaacagaggaatcgtctctctggagacatctgatagaaaccattggaatatgttattttttgggtagagctgttattcactgttcaatgttaaatggtcaatttgtttgttgttcaacaccactagagctggcagatgagtgtcgcacatgtaagaagcaagttgatgcatggaaaagaatcaacatgccaaacagtagttggaaatgtatgtcctgataacactgctgctgaagccttgataagttaattggtcaacaaggatttcagatgcctgaacggatggaataccgaattcgctagtgtgaaaatgagagcacattcatgatcacaaggtgatgacaccagattgattttacttctagggtggcagtatttagccgattaaaggtatgcggattggcatagtacacggccatcatgtagttgttcagaatggtgaatatcattcaaagaagtatgaaggtgggagtcatcctggtgtgctcctctaataactgtgcaattacctactgccttgtatatatatttacatgaaaattgaatgagactttgaacttcaggatttctctagtccatacccaatgaccctccatttcgtgcggggctaaactgatgattgtaactcatgttctttaattacactggataatagttgcgtaaacaatgtcttgtatgatgtctgaagttgattatagtattttttagatcaggtagtggtggactgccaataggtagctagtttactaatagctctgtgacattggtttggggagaccaaaggtggttgaaacactccctatattaattagagtggttacagatcaagcagtgatgcattaccaataggtcttataattcgatgactctgcttcacggatttggagagaaaattgatgttgcatttgcattgtaatgctttacaatgcagagtgcaaatgttaattaatgcatacaccacttgctgccacaactattacttgtattgtgttcatacttttatttatcgttgatagtttctactgtttccgcagaatcttaagtactccctccactccagtaacaaaaacatgtcattttggacgccaacatagtatttgaaaagcagcattgatcactaatttctattacgatgcatttttgaaatctgacaatattattatattactaaagttctttcttcagtgaatctacccctatgattttcatgcatcctatgcaaatattaaaaaatatgtacatatttaaattttgaaagtttgacttaggatatatttgaaaatcaaaaagagtggggtttttgtgactggagggagtatgatttacctactatcaatgaggttactgcaattttacaccataatattcttaactcctgtcactcaatctacttcttgtagaccatcacatcatggacttgggtgacaactctaagatcaaaagggcaagagccacgaattggcctacagtcatgtcaaagtttgtgcttgattggtaccttcagaagaagaaggagatgccacccaagaccaagttcaagaagatgcaccaccattattgcacgaccgtactaaatgctagatttgagacaactttcactgttgatcaggtccaccgccactttaggcgcttcaaggaggtttggaatattgtggcccgttatatgaatatgagtgggagtaggtttgacaagaaacacaaaatgctaatactacctccttcaactttggctagtctacctgtaagtatttttatcgttggagatgattgcagtttcactattctccaagtgcactaatgattcttttcctccttgtacagatagcagagcgtgcaattcttgttaaaccaattccattcttcgatcatatacaagctctctttggtgagtggtcagtggatgctgcccctgtgacagacccaattgaagctgctgacattaacgatgatgacatggaaatcctcgatccgttgaacatgatggcaaattgtgcagatgcaagggaccctgatggggcagacttggacaagtttgttttggaggatgaagatgactgtcatgaggtggcagcaagtagtgatgcagtgccttgtgaagtgatgtctgacactagtgcaccatctgcccagccatctggatcctttgctgagagcacaatggctgctctcaagcctggattgaagaagtgcaaagtagtcagcagaacaaaaacaaccccaaacccaaaaccgcaggcacccgtgccacatgatggcaggaaggcggatatggtaaagagtaccttagctgggatccatgacacccctgcaaaaccaatacgagcagcaccgacatcatcggacccaaatgctcctctatggaacatgctgaaagaaatcccactgacacctgctgatagactctcagttggaatttgcctttgtaaaccagagtttgaagtgcatcgaagctttttcatgaacatgggtagggagtaccttgaagcttgggcccataagttcttatctggaggtgagcctggatccttatagtctgatagcgcagaaatctggctaatggttcttacttttaccccatcaatagcaacccatagtctctgctgatggattactgtttatagagccttggttcagctgctcaaatataattggtaaatatagtaggcaatgtgaaactcatcttatcttgacccatagctgacagttcagtaatgtcgtcttgtaatttgtggacaaaggtattaacatcgtaagttggtaagctgtccagagcttacactgcaagtctacatctgatgtcccatgatgctgaaaatgattggatgttatgtgtgccatgtctttgttcagattcgagatacctataccttctttttttttccttcatctgaatgtgtccttttgtttaactttcgtgtgtcaatctaactgtatgctgtccttccttgagcaagacagctctaacctatgctgattgccgctatatacttgcagtattgctttatgaattaactgtgcaagtgggtcgacctgtcaacctacttatctctactataaaaacgaagtcatcctctttgcaccctcccccactgtgtcactccgcttacgtaatcaccgggtccaatgttcctcaaccaccatcctagtctaaccctgatgatacggtccagttataatgtacgagtatgttaccagtagaccaaataaatgggtaacttaaggataaaccaatttaattagcttataagtagattcacgtgccgatccacttatatcctcttaaatataaaatagtgcaccgaaaaccttttgccgacaaatatcttgtcaaaagattcctcgcttttgttgatagatttgtcggcaatctagcgtcgcagtgcagtgaccatccctttctatgcatagtcaaatgatgttttatacagtactcccttcgttccaaaatatgcgcattttagaatagtaccaagtcaaatatcttttaattttgaacattagtaacaaaaaaaaatttaaaacatcaatcatgtaaaatttatgttaatagatttatcattcaacaaactatcataatatgcaactcctttttatttaaaatgttttactattttagatactgttggtcaaattagcatctcggaaactgtgtcgaagtctataaatgtttatagtttgagacggagggaatatttaggtacctttctttatacatgtacgaaacatacatataccataagataataaattagataaacggaacataaataaggctgcattcgtttcaggctgttcccaacctctctcccttgttttccgtgcgcacgcttttcaaactcataaacggtaagttttttgcaaaaacttcctatacaaaagttgctttaaaaaataaaaatccatttttgaaaaaaattagctaatactccctccgtattttaatgtatgacgtcgttgaatttttttactaacatttgaccatttgttttattcaaagtttttgtataaatacgaaaatattatttcatgcttaaataacatttgatgatgaattaagtcacaataaaataaatgatagttatataaattttttgaataagatgaatggtcaaatgttagacaaaaagtcaacggcatcatacattaaaatatggaggtagtacttaattaatcacgcgctaatagaccgctctgttttccgtgcagaggagatggttcccaaccctagctaacgaacacagctaagttgagaacaaaacgaacaccagtcattatcgtagcgggcgcgggattaccctgatgggcctaaactcgaaaattaatgggcctaacttgcttctcctaatgggccaagtggcccaatctccccacgatacatggaaaggtagtactagcgaccaatgtgcgcccaagattgatctgccaccgtccgtgaaccaatctgacggccaaaactgcgaaccggattatatccagttctttttccactggacggagtgcgtttcgtatccccttttctccagtgacctgcggtagtagtactcactactacacacggctagggtttgagcgctctgtgacactgacagtgggccccacccccgcctcctcttctctcacgccgcctccgcttcgtctcctcgccggagttgagccgcgggatccgtcggagatggcgaccggagaagcggcggcggcggcggcgtcgccgccggagctggcgtcgttcctggcgatcgggcttgaccagcgcacggcggagaacgccctcgccaaccgcaaggtcaccgccaacctcaccgccgtcatcgccgaggtaaccgcgccgccctcccgcttcggtctcgccgccttgcgtttgggggactagctaacccatgcttatgcctgcaggctggtgttagtgggtgtgacaaatctgtggggaatcttctctacactgtgagcatccgtcgctgctgagttattatatgatagtagtattgatctaattaaaatctgtgaattggtgatagttagtttgtgtgttaattggttgcgcattggagtaggtcgcgacgaagtatccggcgaatgccctggtgcatcgtcccgttgtcatccaatacattgtgtcgtcaaaggtgagttctgttgtgtgtgattgtgttgtaaacactgctgctgtgtggctgagttcgtaagtgttgtgaacttgacaaattgtggtttccagatcaagacccccgcgcaattagatgctgctctgtcgtttctttctactttgggtcctgatccattggacacagcaaagttt

SEQ ID NO: 20866 - DNA, 3484 bp, Oryza sativa
aagcttttgaaaagttgatgaattcataccttgcagggctaaaacaactcttatgttgataagagtcaaccacaatttattttgcacatactatagttggctgataaatcaatagtccttcaaatgcccattttcagctcactgttgtttaagggcctgcgtttttttcccctgcaggggtggttgtttcaactgaagagattcagtcaatggtcactgatatcctgaaggaaaacatggaagccatagttgaacagcgatatcatataaatggtttgttttctgcttcattttcattttactttgttattgatggttttgttttatctttcgatttgtgatgtcgggaaagctgggcatcatttgctcctgactttcttgttttccagttggcagcttgtgcggacaggttaggaagtggcacccctggggcgatgctaagttcataaaggtttaatacatttcatggctgaaattatggagttttttgtttaattgctactatttattactagtaactttgtgatatggcttgtactaattacttctgttaatctacaggaggaaattgataaaaggcttacagagattcttggtccaaagacagaagctgacaatgtaaagcctgtgaaaaagaagaaggagaagcccgcaaaagttgaggtttgttacctgaaattcaatcaagttttatggcaggactgtttagttattagctctgcctcatccagttttgtttctgacaaaatataggagaaaaaaactgcggtagctgctcctgctccaccatctgaggaagaacttaatccctactccatatttcctcaaccggaggaaaacttaaaggtaagatgattgttatataggatatgcaatgatactccatattcctcaaaataaagaattctctaatggccttgaagctgaaaattgttctttacgagtaggtccatacagaaattttcttcagcgatggaaatatatggagagcacacaacagaaaggacattttagagaaacatcttaaagcaactggaggaaaagtgatgacccgctttcccccagagcctaatggctaccttcatattggtcatgctaaggttgtgactatccctttcacctgtgatgtcaattctgcaaatgctggtttctcaaaatctgaaatgatgcttacaagatttttgatgcacaggctatgtttattgattttggactggctaaagagcgcaacggacattgttaccttaggtacgaaggaatagttagatgttatggttccaaaggagccttcaagtccattgatttgcccttttcttccttatatggacatactgcattgcaaaacatgctgacatgattaatatctgaacaacaggtttgatgatacaaaccctgaggcggagaagaaagaatatatagatcacattcaagaaattgtccgatggatgggctgggagccttataaagttacctatacaagtgactatttccaagaattatatgaacttgctgtttgtttgataaagaagggactagcttatgtcgatcaccaggtttgttttccttggattgatagttgactgcattaatcatatagctttttaaattgttatcactgaacgcctcttgagaaagcaacagtatgtgtaaattgactattgtatgcttgccagacaccagaagagataaaggagtatagagaaaagcaaatgaatagtccatggagggataggcctatagaagagtcactaaaactgtttgaagatatgaggcatgggttggttgctgagggaaaggcaactcttaggatgaaacaagacatgcagaatgataacaagaacatggctgacttaatagcatatagaataaaggtaaacaattcgacattatggagttactgttttctgtgaagtgtagaatttaatatatttctatatatctacacagtttacacctcatccccatgctggcgacaagtggtttatctatccaagctatgactatgctcattgtttggttgactctcttgaaaacattacccattcggtaatagtttctctctaactacttttggttgtgtgagccttaacatgttatcagttgaaattatcagttgtacacactagaatttgacatatggctgttgcaatcaccagttgtgcacactagaatttgacatacgtcgtccttcatactactggctgctcgtatccctggaccagtaccagccatatgtttgggaatattcaaggttaaacatatcaaacaatgttatgtccaagcgaaaggtatagcgctgattcttgtggagaattatatcaatcttatgatccttgatatatggttctataatatggattggatttgcagctaaataaacttgtgacagagaagtgggtagatgggtgggatgatcctcgcctgttgacacttgcaggactacggcggagaggagtatcatcaacagcaattaactcctttattcgtggaatgggcataacaaggaggtaaggagaaatgttttacccaaagacatgcttccatctttcgatatcagcagaactttttctagttgtcaacataatatactgataccattattttatcctttcaatgcagtgacaacagtttgatacgcttagaacgccttgagtatcatattagagaagagctcaacaaagtagctcctcgtgctatggttgttttgcatcccctaaaggtttagcaattggcattctctttttttttttggcaaaagttttgttatttttctctttgttaattgacgcactgatagtattttcttttaatttggtaaattttaggttgttataaataatttagactatggaacaataatagaccttgatgcaaaaaagtggcccgatgctccaggagatgatgcttcggcctattacaaggtaattcttatgtctgaatgacttaatcattttgagaattaaaaatctggtttagtggttacagagtccctttggttctgcacttctgctcaaagattagacacattgagcaatataagttcatcacttctctgattctggaactgtggtcatccctaggttccattctcaagaactgtctacatcgagcagtctgattttcgtgtaaaggattcaaaagattattatgggcttgctcctggtaaaacagtactactaaggtactagtacattatacatctgtagactctgtacttaattagtttgcttactttgtatactttgtggtctcatctatgtttgccgtctgaaactgataggtatgcattcccaataaaatgtacggaagttatctatggtgataattcagataatatcattgaaatccgagctgagtatgacccttcgaaggctacaaaaccaaaggtaactaggcaattgaaattcttttagatcagatgagaatattattctgctatttgaatttatgagatcatgatgttgtgtacaatatgtagggtgtg

SEQ ID NO: 20867 - DNA, 8837 bp, Oryza sativa
actcttgagcccactagatggttgtaataattacttaaccagatatcaatttattaactaaaagaacaccatcctataaatacagagtgagggtgcatgggggaagagcaaacggggtaaatatgtgctaagtactaactactaacagggagtcagggatgtaagcgaggggcagggagtaaaacagagcagtagagggaggattatagtagatgagatgtagaggagagggaggaaaaccacaacatagcagcaaatgagggagcagagtagaggatgtagaagaggggggaggaaacaccaaaacaagcagcagaggaaggataagaacagggtagaggaaggagcaaagcaggatcatgtagagcagagaaagaaacagaggaaagaagagggtggaggaaagaggagaaagaagagcgtgcctgcttagtttttgtgtcaatggtgaggaccaggatgatggcgcaggtgcagaggaccaggacgatggcgcaggtgcagaggaccaggacaatggtgcaggcacaggatagccgcaggcaacaacttggatcgccgccagggatggagatgtcgcgagggatggatcgccacagcctcagactccagcgaccctctttctgttgttttctccttgatttggtgggatatggtgcgtggggaccttttcaccccaaaaattggcgcttctgttagttctgtttcacgcccagggcccatggcgccaattttttcgggctcttcaaccaatcgcggcaaaaaccacgccctcgacttcctgtggcgttgcctttagccattgtagcgcctaaggacgcaatatcgacgccgtagcggcgccttgggcataaggcggacgccataagcaatatggtaaggcgggccagacgccctgactcctggcagcgccttaccgctatagcgacgctatggcgatgccttgacaaccagcagaacattgaataaggtatcaaatatccaattgttgcaattatgctgttatgggcctcatcgcaggcagttaagagtatactagcaaatacgcagatccaattagtacttgtttgatttgatgactagctttgctctcgaatgtcataattgatgactagtataagtttacttgcatcaagatataaaggactttacagatatgcagtatatctgaagcttatttaatgcttcatacaatttatgtaaatacttaaaaagatcgacttcttttgctacttgtgtggaagcacttatgtaccttagaatagcatgatattgttgtatctccatttgttttactttcctaacattttccttttatcatgtacagtttatgctgatgggagcatatgcttagatatactacaaaaccagtggagccccatatatgatgtagctgctatactcacatccatccaggtagatgatgccttttttgggggtattagcatgtcatgatgtcctgtcatgtttgttgcaatattttgtatcatgtttataattcgtgcttctgattttggtcctgtctttaaaaatattgagcaaactcaccaatctagtataagtgaattgtcactaacttaattgttgtcgccttaaaatacacatggtgtttccttatagatagtctgcttttcctccccacatgctccattgttaagtagtaagctatattcacttgaataattatttttctttgttagaggcactatcacgcgatatacctgtggaagggtttcatcttgagagtagagatattaggcctctgtgactgattatcactattcagtattaagtgacattggcacgtggggtatatatacataaaaaagaataatatttccagcctctgcttagtttttgattctggtgacaactatatataggccacgaagagtagacggctaacttctatatgtaggcaaacttctataacagtaactttagtgtggtgaggccgcctgtcaataacaacatattatctttatatgtttttcatatacatggtgatatttattaatctatgctctatggaaaatagtatagaacacaataatttttatatcagttgggatacttgcatatcttgcttctgtgaataacaaatgcatatcacaacaatgcatatttcatggactcaagacattgacatattacaggcaatttcattgatttaactgttcagtacttctatttcctgctttgtattatttccagtcgctgctttgcgatccaaacccaaattcacctgccaactctgaagctgcccgcctattcagtgagaacaagcgggaatacaaccgaaaagttcgtgagatagtggagcagagctggaccgcggactgatccactccatctaaccatatgatgcctgatacttaaaacgctcatcttttcagtgtgtcgtgtaccaaactgcttgtaattaaaatgctaaaacagtaaaacgtgcttactgttatgtatgcccttcccgaatacgaggaaggctttggaccatgttgaggaccatatggacttcttatataacatctattgttgccagctactaagtgttaaatgctatattgagtacgaagccgtgcctaaaattcaatgagtaattcttttcgccattcaaggaattacctcgtgggctatatgtattttatgctctagttccaatatctatctttaccttgaggattaaccaatatcgagatggattcaaccggaatgcgctcagacgtgtgagtgtacttgtgtgtgagaaaaaaaaaagacagattttttcagtttgtcgtctggaatttcaatctggatgggtagggattaatgcaaaaatctgaagcagatataatttcactgatgcaattctttctgcggaaaaaaaaagctttctcccgttgagaaagcccaagatatttgtatctgctcagcccatctcagaaatatactggggccgatattttacacctgattttgggcccataactaggcctgagcccatgtagccttccgtgaactcttgcgatgtccccacctgtcagtctccgctcgctctcccgtccaaacgcctatattaacgcgccgcgcgcccccctctccctcccaaaaagccaaagccccacccaaagcggcgacgcccctctctctctctctctctctctcttctcttctcttctctcctccacgtcgcggctcgcgcctccaaatccccccccgcgaggcgagcagggcgaggcggcgaaagcgcgacgcgcgagcggatcgaggcggcggcgtcggtgccggcatccaccgcgtgcataggttgcgtcggcggcggcggaagcggggcgcgatgacggacggccaccacttcaacaacatatccctcggcggccgcggcggcaacgtgagtgctactcgtcgacttggtcgaaaaattcgcttccccctcgtcgaatcttcgcctccgggcttcgtttcgttaggattttgtggcggcgttgtctcgctcccgtggaggcggtttccgcggacgggcttgactaccggaatttgtggcggcgattgattttgtttttttttggtgtggcgggcggttgatttttctagggtttgcgcgctagggtttctgcttggaaggggggaagtcgaaatgaattaggaaaattttggtggatggactcgaatattgtaaggttggctaggcaaaacgaattattctgttgcaaatgcggcggtgaaaagcattgtatggaacaattttggaagttaaattaattgtaaatattcccaaaccctgggtttttgataatctcttcattcaatatcctttcactagtcgaatgtctcatgaaattgctcctaatatctagttggcttgcgtttggcgcacattttagcattcatcctgtggttatttcgtccatcactgcatcaatttatttaatcgcatcttatgtcctacataattatcagtattcttcaattttaaataccatttatcttcaatttgcttgctttgttaaatgatttattcctcttatgatttttttatcacatgcctgaaacaaatcactttttgcagaactaaaaatgttttcatctgttttgttcatgattttttttctggaaatagtggatgcttatgccatttcccattgcaaataggaatatgtatatcaagtttagtctgatatcaacgccaacttttccatcatcattatttgcttgcccactgttagtaacttcccttgtaccttgaggtgctgaaatcttctgctactgttattgtttgggctcttgtagaaccctggccagtttaaactttattcgggaggacttgcatggaagaggcaaggtggaggaaagaccattgaggttgaaaagtctgatatcacttctgtgacatggatggcaatccccagatcctatcagcttggtgtttcaacaaaggagggcctcttctacaggttctttggcttccgtgaacaggtaatacttcctcctgtttttcctaagaaaattaggtcttcccaaacgtgtatgtttctcatagataacttttattgagctaagatttttcttctaatttttaggatatcagttcattgactaacttcatggaaaagaacatgagaatcacaccagaggagaagcagctttctgttggtggacataattggggcggaattgaaatcaatggttagccaaattctctatattattccgttgctccattgcctttctgcaacgtttggtagtttgattgctttccatgttatttccatttcaggcaatatgcttagctttaatgttggttcaaaggaagcatttgaagtctctctagcagacgtagcacaaactcagatgcaaggaaaaacagatgttgttctggagtttcatgtggatgatactactggtggtaatgaggtatgtggtttatccagatatacatttctctgcatccaatttcgcccatattttattagatgctacttttctgtttgttaggtgcaattggttataagtaatcaatttatgtttatcaatctgaagaaatgtggatgtaacaattgtacaagctatctgttacatttcagtgtcatgtattattagctactcaactgtctgccttgtaattaaagagtgattttactgtcctgctttttcattctcatttgatggtattgcaagtaacacactcccattgttagagaaaaaccatttcataaaattttggggtctttatttgtgctgaagggcatattgatcattgttttccaccctactacatattttggagggtctttatttgtgctcagaatattattaaggtagctaagctaatcgttgacaaaaaaaaaggacagctaatttcaacttcctttccttcttttaaatgtagaaagattcattgatggatttaagctttcatgtaccaacttcaaatactcaattccctggagatgagaatcgtccttcagctcaggtgagtttgctcaacaagcatgcaagatggacaacatacacatgattttattgtgcaaatggtgaaatcctctcctttttttaggttttatggcaggctatcttgaataaggctgatgttggctcatcagaggaagctgttgttacatttgatggaattgctattcttactccaaggtgggtaaatcatataaccatagagactagactttttagaaataaggacatcattcaatgttattgtttcaattttctggaatagctaacttctccttttctattcagaggtcgatacagtgttgaacttcatctgtcattcttacgactccaaggacaagctaatgatttcaaaattcaatatagcagtattcttcgcctctttgttttaccaaaggttctgccccttttatatttttattatgctgtacttgttgttaactttgtatctgacaaaaaatcctatgacttttcaccttggcagtcaaataatcctcatacctttgtggttatcactcttgatccaccaattcgcaaaggacagacattatatcctcacattgttattcaggtgttgtattagaattcaatttgatactaacttggttacagtttacggtaaccttccaatatgcatttggtaaccattttctgtatttatgaatagtttgaaactgaagcagtcgttcaaagggatctgacattaagtgatgaggttttggctgaaaagtacaaggatagactggagaactcttaccaggtgatgtattttgtttgcgttcaatcaagtctgacattcttcatctaaaaagtggatcctaattcccggctcatgtagttttgcatttctttctacatctgagcatctgtagaacaaaaaaaaaagtagtttgggggtgtgaatcattttaaataactgcttccagcaatgttatttgttcttgtttgttttagtttcttgtttgtagtcatatgctctgagctgtatttattgtggtaatgtgctgctggatgcttgcaactccaggaatcatcagtgcactgattcccaaacttgtgattcatccgtttatcactgaattgcttgttttttttctatctactcatgactcctgtttgactgaattgcacaagctgctattgatgtgatgaactgcttctgtggcattactgccattgagtctatcattatgtattcctttgtgtttgcaactttgcatgagttatagggtcctatagcttttgctcatttgctatttttaactcctgatagactaataacaaactcacagaaagtatttgatttatctatagggtctgatacatgaagtgttctccaaggtccttcgtggcctatctggtgctaaagttacgaggccaagcacgttccgcagttgtcaagatggatatgcagtgaaatcatcactcaaagctgaagatggttgctctatccgctggagaagggcttcttctttctaccaaagcccccaacactcattctgcatgaggaggtctgttttctacactgctgagatgattgataattccatccatttgtcctgttttaagctgtagctctttatggcagattgagtatgttgaatttgagcgacatggtgctgggggtgctagtatctcatctcactattttgatctcctggtcaagctgaaaaatgatcaagaacatctattcagaaatatccaaagaaatgaataccataatctcttcaatttcatcaggtctgtgctttatttagctgattccaccatcattggtttacttgcctttttgaatagaagtatgaagctgataagtgcctttttgtaatccctttcaagtggcaagcatttgaaaatcttgaatcttggagaagctcaaggtagagctggtggcgttacagctgttcttcagagcactgatgatgatgctgttgatcctcatctggagcggatcagaaatcagactggcgatgatgagagtgatgaagaggtatttcctgcgtttaattgttgatcctacttatcatgattccatgatctgacttatcaatcctgtcatagcttggaattaatttgtttgtatcggataatcttcaacttcaggatgaagattttgtggcggacaaggacgacagtggatctcctactgatgattctggagaggagggttctgacgctagtttaagtggaggagaaaaggaggtaactcattttactcacgcaatatccctgatcagtgtctataatgaatacatcatgctaatcaacattactattccccccctccaaagaaatcttccaaaaaggaagctagtagctcaaaggcgcctttgaagaagaggaagccaaagggtggggatgcggcggaaggctcggagaaaagaaagccaaagaaaaagaaggatcctaatgcccctaaaagagcaattgcaccattcatgtacttctcaaaagctgagcgagctgtaagttcctttccaccctgcactactgtacagaaattccctgactaatcctatgtgaaacattgtgggaggatctctctctctctctctctctcacacacacaagcaaagaagggagcttacgatcgtttttcccaaatgcagaatctgaagaacagcaatccggagctggctaccacagagattgcgaagaagcttggggagaggtggcaaaagatgacaggtaacattctttgatctctatgctcgacaatgtccatgctggtcggtcaagtcctccgagacctccgtttgaaccatgtccgcttcgtgtaacttgcagccgaggagaagcagccatacgtcgagcagtctcaagttgacaagaagcgctacgcggaggagtcagccgcctaccgcggggcggctgccatggatgtggactccggccctgcttcggactgaagagaagagacctgaattgcattccagattacccttagtctaggagggcgacagacaggatacggctagtggcatctctatttccatgtaaataaaacttatgagttatctggatgtaaataaaactatcgtaggtatctttcgagtcccgttctatgagtgtcttatcgctttatcttagctatatatatagatagcagctatagtatagtagagttcttcccgccatttatgctggccggataacttaccttcacctatgtagcagcaataagcatgcttatctgcttagttaaattataaatgcgtgttctagctggagaatcacctctgttgtgttgagcttgtggagttgcctgtgcataacttgttcgggattaattcacatatacttgctaggtttaaaatcatgggtaaatacatttatgaaaacaagcgtatcagtagaaaatttgaagagttaacgagacttgtcct

SEQ ID NO: 20868 - DNA, 1612 bp, Oryza sativa
ccgcctccgcctccgcctccacgacgtagcccagggcggctagggtttcggtttcctccgccgccgccgccacctcctcctcctcctcgtgcgcggcggcgaccatggcgatggtgcaggccggcatgggcctcacccgcgtcgttgtcctcatcggcgccgggatggccggctccgtcgtcctccgcaacggccgcctctccgagatcctcggcgagctccaggtgcgtcgcgtctccaccgccttggggggaagaatcccccgctcttcctcctcacctgaatcggtgatcctggtcctgggagaggtggcggcgcgccaccggattggattttgatttggtttggttctgatgatgatccgtgccttgcggacctctctcactcgttgcaggagatactggacaagggggagaaggggaaagacggagaagggggcgggggcgccgacatgacggacgcgctcactagacaggtgcgtcggtgatctccctgtccctagatgtttcagctagtatatgctcagggatgtgtccgattcagctgttcgattgattattgcgccatttttctttgccattagttaggtgctctggcttccccaccagagccccatgtcaataggagaagcatgggatgcattttaatgcgattattgtatttaaaaatggatgttatctgtgcctatcagtatatgtatctatagctgcagtgattgctgaattattgttttatagtggcaatgattcacattgcattgagtcagttctgcttgtattttttcttatttctgggaattgctagcttcaacaatgcattagttgttcttccattatgtataagttaatattgtcatgtgatacattaggttgtggccttggcatttctacgttcacaatgaagagctgttgagtatttttggaagtgtatagtagctgttgtaatattaattattactacaagccacaacacaagtgtgtgctcataagaagcatttgcgtgtgttttaaacagctgtggtatatgcaacagtaaacatactacttcaatattcccataatatttttttcattgtcatttatgagtaaaacagtttgcctatcttcatacacatatttgatactttgtttaattttgtcaagctagacttacaccttggtccatttaggtgcgcaacttggctatggaggttaaacaacttgcttcttcccgtggatctataactgttcttaatggaggttctggtcaaacaggtcagtctagcttctgcacaacctacataactgttacttcctcagtctagacatatatgtgtgccttgattcattaacatctatatgaatgtgggcaatgctagaaagtcttataacctgaaacggaggtagtaaatcacaagctccacccattttatttgccctctttttttcttttctttcttgtagtgttctgacatgagtattacttatcgcttggcttcattttctcttgttttaaatttgaaagaattcacgtagttagggaatgagtggactgaacaataatcattactcactaattcagcctacatatttctgttgtagcttatttcagaaattggcttaattaaccagtg

SEQ ID NO: 20869 - DNA, 505 bp, Oryza sativa
tccattgcctttctgcaacgtttggtagtttgattgctttccatgttatttccatttcaggcaatatgcttagctttatgttggttcaaaggaagcatttgaagtctctctagcagacgtagcacaaactcagatgcaaggaaaaacagatgttgttctggagtttcatgtggatgatactactggtggtaatgaggtatgtggtttatccagatatacatttctctgcatccaatttcgcccatattttattagatgctacttttctgtttgttaggtgcaattggttataagtaatcaatttatgtttatcaatctgaagaaatgtggatgtaacaattgtacaagctatctgttacatttcagtgtcatgtattattagctactcaactgtctgccttgtaattaaagagtgattttactgtcctgctttttcattctcatttgatggtattgcaagtaacacactcccattgttagagaaaaaccatttcataaaattttg

SEQ ID NO: 20870 - DNA, 9686 bp, Oryza sativa
tgctgaattaactaattgatggtgggcatctgctttttatgtatcttgtcgccctactaaactattattcatgcatgcacaattaaactttttcttcttataaacgcattacaaatgtaggcgctcacaacacacgtgcactcacctctatgaacatatacgtacaccctatctctataagcatttcttgaagactggaccggtaaatcttgagattaacgaagtcaccacgaccgtctcgctgtcgacggatacgtcacctaccattaaaataataattagttctaaatatgaacaattaagctaaacaggcacgtggtgaacaaattgatcgaccagtgtataataaaaggttacaacacataagatgccgaaaaatggacgaactaataaaaaataatttataagtttttgtatttgtgttattagtattttaaaagtaaatgctagaaaatagctagaatacagcgaaaagactctaaaattaaattaagttttaaaatttaaatttgtgtctgatatgctaataagtacagtaagggacttaatttgtatattcaaaatgcagtctcattttctttttcttgttccttcttcgaaatttcagcaattttctcgtatcaagaaaggaaaatttcagcgtgtttctgctgatgaagcgttgcatgtgactaagcaaattaaagcatctgtagtttctgaagccggaacctcagagcgggtggatcggcgatccaaatggggtccgaaccccatttgacctctatattttctcacacacgctctgcatatgtggctatatattttcttcttctcctggttcagtggttgagtacgtactttaagggattgatttttcttaaccctatttgattaattccttgtgatcaggcacagagactaattaattaagtaattaaagcctttaaaggaacgagaaagtaagaaacgtcctaatggcagattcagttcatattatattagcaaaagaaaagcagcagtatctgggtgggttagtggggattattatcgccgccaattaaaagaagagctagctagcgagctaagctaatcgtaggagcacccaatgggcaatgcagcaagtgatcgaatgggtaattaattgactaattaagcaagctttgcgattgacttgtggtgtgcagagcagatgacacacactttaatttggcttgcttaatggctaaggccaagccatgcatgcaaatgcatgtatctcaaggggtaaaaaaaaggtggcatttgcatacgcacttacacgtaggattgaaacatgcacgagagcaacccaatgtcatatatggctatatactcaggcatgtgcttatgtgcattggttgcatggggccatatatccatgcatcaaatccgaaggtgaattaagcagccaagaggcatattggttggttgcatggagcattcggatacatggcatgttcactttattatcatttttaactctattaaattggacactatcacaattcctagtaagtctgtaggctgttattttttttcccgtaaatgatctaaaaaaatttcgtcggtaatttttatcggttcacccatggtaaaataattttcgacagtacaatgtgttataatgtattttttttcgacagttttgggcttataggatagttctggtaactaataaactaaagataaccttaacattattatcctattaaatttggtattttcgaaagtatcttatcaagaaacactatacttagtctataaacgaaaacacataacactgccaaaaatatgctaaagctaaaatgtgtcaaaaatttaacattatcaaattttagtaagttgactttttaggacaaagtgaacgtgccaatatatccatttgaccaccctcatcatccatctattcattcgagatcgatcgattcgtttatttcgattcatcaagagcatctgcaagagacacatatcgcagcgaggaaatgacaaggaaaattaattatggagagattaactcgatatatccattccctgcaggatgcagctaacagtacactgaatatataaaaccttcgtcagaaccagctggtaaaacgccaccatagcggcatgcttatgagctgctttagctgacatcaactcttaattaggatgattaacaaaacagtaaatcgttttggaggttaaatatatgcttagtttgatcataatgtgttatttttttgaaccagaggggttcggtgagtaaaattccgaacccctggacctcctttttcccttctctctctgtcttttctttgttcgagatgcctcgtttttttttccttaggaaaacaaactgaacaaagcaagccatgggcccatatggcccaataaaaaagtgttttccccttaaagaaaggacccaagaaaaatgctgggccgtacgaaataatatctggcccatcgttgggcctacagatggtcacggggccagagtaattaaatgggcccttgagtatatggaaacttatctgctggtctcgtacaagcagacaggggcaaccaatttaattacactatctgattgttacatctgttcttttttttttaaaaaaaaagtcttgctactatcatgtaataagaacaataatagtctatctaggtactggaaataaaagtaattattgatttattggaacacataaagaaatgaatgcaaaataattagtactatagtaatatcgagtagcaaataaacagacgatgccccgcaaaaatgaaataaaataaacagacgatgagttgtgctacgtagctagcagatcaatcccctttgccactcacattgttggcgatagcatcataattaagcatatatgcatccacgagtttgaggaataatcgaattaacagtggcgtggttatcgacttatcgtcctttggtgtctgcgtcgacgttgacttcatcgctgtgtacgtatacgaatgcgcgtaattgtgcatattgctgtttacgttgaatttaaatataaaactatcaaaattttagccgaatttgattctaaatattaaatatttatgacccaaggagatactaggttgctgggcaatcacaatacacacacacacacacacacacacacacacacacacacacacacacacatatatatatatatatatatataaaacatcaagacaatgattcgtgcccatcctgtaaagtgagtcatacatatcgtgaaaattagctttagcttaccgtgctataccacaaccaaaaataaagcaattctctctcatatatttgatggacaagagctaatgcggacgtttttctatccattatagaaattgctttaacaataattaactattttagacccacttctataaaatcacaaatacaccagatacatcccgcttgcggtcaaagacacgtgactttgtcactgacatgtggaccctgacaaaaacatcgtgcattttactgcagaggatctcaattttaagatcatgcgtgtactgttcattcatgtttctctgcccaaagagcatgcatgttactgttcattcatgtttccctcacatgcgtaggtgcagatgccaactcgatggaacgatcaccttgggcgttcctggacctcaaatcatgcatatgtgtgacgtgtggtccgatccagaccaaccgtgcatatgcatatgctactgctagcttctcccataagaaaagccgagcgatcggtcggcaacccggcatccttttccctaggtggacatacaccgtgcagtcgtgcacgtacgctgcatgcagcataaaccgaccaagagacgaccttagaacatcttcaacagagttactatttttactatccaaatatctatttgatcaatttaccaaaagaattagagccggatttttctttcactacaataattctccgttacattctccaatctgacagtgcttttcatatgttggcatcctactctttttctttcctcacgtcttctcaaccaagtaaactcttaggctgtgttactcaactttccgtagtttcccatgcctcagttacttgtgatccgccgctccttgattccgccggtcttggtcgcttaattgcatttctgaaactagtcgagaaggcattaacaattatctaattaaatactatggacggtgtaaatatatatacatgatcaaggaaaaaaaagcaataaacatacatataatatatagtggtctccctatcatgagagtacgatgatactgtgcgagttttctaaacaacagtttagtccaaaccaggtcgccgtcgttagcgcgacagaaagtctagattagggatctccaacatcaactctcccgtgcatgcttgctgctttcttgctccacctaacaattatttatttggtacaacccaatcagtgactataaccaataaactgccaatgcacctagcactttattactactacctccatcccataatcacaattttacactatctactatcaatgtttaactatccgtctaattaaaaaaattataattaatatttttattattattagatgaatggtcaaacgttagacacataaatccacaactgcacttaaaataggatgggtagtactatattcatgatatattatggagtatataatgtgagcctcccagtgataatttttttaattatattatgtgtagtggcaccatctcaattgctttaagattctcttgattatatttagtgataatttattgttcttgatttatgcaagcactacacagacagtactgcattattgctactacatgtacatgcagtggtccatatacaaactgcattttttgacagtaggtggaaataaggacaggagaagaaaaaaattaatactactatactccactagcatctccatataaaaagccagcggaaacaacaatctgacaacagtttctgatcctgtgtgtacaacagtccagcatggcccacaagcagtcaggcccctgcacggggtggcccaccagtcagcaatggaacagaccgatgtggcgatggacgcacgagaggcatctcactgactgcaagttctaccgatcctgacttctaaagtgaaaactactgaaagtctgaacgtccgaaaactaatgcaaatgcaaacctggagactcaaattctgaagctaattcaaatggttttgcttgaaaactggaagcgtcagcaagaacctagaaaccgtgtttgcaaatgcaacacatggattctcaatttctcatactgaattcttgagtagcataatgttttcagaagaggtaaaatggacatgaagactcatcagaaacatcgaaattctcctccacacaacatcgatttcatgcatttaggaaggacattgatcttctgcgtattttgcagaataaagattgtaacaagaaagaatctttataaaactatctgtaataacttttttttctgtattttaatataaatatgtcactgccggcctgccgggcgaggctcgcctgtcagtgtttccttaaagagaacatacagatgtttcgattcgatcggtttgtcttgcttgttttctgtgatgcatttggcaacgatgttgtgatagctgtggagtcgaagctgctgtgtcgccaggcgacaagcccggcaacgataacatttgcctcacgaagtcgaagcctttgtatcgcttacaacaagctctttatcgatagctgttttgggctccgccatttttcctttttccatggtattggtagcttaggttagagtgttgtggttttcgtccagtttttccctaattaactgtgcattgtaaggtttagtctcgttttctccttaaaataagacaccttcttctttatataaaacgtcggcaacagcctgaccgttcgaaaaactactacttaacagttctgatctatgccagtacatctttctcattgacttgatttagggcaaatcgctggatgacgaagtgataatctaatatgttaattagctacgacaataagcgagcgcgggtgcctcaaacatgatgtcattctccaagtcatggccttaattaaacatactttctagccataatggaagcatcaactatatatatggtggatccctgatgatgattgctaacatgataaggccacgattaattgtcatcagaaagagggaactaaatcaattaaactgaaattttcacttgctataggtttatgggcttggtaggtggtgatacactagctagcacattgacaaataaccacgttgatctgacccatggaggtgaactttttccccttagatgaatggaatgaaactaatgctacatcacatccacacaaatgataaaatgattaattaattaaccctgtcactgcattatcataatagtaagtgctgctagagatagcgtggattttataattttgcggtggactctcggcggattttagaaactcgtgatggcaacacgtggtacatatgcttgccacgataacatgagtagtgccgcgtgtagttaacaagatagccacgttgtaggttatatcaatcttattgacacaactcgtgacaacactatggctacggcgttgtcatttgctatgatatcgagactatatgaccataaagggtacttccaacaaaagtgacacggccatgatggcactgtggctacgatggtgtcgttttttatgatgccgaaactatgactataatgagtacttccaactagagttgacgagagacacgtccattgataaatgtgatcaatggttatatgggtggatttataaaaatataaatgcatgagtatgattcaatatttggttatcaacgttccgctctgggagcgcattatacaataaatttatgagaatggcatacaataatagtatatatttacagcaatatatttttatatgcctttactatgttaagaattgtagaacaaataatgtgtccatatcaagatagtgaatggcacctggtaatttattccatgggaacacaaacattgtcttgctccaagttcttacatgttgccggaaaagtgccattgatcgagatggtaatgaatcatctcatcttgattggaacgattaaatcttttactaccatcatgatgtgatccattatttaatttgccagttattgttgtcatatatatctatggaccatctattgttatcacacaattttatgcagttaggatcagaaagttttaatccagtactcattatggctaaaaatcctcctgttttacatttgacgatttgaatattccgatcgatctccatagttttaaaagaacttccttatttgatgggtacttcttgttagataccagtatgtacttacacatgatttaatgacaatttgcatgatgcacgcagttgaatgcttctccccctcctacgtaaattggaacgggcagactttggtccaacaactcacatttgactttctcacaacgatctatcttctgtagactgcgtacttcgtcgccagccaatgtgagtgtcatacatttcaatgcttcttaacacgtagcagtaccgcacaataactttgcatatgccccacaaagtaacaaatgtctccaaacatttatgtgagtaattatagtttaatataatataaccttattgttgtcactacatttgaactctataaaaatgcaatgggaattggggagtgaggattggacataaaataaaagtccaatacccaacttcataaatattctgcaactcagtaattgtatgcatacactgtaaaatcataaaaaaatgcaaaaagaaacaattaatcacatcatccatatcaagttagaccatataaattaaagttgctttgacttttctcttattcaaattcatttaaatttgactgaatttgcaaaaaaaaaatatagcaacattttcaacacaaaacaaatatactatcaaaatgtattcaatgttatatttaataaaactaatttggtattataactgttgctaattattctataaaatttaataaaataaaaagtaatatgaatcagagagagtaaattacagtaacctgcatatgatttattttcccctaacctgcgcggagaaaattgtcgtgtagccaacccggggtgctccttgcaaaataggcgccccctatttgtaccataccaccgcgctacgcgtccccatcccatcccccctccctccccttcttctgctctttcccctctcccccacttctctcgtcttcctcttcgactcttgcagtttagtccactccattcccaccaaaattcctctctactcccaaattccccccacccctcccggcgaattccccccctccgccgctcgattcggcgctcgaatccgccgtctccgccgccaattcgctcggtccggcggttcgctgatccactctctcgtttttttgttttttttttaccttcttacgcggcgattcggggtgtatgagctcggtttcgcggcgggttggttgatttgctccgccgcgtcggagggcggcggcgcggggaagaggggggcatgtgggtttcgctggtctggatccgtgggtgcgtgggcgtcacgttcgtcgactacttgggcgggagggaagccgagtagatccttttacgcggtgtgccggggagggaggtggtggttgaggttgaggttgacgaggggttctagggtttcgggggcggggggccatggaggctgcccgggtcggggcgcagagccgccacctgtacggcggagggctaggcgagcctgacatggacaggcgcgacaagaggctgttcggctgggacctcaacgactggcggtgggacagtgaccgcttcgtcgctacgccggtgcccgccgcggaggcgagcggcttggcgctgaacagctcgccgtcttcctccgaggaagccggggccgcgtcggtgagaaatgttaatgctagaggtgactccgataagaggaagcgggtggtggtcattgatgatgatgatgtggaggatgacgagctggtggagaacggcggcgggtcactgagcttgagaattgggggtgatgctgttgcccatggagcaggggtgggtggtggtgctgatgaggaagacaggaatggcaaaaagatcagggtgcagggaggcagtcctagtggccccgcgtgccaggtggagggctgcactgcggaccttactggtgtgagggattaccatcgacgacacaaggtctgcgagatgcatgccaaggctaccactgctgtggttgggaacactgtccagcggttctgccaacaatgtagtaggttagtttaattcaaactactactgcctttcattctcattctataatttgttcatattggaatgattaggtagaatatgctatgcaagtttgatgcaatgcggctaaacagattctagaccctcacaaacttccaaccctaacaattttgtaagcattggattttgaaagtaatcctgatgaatatggtaaattaaattgataaaatgatagttaaagagaggagttggtgtgatctatcatctgtgcatgttcaatctagattggctgagataaatttatacgtagacttgtctgtattatatacttcctccgtttcacaatgtaagactttctagcattgcccacatacatatagatgtgggctgcagga

SEQ ID NO: 20871 - DNA, 27017 bp, Oryza sativa
aagtcttacattgtgaaacggagggactattatggaagtaatgattttggatcgtaccttttgattttgaagaataattttaggtatattttttttccttctcatcctaaagtcaaattctcaaattcatgatgatatgatatttgtctgcaccttttgagcttagagtgtaatgattctttaactcaggacgtggtttattaatttgacatctgtcacagcatatgggcgcagtggtagtaaaatgaaaaggacaccataatttgtggagcgaagattaaaatgacgatgcttatgttgtaattgtgaaaaacacggactatcagtcataggcaagatttagtgatgatgctggaagaagtgatcaacgtagtgccatgctaagagaaatcgttagggattaactcttatgaaagcagtgaatacaaccgaaaaggagtcgtattgcacaacccatttgaatatacgatataaaagaaaatgttcgaaagtaaatatattataaaatggcctatgcccttctagctgtgcctgtatatctaagatctatgtggtactgccgatggctcagctcaaaattacagttgtacgtgtcataacaatcagactgctttctctcgtaatttctttggattattttctcttcaaagaaaatacttttttatttccaacatctgtactgaaagtctgaaattaattttttttggggaaaaattagttgaagttgacaaagccagaaacatttttgctaagatattttttgaatcgtagaatttctgagaccatttttacatttcgtaattgctagaactagtacgcacgtttttcatggaccagtattttcatatattctttttcgtctgatgtaagagaacatttggttccttaatgtcctcatttgtgcatcccacgtccaacagtaatgctttcttttgctcacccttttatgtgtgtgggttgttcctatgcttaacaccactgtcaacttttagaaaatattgtgaattcttcttgggcactgtcaattataatagtttttacagtatttgtttttcatgcatattttttcataaatgtttcaaaggaactggcactctgttcaaagagtaccgtgtgattacatagtgctaatactatttacaatgtactgtgctatggtgccatagtatgcattttttttttcaaaaagatatgggtgaactctgtaattactgtacatgcttacatgttccttttacagattccaccctcttcaagaatttgatgaagggaagcgaagttgccgccgacgtttagcaggccacaacagacgaaggaggaagacccgccctgaagttgctgttggtggttctgcatttactgaggacaaaattagcagttatttattgttgggtctccttggagtatgcgccaatttgaatggtaagtaaacatattcttatttgaactgtaggtaatgtttttatggtacaataacatagatcctccatctgcacgtatgtattggtgagctggtactagtatagtttgttttcaattgcgtacttgagtttgactttatctgaatatgtttctgagtgaatttacttggtattgattgaaataagacttctgatgttttcaagtaaggtagcttttatgttgtatatggttcttgtttattggaaaggttgttagtggcatagtttctaggactacaaagactgtagtgtggtactagatgagttcatagttaagtcttatattcaactcccagatttgcttacaggaaatttccacctttgtgtcaagattgcctatcctatgtcaagacttcacaacagcacaattctgcaatcttttagccatttgcttaaatgtagagcctcccaaaataacgtaggaatacttctagtgcctagactggactattatgaacatacttggtccatgcaagctagttttatgataatactcacaggactccacaattgtacttgcagctgacaatgctgagcatttaagaggtcaggagttgatatctggtcttttgagaaacctgggggcagttgccaaatcattggatccaaaagaactctgtaaactcttggaggcatgccaaagcatgcaagatggatcaaatgctgggacctctgaaacagctaatgctttggtaaatactgctgtagcagaggctgcagggccatctaactctaagatgccttttgtgaacggtgatcaatgtggcctggcatcatcatctgttgtaccagtacaatcaaagtctcccactgttgcaactcctggtgagatgcacaacatttctagcccttcagtgaatgtttccaaatgaagattttaagttacactagtggctttttttcacagaccctccagcatgcaaatttaaagattttgatttgaatgacacttatggtggcatggaaggtttcgaggatgggtatgaaggttcacctacaccagctttcaagacaactgattctcccaattgtccatcatggatgcaccaagattctactcaaagcccaccacagactagtggcaattcagattcaacatcagctcagtcactgtcaagctcaaatggagatgctcaggtttgcaaatttgttccttgcaacttaatgtaaagaaaactagtttcccaaaactaaagggatcgcttcaattttcaaatgctcacgacttattggtctataataacatccttatcttttgataacaagttaacaagaggtacataccaaataaggaaataactatcttaagtgggcattagttcaagtgggattttgaactggaaggggattttagtgcacttctacaagggttggagtgctgtcaaacatgccttaatttatgcagtactagatatgcttcagattctgttttaaggggtatataagtatgaacttaactgtacattttgaacttaaaagttacacacttacacgtgcatgacttttcagtacctttactagaaaaattgttgcagatatcatcaagaaccaaaaacattaagtctgcagagaaatttgaacagaatgcacattttcccagatccaaatttaactgactcatctgcaccagtgaaatgtctctaactaattcatcgcatctgtttctcacataaatgccacataaacaaggtgaactgaactaccttttgatcagtataaagaagtgcatgaagaaagagaatttctactgataacaacagtcggtctagtacatacgtattgagatgccaaatgccagtattttctattttgtaatattgcatagtggatttgcacctcaaatatgttgaaatgcgtgtgctctctctctctctctctctctctctctctctctctctctcacacacacacacacattgattgtcattatgaatgcttgcagtgtcggactgataaaattgtcttcaagcttttcgagaaagttcctagtgatttacctccagttttgcgatcacaggtaaattatgcattccctcagcaacgtggaagagtaaatatcgtaaatctaacacttcaatcctgaatttcagattcttggttggttgtccagtagccctactgatatagagagctatattagacctggttgtattattttaacagtatatcttcgcttagttgagtctgcatggaaagaggtatgatttttcaactaattatttcatgtcatgacaatgatctttttgcttaatgcttgatagcttgatgttttcctcttatttactacagctctctgataatatgagctcatacctggataagcttctgaatagttccaccggcaacttttgggcatctggtttggtatttgtaatggtacggcatcagatagctttcatgcataatggtaagcccgaatgcttagttagcgcagtgctcttcaagttctattatacatattttacatcggaattttgttattctcaccactcctttatatcactgcaggtcaacttatgttggacagaccacttgcaaacagtgctcatcattactgcaagattttatgtgtgagaccaattgctgctcctttttcaacaaaagtgaatttcagggtagaaggcttgaacctagtcagtgattcctcaaggtactttgccagtttgcatctacagtttacatatgtttgttcttgatggagacataggttgatgtttgcttaagcttacttgtcatctaaagattgatcatctcatgttttcaggctaatttgctcatttgaagggagttgtatattccaggaagacaccgataatatagttgatgacgttgagcatgatgatattgaatatctgaacttctgttgtcctctccctagttcaagagggagaggatttgtggaggtacagcttttcatatgtctgctgttttcatgtgtctgttttctgtcacaacctttgaatttactagaatgccatcgttaatttcaggttgaagatggtggatttagcaacggcttcttccctttcataattgctgagcaggacatatgctctgaggtctgtgagctggagagcatatttgagtcctccagtcatgaacaggcagatgatgacaatgccaggaaccaagctttagagtttctaaatgagctgggctggcttcttcatagagcaaacataatatctaaacaggataaggttcctctagcatcctttaacatatggagattcagaaatcttggtatatttgccatggagcgggaatggtgtgctgtgaccaaactgctgttagatttcttatttactggactcgttgatatcgggtcccagtctccagaagaggtggtgttgtcagaaaatctgctacatgctgccgtgcggatgaaatctgcccaaatggttaggtttctgctgggatacaagccaaatgaaagcctgaagagaactgcagagacattcctattcagacctgatgctcaaggcccttccaaatttacccccctccatatagcagctgccacagatgatgcagaggatgtattggatgcacttactaatgatcctggactggtattccccttatctataatccttaggatatggttttaagtatttgctcgtattctatgtgccttttgcacagaaatatagacttccgttgcaattgatgttgggcacatcaacaacggtgccgtgccatgtgcactatagatctttctatcctagtttttttaaaaaatgaattacacttgaatatcctgtctaatcttcctgctgctacctgttattgcaggttgggatcaacacgtggagaaacgcgcgagacggcgcaggcttcaccccagaagactacgctcgccagaggggcaacgatgcttacctgaatatggtcgagaagaagatcaataagcatcttggcaaaggccatgttgtcctcggcgtccctagcagcatacaccctgtaataaccgatggtgtgaagcctggtgaagtcagcctggagatcggcatgaccgtgccgccgccagcaccgagctgcaacgcctgcagccgtcaggccctgatgtaccccaactcgacggcgaggaccttcctgtacaggccagcgatgctgaccgtgatgggcatcgccgtcatctgcgtctgcgtcggcctgctactccacacctgtccaaaggtttatgcagctcctacattcagatgggagctgttagaacgtggaccaatgtgaggaggagcttagaatggaataagtgtagttgtgttttacgtaagtcgagagcttagtgtgctggctaagatcaaaataacagtactatgtgaggaggatgatcctttgtatttaaagcaggatcgtttcgtttatataaaagcttacataccgtcattattaattattattgattagttattattatttatattatatttaccgcctaacatgtaaacagaacatatgttccataaaattcatggtgtggttgtagaattcattctttccagagcttcttgttggagccatgcttctggctgctttcggttcattctagacttctagttttgtggctacaagattttgtcggtgttgtattgttgtaaactcggaataaaacttttttttttcgtcagcgttgtattgttgtaaactcagaataaaacatttttttcatgcgctttgtgagtgttgtattgttgtagactcggaatagaacttttttttttcatgtctttgcgctcctttttttttcttgtctatatatcacttgagatcaaatgttgattcagaaacgatgctgaatctttcccaacatatttgttgtccaagtgcactggacgctcaaaatgcgtgaaaaccaggtcgatttgaaaagtttctcaaagtactatcatgatacttcctatctcggagcttgttaatggtacgctatacgcatcggcataattgtaatatcaaacccaacggtaactagtgagataggaaaagatatatttcagcactatgtatcattcaaaatgtgattcaatactggaatttcacatggagactgctctcatattgaaatttcacatggagatatagcatgctctccggatgtttttggcttgcacacctaatttttcactgaactgatgagcaccatatgtcataaattatacaaccaaaatttgcgaacttaatcaggttcaaaatggaacatgtaagcttctttttcatcctgataaagacgtacattttgcaatgagtaagtgattctctggagaaatatttgatgggacgtagcttacaagatctgcatctaaacccttctctctaagccataatagcctaccagtatcaataatatctttacacataaaccccaaggcagctctctcccctgctggtatacttcggatgagtctatcgattccgctgacctccacatcagacttctctgcttttccgcacctgtaaaaaaacgtagcgacaaacatattaagcttccgtgacaccattcgagaatgattcaagaaaacgaactgtaccatgtttttgcccatacatgatgcatcataacaatttaaaagggtgatacttcccaccaagatttgaacagatgatcttttatagctatcagaatgtagaagaaaactaaggcttagttcaactaatggttcttacctgtcttctacagatgagtcttcaacctctaaagaggaatccggggagctgtgatcaccatccacagcccagctgctaaaccaagtcatggtatggaaatcttcctctgtaatccctaaccctgagaggaatgtcttatctgcaatgagaacaggaacattattctctaagaagaaaatctaaaggttttactgcaattttcaaaggaggacggtataatattatataaagtagtcaaagctgtaagcgacataatcgcacgatacatcctaaacaaaaataattagcagcattggctggcaaaaaaaaatttacttgcatagtgattccattggcacagatggtggcagcaggtggccaaagcaaggccacatagattgcttttgccatattctttttcatgtgcctggttataccgttcatgaaggcagcacatcatggtcatatctggagaggacaatattcattatatacaatcaagcaatcagttaatctcattgtcatgtattatacatcagtttgtcggagtataaaatccatgaataaatttcatatgttagaacttagaaccacctgttgcaggtccacatagatgctttccaattgctagataatgaagtccactcaatgcctctattccttgaaggttcaaatcttcaactgcattgtgtttatgtttcttatgagtgcttatatctcttactatctcaaatcacagggtatgaatgtgacaattcgttttaagaacacagagaccacccacacatgcatataagtgaactgataacaaacacatttggccttcagcaccaaaggtgcctaaaaaccacttcaaagaatgaaaagaaatcttactatcaattctcaaacgcttcaaagtaacgccttcattttgtcgcaaacttcgatcagcctagaaagtacagagaaaaggaagaaacagggcaacaacagagcagtcaaagaaccaacctaagctgaaattagatttaacacaacaagcactttcagaaaataacaaaacaataaaagttttactgcaaatcatgaggaatacagcaacaatgtgtcgaaacaaactcaaacttcataaggcactagacacagataggacagtgcattaaattcaaaatcactgtaaacaacctatacatgccttcatacttaaagttgagacatcttaaacaacgaacacaaaatactgaattaactattgttgagcataatagcaagccaataaattgcagatatattctaatctggcacagaaataagtaatgtccttctaaatttctacatgaaaaataagctgaaattgatttcaaaaggtcgaataaccaatggcaactgtccatgtttgacaagctcaaagtagatatcatcctgaggcaatatgaacagagaaactgaccttgagcttgtatgatcttctctcaaccaagaaaacattcctaatcccgtagcagtctgccagcatctgagtcaagtaccctctccctgctccgaattccaccactgccggagcatttttcacaccattctcctccgccacctcacctcccttctgcagcaaaccaaatgcctccatattgccaatgatggatgcctgctgcgtgacatgcttttcctggtatggcaccttcctgcccaacacaccagcttaaatcactcctcactacaaaatcctcaaaaaaatccaacccttacaccatcaaaagtggtaagcacacacacctatcaacctggttcctcatccaattgtcgcaagcatctgtaacaagaaatgaatcacgcattgccatggccgccgacgcatgcgccaacttgatcttctcaatcaaggcgcgcaattcatccttggtgagcttgtgcaccaatgcacgcttagcggccgaggtgacacccccaccgccttctcccccaccggagttgatgcccttggagtagaacggctgcgctgcgagcgccgcggcctgcttcttgagggggcacttgccgacgtgcgcctccaggttctcctcgagcacggtgctgcccaagacaaggcggcattagcggatagggacgctggtgatggagatcacttggcggtggtataggattttggggggtcttactgcgaggggtcgacggggcaggggacaaggcggcggaagggcgcaccggcatcggaggcggaatccgggaggtggttcccacagtacctgaggaggagggggaggaggcggcgatgggggttagggttagggttagggttcaggggttaagcaggaaggtaactcggagagctgcttactgagaggttgggagcggagtgttggcgcagtggcggcgcttgttagggagccagaagtggcaacggcccggaggcggaggaggcggcggcgacgagggcttccgtttcgccggagcacggcccatctctgacagcggcggcggcgagcgggagacgccggaggcggagagggagcagaagtgcagacccccggtgtgaacacaaccgaaggggaaatgcgtgacgtcattgctaaatttgcatcttatgaatttgtttttttttaaaaaaataaatttcgagtgaattcgaacatgtgaaggtgtcctccacgtttgacacaaaatcagattatcgtaccgctacatatcccttataaatttgacgttaaaaaaatattactagattactccctccattctcatttatttaacaccgcgcactaataaactaaccaacgtcaaatgaaaaaaatagatacttcctccattctcatttatttgacaccggttaactaatccacgttaaaaataaaaagagatagagggagtagattgaaaaacacaatagccatttttcattcgcagagcgatactagaactaaccgagaagagacataaacacaaattatgtcagacaaatttacaaattcaaaactcaaaaattgttacatgaaaacatgctccactgagtccaaaaggttgcatcatgatgagatgcaatggcaaccaacatataatattacaaacgaacaaacacaattttacaaaccacatgctatgacaccacgtcaccattgatcgcctaataagaaaaagggatcatctttccagtcaaaacgcggtaaaatttatcgtaaagatatgtttttcttttaaattaaattaatggcgtcggtccgtgtcacaggccgacggactggagcacggcgtagttgacggcggtggtggcgccgtcgacgacgaggttgtggccgctgacgaaggcggcctggtcggaggcgaggaagagcatggcctccgcgacgtccgccgccttgagcaccttcccgcggagcacgttgtggggctccgccgccgcctccatctcctcggggctcatccccgtcagcccgcagctcagcggcgtcgccacgccgccgggggacacgcagttcacgcgcacgccgtgccgcccgagctcgccggccgccgcgcgcaccagccccagcaccgcgtgcttcgacgccgtgtacgccgccggcccgaacccgccctggcacgacgccacgctcgccgtgcacacgatggcgccgcgggtgccgcgcgacaccatggcgcgcgccgcgtgcttcacgcacgccgccgcgccgcggaagttcaccgacatcacccggtccagagccgcgaggtccatgtccacgacgggccccgtcgggagcagcacgccggcgttgctcaccatcacgtcgagccgcccgtgctccgccaccgcggcggccaccgccgcctccacctgcgcctcgtccgtcacgtcgcaccgcacgtaccggcacccgccccccgccaccgacgccgccaccgcctcgcccagctcgtcctggacgtcggcgatgaccaccgtcgcgccgcacgacgcgaacagccgcgccgccgcctcgccgatgccgctcgcgccgccggtcacgatggccaccttgccgtccatcctgcacgcccccgctcaaatccatcaaacgaattcgacccaaaccaatccaacatcctcaaatctaaaaaaaaatcaaacgaaaaaaactactagtagctgcgagtgactcaccttgtcttcgacatgatgcaatgcaaaagctgtttcgtgtctgccttctgcatcgggatgtggttgtttatatagtgctcaattcgcttttaaaagtcgtcaactatgccaatattttactcaaaagcaaaattctttttaaaattcagaggaatgggcatatatatccgtacacgacgagtataaaatactccaaaacccaattctattattaatccaaatcaacagaatgccacatccttcaaaccttcaattcaatatttcatcaattaggtagcagcacaactaaaaaaaaaacgaaaaacgagtatccaagaacacggcgtttccaaatccagtgagatcatcagacagacaaatcccagagaaacaatagacatggaagcattgaaaaactcatcagagtttcagttttataatagatggatgaagcggagaagacgagctgagctggagaagacaaaagcggttgatccaagcacgctgtcatgtggggaacaccatgaaccctaatcatctcgcgttgcaaatccggtcccaatgctcatggcgctttgcttaccatcactgtcattagcggatgagaagatgagcttaacaagatcaattcaagaacagaaaggataagaggaggaaatctagagttggatttgggttgggtcgctgccttcatttctactgctaatgattactccacgacagggtcggctgcaatgcaatgctgcatcctgatcctgcaagaaactccatgcactgcatgttcactttcaggaaaagatgcagtcaatcgaacgcgaagcttgccgggatttctgttcttgcttgtaattgttgctgaagcattccactctcgtaagtttgcttatgactgataagcgtgaaaaaataaacaagcaaccaaaaataatttatatgcaaaacttttatatttacgaacttagcgatttaaaagctagtacttaaaaataaactacaatgaaaaaacctccaatcaactgtaaaattaagttttaaaattctgatttaggctgtgtataactatattgtcggtgcctgtcttactaactttactgttaccgttactgttagatgctgcctgttggtgactgattgcctgacagaagaaaagaaaagaaaagataatagatactacaggtattgttcagagaacgacaatagtgaattgtctgtaatgtggtatggtcaatggccgcaattattggatctcacgccagttttctcgcactggcatgtttaattgtttgcactgctgctaatgctatctcccaaagtcaattagcttcagattagttattggctctctgaccctgctgatatgacagctcccttggtttcatctgccagtaggatcatttgcagtagtcaaagcacaagacttttgcttcagaattgacttctatcgcactgaatgactgaatgaccatatcatttgaagtttgaactactagaagaatgcaatgttttcagaaggagcacagttccttttcctgtgcaaaagtttgattctcggattaaagaattacacagtagcagtgtgctttgtaagtagactttcaaagcagtatatagcacttgaactgagttgcatggatggaccatacatgtgacaggaccagcagacatctttcagaagaaaataggggaaaactaacacacttggaattgaatttttgcaaattgaagcaatagttcagatagatatatatggaccagcaaaggtgagctgttacctcaatgtctattggttattaccagccagagtttctttgcatttaatgacgaaatgctttgaaaagcactcagactatggaaggatttgaaacaaaagggacatggtagttatgcactaaaagaaattaagtaaaccaaaacaccaacactatttggttgttgtctactagtaccaactaccattttttccacattatacgtagacatagtaactatttacacagtgttgttgatattatcttcgatatgtccaaaaatcggttaagctaggaccatttagaaaaatcattgaggctaactaccttgacacgtcttgatcaaatagctgtgggatttattatcctatgaacacaggttctttgccttgccacttatgtcagcagcgacaacgtatatacattgtattgtactatgtagccttattgtactgttcaatgttcatgcattcatgtaagtagctgttagtttgccactgtcggtctaaacgaatcaacgtgttggaattgatggatgcgactctgctcactggactcaatgatcaggtttatcctacacaattcatctgtctaaatgattagtaaattatactccctatttttttaactaaccaacgtcaattagaaaaaaaacaacagaggtagtataatattactccatccgtctcattttaagtgcagccatggtttttcgcgcctaactttaacagtccgtcttaattgaaattgttttaaaaaaaatttaaaacataagtcacgagtaaagtactattcatgttttatcatctcataacaacaaaagtactaattataaaaaattttcaaataagatggacgatcaaagttgagcgtggaaacttatggttgcatttaaaatgagacggaggaagtatgatgcatttgacttatagtaatgtatagtagggcatacatattgcaacgggtatagataactgtagaattcacatcttccttggtgttagtgtatagataactgtaaaattcagatcaatctaacattgtcatgacaagtgacgactataagaagcaaactttagtttttgctatgaaaactttttacactgcttcctagtgagaataggagaggatgcaatttagtgttggtaagaaaaaccatggtagtcataaaagatataatataatgtcataaacaagacaggtgtgggctggccgctataggctggccttctagttctagggctaatgggctattgcgtcaataactaatcaactatgttgtcagcccttaggtaaccacattgccttttcttaataaaaccgttcaatattttacttggaagtaaagatgatactacaaacacgactttgtttgagctttgtattccttttacccatacatcttttccttctcttttaagcatttatatttgtattcagaaatattttctggactagatagagtaccaaagatgttgttatacctaaaggctttctatggaacatgtgatttgaaaaaatgcaaaagaaaatgaaaaaaaaaatagaggattggagtgtcatatatggacaaatcctacataaatttgaaacatagtaacatactatgtttggatggttcatgggactatgaatttgatataatcataaaatgggtatgccaactcacaagttttttcctcatccatcccaaccacatttttctacctagacctatccttgggtatccctatattcatattcatattagactgagtttatttcaccattttcacaacttctattttctcgttttcatgcacatgattttcaagctgctaattttcaagctgctaaatgcagttattttttttgcaaaaaaagagagaaaagttggcttaagacatcgggcctgttcactttgatgccaaaaaaaaccttaccaaattttggcattaccattttggcaacttgccaaaattttagtaggatttcttatatagttactaaaatttggcagcaaactaaatgtagccactttttttaagtgaacaggcccatcatgccaatccattttaagttttttaagctaacaatacaccgttttgttttgcgtgctgtgggggagaggttcctaaccccattgtgcaacacaaccttatttggataggggatagataaaaaaaatatatccatttaaattttggatatagtgagggtattactcattttgtccattttatatgaacccatttgctatgtgtaaaatttagacctaaaatttttaaactaatgttcatattaaaaaaaactgattaaaattcgggagatgatttattatatagaggagcaactttgtataaattttgaaccatttctacatggtcaattattttattttattttttattctattttttaaaaattatatttctacttggactttatttttatatttaaaatttgtattgtctcttcacttacccattgatgagtaatactcaattatgggatggataaaattgagtatgaataagtgttaccctttatgcttccctggtggcagatcaataattatgcattttatcaaaaggaaaaaaataaattaacatatagcaaaagagaaaaaaaataatactattaatcaataacaaaaacttacttcctctgtcctattttaagtgcaaccatgaatttccgtgtccaactttgattgtctgttttattttattttttttgtgattagtatttttgtttttatgagatgataaaacatgaatagtactctttcatttccaaattgatcatcatataatggaattcaaaatttctcaaattgattatcatataaccgtatggatacagattttatcaaaatacaattaatgcaacatgggagaatatgtacatgctaaggtgtaattggtatagtgtttaatcgatgcatgtattataggagaatgtgtgcatggtgtcttgattgatgtgatttaaattatcattggtcttggtgtataaagatatatgatgatcattttaggaaggaggagtactttactcatgacttatagttttcatttttttaatttttttaaatacgatatatgattaaagttagatgtactccctccgtcaaaaaaaaagacaaaccctgggtttccgtgtccaacgtttgaccgtccgttacgcataaagtattaatcatgttttatcatctaacaacaataaaaatactaattataaaaaaattcatataaaacagacagttaaacgttggacacggaaaatcaaagtttatctttttttttattttacggagagagtagaaaactatggcgacacttaaaatgctgacggagggagtaagacagataccaaaataccaatatctcatattctcgggcatccttgcgtaattgtgcccaagaaaaaaagagcaaatcgtggcgtcgtgcagtgcggtgcgtcgaggatattttccccgcagaaatcctaaattcccccgtcccctctcggcgtcgactcctcgtgagtgacttcgcccgccgccgcctgcgccaccgccgatccccatccgtcccgccaccgcgagcgggcgagcagcggcgccgtcgtccgtccgccctgctgcttccgccgcatcgcatcccggtgagcatcccgtcctcttcctcattcatctctctctctctacccacccactttttttttcttctcgaatttgtattaaccctagcttctgttctagaaatttgcgttagactcagtactaataacagtttctttgctcccaaaatttttcgtgggttcgactgaacccccatgtggccatgtccgttgttagatccgccactgcgttatatcctcgtgtttttgattgggtggcttatcaaataataggtttctgaatgtattatacaaatatcttgtgcaacctacccttttatggttgttattgcctttatttaggtctttgctttgatactcttttagtagaaaaggcttgcgctaacctcgaatcagtattctgttactaatgcttttaggtctttgctttggtactcttttagtagaaaagggcttgcactaacctcgaatgaaaattcggttactaatgagtcggggcatcgcgacaaaacactaaacactgaaatgtaaaattagctctgtcctattctggtgtaaattagttaatcaaaatacacttctgttgtcatcctaaaccaactattcttaattctcagccatgacttcaatttcatgtttctcttgtgattggttggggctaaaatttgttcaatacagtttgttgctcaagggatgaatgccaacaatttactgtcactcattgatgtaggttccgttaacacacttttactatgtctaatggatgagactgcattaagtaatcgatataccctctaaatatgctatcctttcaatgtaattcgcacccgactacattaacctgctgacagtcacatgcaattgtctcttgctgagtgcatgtactgcatttgagtcccagtgactatttatgtgcttagagattaataaacttcttattatatggagcactaaagcatggcacatattttctagtaggtttattttatatccatccttatggcatgtctttttgtacccataggtactgttttaccaaggaaatatggacagatttgtataacattgcctaagctttgaatctactttgaaaccatggcccgaaaaggaagtcaaagtaaaagtgttctgaatcatgcttcacctaaccgacaaaatgcagctaattgtgaggtactaaatacaccagaaagtgatgtgatggatggtgaaaatcgaagttcacatgttcaaggtggttcaaatgtttctggagtaaactatggccagaaaacaaaaggtatcaagaagaataacagaagcaatggcatttcatcctctggcaaatcagatgacagagcctcaaaaaagcagtcagtggacaccaattatgatataggtaattcaggagaaaatgacaatgagttatcatccagcacttccaaagcaagaagagatagcaagagatcatcacggcgtggatgtggtaaaaactcatcgatagaacaaaccccaatgccagtttttgcagaaaaagttttggagaagaccaggtgcatagcttgcatggctgcatccatttttagggcttccgtgatgtatataatagaagaaagcaaattgctacttgagagaaataggccagcaatcacaactttcatggctattgtgcacaaggggcatgactatgtccgcagcaaaattaagtatacttatcctatttgtcgggcatggatgtttagtgctggaaagttgatattgctcttgttggcagtttggttcaactgcaacataaggggcttcgattctttgctacgcctagggacaaactcactccttacagtactttggtgcagtacactatcagtttttgcaatgattggactaaagaaaatgctaatattaatggtatgattcagctatccttttgccttttgagttgcctctgctgtgaatgtttactaggctatgttgcatgatgcaaccaagagatattattgttgtacagttcttgcctacagttcggtttttctccacaaaacaacataactatgatgaaataatgcaatgagtatagattaatgggcattaatagtgaaagtttgaattatgaaatggaaatagatgctcctgacatattttcgaaaacattcatcaattctattctctctgtgacccaggtaattgctgctgctgtagttgcctttgttggtcttggttttgctgttctggttatcgcagtggctgcagtggtgattttgtggctgtatggaagcttttggacaacaagcggcatcataattctcggaggtaatattctacagtttgtttactattagtcaagtatatccagcacttgagaatgtctaagaatgctgtaatatttcttgaatcacaggtgcttcctttttcctgaagcatgaacgttttgcattgcttgtcacctgcctatattcaatgtattgtgcaaaaaactatgttggatggcttgggttacttttgagcctgaacttatctttcatttcaagtgatgttcttgtgcaactcctaaagaacaatgtagacaataacaaatctgctggctcttcaaggaactctgagcaaaattcaggcaaatcaggcttctttggagaatttcgacaatcatcagcagataatacctcacagtccgagtatgctcaaccatcagatcggggccctggcgatccttcaactagtggagctgagaaagagttgacctctgaagatgaagtgtctcgtttactgaactgcactgatcactattcagcattaggcttccatcgttatgaaaatatagatgtatcattactcaagagagaatacaagaaaaaggtgatactataaacattaaccatcattgtgcaccagactgttcatgttctgcaaagttgtagtatgtaaagttatttgttaattaaatttaataatttcgcaggctatgttagtccaccctgataagaacatgggcaatgataaagctgctgatgcatttaaaaaacttcaaaatgcatacgaggtttgcatgtatttcttgttgagttaaccgcatatctgataaatatcctatatattaatgaggccccaattcaaaatacacaggttcttcttgattctttgaaacggaagacatatgatgatgagctaaggagggaggagcttttgaactacttcagacggtttcagagtgcttctcaaaaggtcttattagatattcctttttctgagtgttcatttgtgctttgctatattttttttcctaaatcttctttctttaaagtagttccaagcagcatgctgagaactatttgcaactgctgatagcccatgaactttggttggctcttatcggatgaaaactgtctagtttagctggactgaatcctcaatttttgttgtccaaatgattttgaagcgcatgtggaatagcttgcattgcataactaaagtaattatatatatatacatatctttaagtatcaaacaagaggatgagcctgcctgaggtcctgggtgaaactgaattggtctttgtctgattcatgttatagattaacagtttgtgttactggagcaggattcttgttatagctcaatggtagattcatatgcggcatttggcaattgtagttttggcagttgaaatggtgttatacttgcaatcttgtcaagcactgcatctgccaaaagcaaaattttggcttaccaccatcaaatgttttttttgttctgtagtcaattcactaaagatggtctgaaggaagtgtcagtatgcacacatggttttacttgtaccaatagtattttagtagtatgtgctgcaaagaaactgctcttttggattgggcatattcttcctggtttcctatcagttgctttaatctgtcctcttccttgtaactggttattcttctggttggcttgatattcttttcttatttgttttctctctaattgctagaaaggaggaagtggtatttttcgacaagggtttagcccttctgaaggtgttgatgaaggaccttatggtttatcaagaagaatagcctgcaagaaatgtggtgacttccacctgtggatttatacaggaagagctaaatcgcaagctagatggtgtcaggtattttcttttggcatgtggttgtttttacttttgataccatgcttcaaatctgttatgaaacttctgtgttttctgcaccataggactgcaatgattttcaccaagctaaagatggggatggatgggttgagcagtcttttcaaccagttctatttgggttgctgcacaaggtaatgtcaggttattcgagcccttgcccaatactgaaaattcagcttctttttgaactaagaagaattatttgtgtggtaactagcgatcaaaaatgtgctatgactgtcatgtaatgttgtttattgttatgcagcctgaattgcctcatgcatatgtttgtgctgaaagcatcattttcgatgtcaccgagtggttcacctgtcaggtaattcagatattcttcaatgaaatttctgattcgttcagttgcttgtttaatattgctccaacatggtggcttgttttgtacataagggccttatctattttattcttctaacaatgttcatgcaagacaatatacagcaagggttgcatgttgaatgctcatagctatgatctctggtctgtacggtatacaatacactatcatgtagttctgcgctttaaaacgtatacagatgctatgcaacatgagtactatatgcagtattgccgaaatgctaaattatttcatccactgaaagctttgttttaggtcattaaaactgtgagcagggacattaaggagaacaattattattgttttttaagactaacgattactaatatcaacttgaagatctggcaaaaagtagtactgggggggggggatttctctactctccatgtaaggcctttgtgttatggataggaaaacattacactattcacagtaacacacaaacacatagactggttgaggtgcccaatggagttatccaacaatgtgatgcaccgacaaattgtctctgcctattgagcagagagaaaatagagatttatgaattgatatgcaactgttctgttcttcagggaatgagatgccccgcgaacactcacaagccgagcttccatgtcaatgccagcttgttaaagcagaatagtggcaaggggagcacctcggcgcagaggggtggagggatccctaatggtgtaaacatggatggcggaatcgatgaagaggagttcttcgagtggttgcagaatgcactgcagtctggcatgtttgaatcgtttggcgcgcaaaacgagcccccttcccctggaagtggaagcaatgccaagggtagtaatagcagtagtaagaaaaagaagaagggcaagaagcaatggtaactgaagaaggtccgataatggcgattcttctttgtgagcagaaagaagtaaaacatatggtgtttgttcggtatagttatgcaggaaaacaccccaataataggggtcctagatgctcaaccatcctgactcgctttaaggcgatgccattcaaaatcatgattcatcttgctgtgatttttcatatggagaattagaaatcagaagagaagaaagggccatgtatgtggcaaagattgttggaatgtaaagcgcaaaatatgttgagcctacatgattgaattgtttggacaggtagcgcaagctacaatttccatacacttgtcatcagatatattacattgttgctgatgtctcgttgatacatagaaatctttctgcccttgctttacgattcaattgtgattttacccctactttttagggtttgtgatttgcccttgtttttctgaaataaagcagccgtctagccttggttttgatagaagtttggtgggtccggaatttcagatttaaacgaagatagaaaatgttattatcatttttgaatgaccattctacccttacccttggttcaatgaaagaaccaaatccccaatccctatcccgatttccactccaaaacccggcggtggcggcggctacgcgcggcagggaggagcggcggcggggccagctgccacggaatagcgcgcggcggagtcgggcgcgggcagggaggcgctgcggcggcagcgtcgcgcgtgcatggaggcgcggcgcggcggccggtggccccgcggtcagcgcgcggcggagaggagcggcggctccgtcagccagccagcgagcgagcagcgagcaggtagcttggcggcgggatggcgctgttaaaggatgtaggcaggcgcggcggcgacctcgggctggagcgcaggctagggacgcagggaggcacgacttgctgccggcgggctggcgctcctaacctcttgccggcgcagggacggaggcctagcgctattgaaaatacaggattaagagacataatggagtaaatcttgtgcatggtggaaatctgctgcaaatcccctgttttctttcccattttcctgtcttgtatctgcgagagatttgtttggtgaatggtgatttcttcctgtgatgaatcttgttggtgaatttttgcacccgatgcaagttctttgaaaatgctgcagaaatgatgttaaattcttccaaaatttgtcaaagtttggtcaaattcgaaatatatacgcattatatcaagaaaggagaggcaaatgtgtaagggtatacaagtccttctactgctaagttgacgctgttaagtgatgctaacagaataggggcaaaacagagcttcgtttgaaaaaagtgagggcaaaatcacaaaccctaaaaagttagggtaaaatcacaattgcaactcaaagtgaggataagaacacaattgcccctagaagaaatatgttactacctgcctaaagaactgagaatataaggtgaagcagcaatcgaatttcgcagttcattataacttgatatgagcatttggatgagtacaaccagtgtgtcttacacttccccttaattaactgcgggattaaggatgctaattacaagccacgtagtggagtacacaacagtagtagacagtagagtagttgattagtaaattaattgctcttgttgttgttggcgacgacgccatcgttgccggcgagcacgaggtacttgtccctccgcgtgagcgccgtgcaggtgtaccccagcgtctccgcgatccggcgctgcacctcgttggccacctccgggccgccgccgccgccggcgacggggtcgaggaagtgcacgacgtaggccggcgaggggttcatgaggaggaagaaggggtcgagcatcttccaccccccggccgtggtgccatggaacatggccacctccgagtgcagcgccacgggctgcacgtcggcgccgagctccgtgaagagcgggctgaagcgcagcaggaacggctcgcggcaggtggtcccctccgggcacaccaccaggccgccgccgccgccgccgcgccgggagcgggagaggtgggcctgcatggcggcgcggtcggcggcgcggtcgcgggtgaggcggaaggtgcggatcggggcgaggatctcggagaggcggctgatgctgtaggtggcggcggcgaggtcggcgcggccggcgacggcggagacatagagcgggtcgaggagggagcggtggttgcagacgaagaggtccaagaccgcggcggcccgcagcgtggaggcggcgatgcagcggcagtggatgccgagggcggcggcgatcggggcggcgagggagaaggggaggacgacgacgatgagggcgacgcggaggagggcgaggggcacggccagcggcagccacacgaacatggccagcgtcgccgacgtcgtcggccggaacgcgacgcggccgtcgtggaagatgaggggcttcgcgtatcgccggggatggaggggacgccatcgccgccgcgcccactccgacgccacgtacacctcctgcattcattaatgtttgccattctcacttgattaatctatcttgcatcttcctttctactctctccctaaaaaaaaaaaatcaacttctagagcttaaattttatcaaaaaaaacttgtacaatcttatctattctcagcatgtaaaatgaaaagttttattccttcgatactctttacctatctatcaccattactattttttcaataataaaaagtattttgttcatttttactctgcactaactttatatagggatgcgagggtttgattttatatgggatggagggagtacacaatgtgttcagtaccatcgcacaacacctcaacaccatgaatgcgtccgttttaacccacagtaaaagtatcgggatcaatagtaaatctttagcccgattaaaaaaaatgtaatctttatattaattatttgagcgtgtaaatatttttctaaaacacggaacaaactcagacgtacacaaaaacgcgcacactctatccctgtgagcatttttaaaaagactgagcgacattcttaagattgataaagtcatcgcgagcgtctctctatccctataatgaaaagaatattaattataaatgcgagcacgtgagctaagtctaggaattgaacccgaaagacagtttccaccacaaggaacccacgcagttacaaaattactaattagcgatcgactgcgtgtctggtcagtttccgatcatgccttttttttctatttttatacatacacgcataatttgtacatagaagtataaagtttatatgcgtatgtgtattttttatacatctaaaaagtatacacacaatttttctaaatatagaaaatttgtagatgtatatgtgaagtttatactttgtatacatacatataaatttagtatatatacatgtataaacttggtatatatacatgtacacagtttatacgtgtgtatacaaaagtacagtggtggagcaaagatgccatgaagcccagacaagtattagcgtttttcagtaatcaactaattttttgggacatcaaatgctatctacagccgagacgccagcgacagagcctaagcgaccgcccgacctgcccttgagttagctctaccactgcaaaagtatgtacaaacgtacaggggatgtaaggaggtgaggtgaccgtgctaggcgcgtggcaagccatccatcagcagcccctaactagttgagctacgctcatttcgtaagatgtaaatatacatgtacatgtatttattaatcacgtagtagtatatactattgtagataataaattttattctgtttgtgcacaagcatgggcgtgaatgagaaatccttacgaatttatggttgagaaagatgtgtagtaaagagtgatcgacaactggtagttaatcggtagattaattgaccgatgtcttaatcggttatgcagatttatttgatcggtacgaatattaatttgaccggtgtcttaatcggtcggtagattaattgaccagtgtcttattgttggtaaaactaattttatcaacactgcagctgatcatgcatactacctccctaaataaatttattttttatcaatctcacacgtatcaataggacaaaaaaaactaaaatagttctattttattaaatcacaatataattgtttcttattttatctagtttcaatgtatttactattcacttttacaaactctaatacaatgattgctaaaagtaaatttaatttggaataaactggaggagggtaaacacgatgttattttaggacagcggaagtaaatatgtaggatgcatgtcgggtgaataatacgatttgattcacctgaataaaacagtgctcttaattatatctgataagagtagtaatataaacgtgcaacgtacgtcgattcataacgaagtgatgcggagctactgtatgcacgggtcttttcttaatgatgatgttgatgtgaacagagacttataattaattgatgaaaaaaaaatcgatcagtgccatatatacgaaaatacggttcatatgaaaagaatggcaggggcattttagtctatatgaaaaatacttgaacaaagacatcctagatgtactgcgtactacataatgatatggtttaaactttgcaaaataatcattatatcacccaatttcatcctttgtaatgataaattttaatagggtattttttataatgacataaatccaattaaccttcttaaatatgcatggttatttacatactaccagtatgaacagttgaaaaccatttgaagatagccttaaaagaagcatttaattttaaagtggcatatatataggtactacaagacaagaggtgaataaactgtagctctgctgacaaaaattcagtaacatgccaattaccgttctgggccgtgtgtacgtaaactgagatttcaatgaaaaccggcattcataccttacccataactcgctatatacagtccggc

SEQ ID NO: 20872 - DNA, 25678 bp, Oryza sativa
  unsure (1)..(25678): unsure at all n locations
ataggcatgcaaatcaaattaaactctgtatcatatcactaactactactcccccgttttatattataagtcgtttatttttttcatagtcaaagttactaaatttatagaaaaaatataataatattttaaatataaaataaatatcaaaatatattcaatgttaaattatatgaaaataatttagtgttgtaaattgctaatttttttttctataaatttaattaaatcaaaagaatttttttaaaaaaaaatcaaaagacttgtaatgtgaagtcagggagttctggctttgatcatcaacactagatacggagtagtagctacgaagagatatgcatgcataacgctgacgtggagtaaagtagtttgcatgtgacgacacatgcatgcatgtagagtgaattaggaagtagatttttttccctcgagggacatcactcgttttgcgtacctatagttttaaaaaatacttttaagatagatcactatataatatatcttttcgtaaacatattagttaaaattcaacttatataatataaaacaaaaataacaaatttgactatgaattacgtgttcacttcgtagttaaatttattatttttgtttttatctatataagttgaatttgaattgaagtggcaaatcatatactgacctatcttactaaatttttttaaaaattttgatgactttttaagtgatatcccctttaaggattatttgagttttccgagtgaattactccactcctaccttgcaatagttttggaagagctgatggaacgagttcccgagtccggcgatgccgacgacggtgacctgtccatcaccgtcaccgtcgccggcgccgccgcgctccttcatcccgatcacctcctccatgtccagcctctgcatgacctcgccgtcggactccgcgaggccaaggtaataccccctgaacgccctcagctccggcgccacgacggcgtcgacggcgaggtactccttcaagaacggctccaccatctccctcggcatggagctcacgcacaccagccgccgccgccgcgccgccgcatcgaacacctcggcgctgacgtcctccaggaacagcttgggcatcaccgccctgcccacccggaaggacggcgacccgtccttctccttcctgactccggcgaagctgaccatgaccatgagcttggtggcccggtcatggccgagcaggagcagcacggggtagagcagcagcaggaggaggccgcggaagagccccccggcctccagcgcgacgagcatgaagtacgggaaggtcgacggcgacatcagcaggccgccctccaccttgcacaccgtcacgtccgccgccgccggcagctcgtccgacgacggcggccgcctgacgacgtgcggcggcggcggaggaggatgcgcatggaggacgaaggatttgagccgcctgacgatcttgttggagtggaagaggagggacttggtgaaggccttccacgacatggctgctacaactcgttcgatcgagcgcgaatattaaagcagcatgggcaaactctaattaacaactaattaagttagctagttgtattgggagctagtgttgcacctgtactaacattatatatagacggccgggcaggggcaccgcaggggagagggagaccagtgagagtaactatctctgcaattggcatgcttttggtcattgtgtttttatcaaatcaatcatatatttatgaaaagaataaaatgtatattactatatgaatctatttcatatagagattggtttcttctgtacggggaggattaaattttggatactcgtggcacgcttttcaaactgttaaatggtgcattttgtgcgaaaactttatatacgaaagttgctctaaaatatcatattaatctatttttcaaatttataataattaaaactcaattaattatatattattaccatatcgttttgcatgaaacacttaatttttatcttcatcttcatcctcagtagattcaaacaccaccgtactaccacgtatagaatcacactacaagctaccatgggtgggacccacgtgaataaaaaagggaaatagagattgatcactttctttgtgagcgcaatgatatctgacatgtgggttcagtatacttttccttaactgaaaccggatgctaccactagtgcctgtcactacgcttaattcaataaggagaattttgcaatgtatacagtcggctctatcaccttctttctcctatggaaccctttctaaatccaacaatgcacgtgctatataacatactcacatcctttgctccaaacaacatatagagtaaaaattcctaaggtttagaatactttaaattccttcgatcaggtcaacgaggagccctaaaatacattaatgtcaaggtaaaaaggtagagaagttaatagtgccaggtgtctgcaaatcatccaactaacaatatttaggttgcgttcgagagatgacgtacacataaagctagaaagtccctagcctttccacgcnnccaccacttttcttaaactattaaacgatatgtttttggtaaaaaaaatctatacaaagttgctttagaaagttcacattatctatttttaagtttaaaataattaatacttaattagtcatgtgttaatggcttactcgtttacgtttattttcattttatcattctgttttctctcaaacatagccttagacgccaaaattctttatcgggtaagttttcatctacatggaaggcaagtttacacctacatgaaaggcgtaatgatgtatgagagaaagagactcgattagtataggatatattgtaaagatgaaaactacctatatctagacgaatagctttgttgttcctttcctagctatatgcagcttaggtggaagttaggcacaattaagtcatcaataagatattatatattttagaggatcctgatctaacgcaacactgtatatttccaatatttttgagatatttttaatagacctgtttatgagtagctaggttagtacatcgacatttcactatatatgtcaaagtctgaaatgacatattggtttattagctgatgtctcacattttgttggaaagccccttccctgcacacagttagttgagccttagctacatggatcgatttccagctttaaagtgattaatacagtggtaaccatcaacacggaaggatggttaattaattggagcatacatgattaaattgccaagctggtggcaggcgtctatctatctagtacggagtactacgtgtccacttgtacagggctgtaattaattatatcagcgcttaatttcactctgttaattttccttgaaaaagtaaggttcactgttgcaataattactactcctaattagctgttcctacaacgacatgactttcgctaatttacatttggagtatatatactttggcgacacaaaacctcatgaggtttctggtagagtgatatgatatctcattggtggggtattgtatattaattattatcagcacgtctttgtatatagtcagcatcatgttggcgatgtacgtagctgattaacgatgaagatgcacacagattactcccacccaccgccgcgtttctctcactttaattaattgtagtatttgcaaaataaaaaagaagtgcaaaagagttgcattgctagctgtactattgataactacatgtacatttggctaggtaggatttatgtttgccatttacactgttataatattatcaatgctagctaatcatatgcatggaggcctgcagttgctccaaatttccattattcacaatatgcatgctatctagccatacaaaattcaacaagtccgaatgcatgcttgtcgttcccgccataaatattttatgcttaagataaaattgggtaaacttttaaaaattccgataatcaattttatatttaaataaatttgtaaaatctaataagtttataatattatgatagtacttttgaggcaaatacacatataccttttttaagctaagcatttgaaaatttactgatggtcaaaatttaaaaattttgatcgaatcttattctgagggttaattttttttgtatgtcctgccgtttcccccaaaacagagggcagcctgcgcactgttatatatatcaaatgctgaacatgcttgcaggctacagttcctccaaatttccattcacaaaaacagtctgcatgcatgcatgttgttctaggcgccatacaaaatgtcatcaacaggcttaatcaaaattcaaaagttatctccggtcattgacgcccaggataagatttgatcgcactttaaaatcccagtaatcaatttcatattagaaatgtttgaaaagtctaataggataatagtatttttcgagacagatacagcataccattttttaaattatgtatatgagagattttgttatttcaaaagtttgacaaaagagagtatggatgtgcttacatctaggggcgtaaagttttagcgtgtcacatcggatatactatacgggcatacatttaaagtattaaacgtagtctaataacaaaaaaaattacataatccacctataaaccgtgaaacggatttattaagcctaagtaattcgtcattagcaaatgtttactgtagcaccacattgtcaaaatcatggcgcaattaggcttgaaagattcgtctcgcaatttacacgcaatctgtgtaattagttattttttgtctatattttaatacgtcatgcatatatccaaacattcgatgtgacatagtgtaaatttttgtgaggggatctacacaaggcctatatacgcactggtgctaatttttcaggtatatagataaaattagagatggcggcttatgatatgatagatgaatgtgatttgcctcgatctgcatgggatgggcacaagggactgggtgttccaaccgatctgattggcacttgcagtattaattccatcgaccgaactaacactaggtttaagtagctacagagaaataatttaggtgaattaaatatattgttctggtctccagtagcaggtcaggccaccttttcgtcgagtgaaagtcacaggcttttagctgataataaattgggccacctttgataaccatccgaaaaactagtgttttaaaaaaaaaacccatcgcatgtgccaacatatggattatggcctatacatgttattttcatatttgatgatattttgcaactcacttgtctctaacatggcattttccatttttttctcaaataaatttcaatcatttttcgtcaagctttagtcgcgagaactgaaaaataaattcatcgatgtccaggtaatgctgcatatgcaccaatgtaaggatttcttttcccccaatgaatgtcaaattaattgaatgtactccctccgttttgaaacggaggaagtacattttaatttgcacacgtacttacacaagagtctctgaaaaaaacgtgatattaatttcaaataaatttatactattgtctagggcagaaactgaaaagagaggacaacaggaaggccacacatacttttcttgttacaggacacattgaagttgtattacaccggagcagcagaattgagacctaactacacgtggattttaaacatgacaaagtcagtcagaaaaataatcaataaaactcaccccttcccttaaaagaaaaagtcagtcaaggcaagcatcacccacgaaagagaaaaaactcaatccaatatttcccttcgccacaattttcttcttttttttttggcattgatatcgattaggctcatagtactgtaacttaagcaggcagtgcatgtcattggatgcaaatcagatggtacagattgcatgctgtactgtgcatagtactgtagcaaaatactgtagtgtgaagcactgtagctattactactgtagcgctcgctctgagccgttgatcgtaaaaatggatggccaaaattgtgtgcagttttatcttataattacaagtgtaactgagtgtaactgcacccgatctcaattctctaaggagtaacatgatatctttagggagaaattatatcctcacacggtgaacatgtcgatcatgtctgcacgtggataagcacgtaaccttaatcatgcaggcgtaaatgcaaattaggaacgcattaagagaaatgtttttgtattgtgtatgtattatctcgactcgatccatttctcaagttgtgataaaaattttccgatgcattcattgcaagcagcaaaaccacaatgacgaccaaaaaaaaaagatctgactggcgaacgaatttgcgatcatatgggaaatcaatgtcaaactacagttagttagtttcctttcatttatgcaaattaaacaggagagttagtttgcttatggtgaacagtgcctgtactaacaaacacgctgcaatggcataactgatgttagttaaaacataaccatagccttatggtgcacgagacgcctggaagaacatgacggtctctaggcacagcaaaatcaacagtacacacgaagatgacacctgaataacttgaccaaagtccaaaggtccactgcaagtactagaagtatcatcgtatcactgtataagaaaaaaaaaaaaaagcaacctccatcgacaccctactaaccactgatgcatcattgttttgaagtctctattggttgtgtcccggcatagtaatagattaatagacatgatttattgtttctaataagtacttgtataaagatacattgacgtgtgggtggacttaggtcatgtaggaacctgcgtgcttgcgtcgtggcgcttctggtctgaatcgatttacaggtggcgaaagaatggtggattggtggcctacagcttgaatatggctgctccactcgacggcttggacgcgaacacgtacaacccaagatccttctggttgatcactccccggtcgatccttgatttatagtacgtttcctgcaataaaatgtatatcttgtcagtgaggatcacctccaataaacagagttgggtgctgctgtttcacttgaaatatgtagactatagttgtctgcgtggattatgtatgtattatcatgcatatatgttgcttattggataaagacaagagcttacagatttaatttacctttaaattgagaataaactgcgggacaatgccttccttaaccaaagcgactgcacagccaccccaccctgctccagtaagacgtgctccgagtgctccgttgtctctacatacttttacaagctcttccaactcgggacagctgggcaatggaatatgtcagtatgctataactttttttctgaaagagaggactgttttcatgacatccgaagtgtcaatacgagttttaagtatcaatgtgtctgctcaggaacgatacccatcgtagttaaagtacactactaaaaatggtacctgcattcatataacacactgcagctatagtgactttcattcataagatcgcccagtttttgaagcatatcttccgcactgcagaaaaaagatagcaacagttagatctctcaatttagaaataaatgttcgtatacgggctgctaatcgtccatgacagctgtgaggataaatgtagtaagagaatagttgggaagaaacaaacaagaaaataaccagaatatgcatggtgactgcaattaatgaacgtacctgagttttgacaatacagtatctctgaaggcataaacccgccttgcttccgagtacacatgaaaggcacgctgaaagtaaacacacattagaaacttataaccaattggcatatcatcaaagggcacagtcaaacatattcctgagttacacaaaactaaagcgaacttcagcaaaaaataatgcaaaaaaaaaagtaccacgcaaaaacaaagagacatgtataatagaatgacaaaatatctttaaaaaacagattttccacagaagagttgttctactgagtaggactgcatcaaagggaaatcacctgaaataacttgaaatgctttgctgctcttagaacatccaaggaagtttgagagctctggaagatagatgtcaggctttgacctgtaattttctctatttcttctgttgtatatgattcttcatgtaatagtttctgcaaaattacacaataacacaatcagatgagtacatgataagacagaacaaaaagaactttccagcattacttttataaaaaaaattatatacacccaaacgctaattacaacatattgtaaccaagtgtcccatatgagtacaaaataatgaaacataacttgcctaacttgtaccgatcatctcttttctcgaataaatagatggaacgtacgtatatccttcatgagaggataatctaagttcctgataaaattttgtaccttcacggcaactccaggatcagaagaaccctcttttccagcaaaagagacacataacccctcaacatcagagagggtggtaacagaggagacagccttttttgtttccatccctagtttgatggcaagaacaatctgcaaaaatgcaaaacagcaatattaaatgaacaaatgaaaaagaaatatcattactttgttggtgatatagcagccagctcaaatccagttccaaagtaaaattttaaaattgccctagaagctgaataaacatgttaaggtcacttgcattgtgcagcagcacaacagaaaggaatctgggaacctttgaatattcttaaaatttcaattcaaaattaaagtcaatttacagctgccaagtcacacatgtgcaaaataaagatgtctgaaactagtgtttaaacatgttcagtccgaaataaatcacttactgcagccaggcgacattcaacaacacggttgttatagtttgttgcagctgtctctgctttcttggactctgccaggcaatgggcaatcacaaatgtaccgcctggaggtagttgcacatcagtggcatggattggattgaaatctatcaactcagcaaatccaggtttggccatgatagatatagcctgggaaaatataatgaaatgttaacagacaacagggtagttcaaaataaaaaggccaactaaaatatgttattcattatataaatagcattgcttgtacacacagtaataatatataaaaagttctgcaaaatttattgatggtcatcctgtcatgagttgattttgtaatcaatacttggaaccacgatggttttttgcacgtaagcatgattatattaacaaaaagtttcagaagaacacaaatagtcaaaggattatatgaacaataagcgatacaatttacgaagtagtatatttggatgtccatattacaaacatagtaatatctcgtccataagctaaccccaacaaatgacattttcctttagacagatgtactttgatttacatgacaggtggcataataataagttaaagtacaaaaagaactgagtattaccataatcagttagaaaactatgaactatttacctgatccatgcccccagattgtgttccaatgtggcgctcagattgacaggtgaattgtgcaacttctttctgcatgatttgaatggaaaaattagaaaaaaaaatctcttgaacttttctgaataatgaatgcaaaaaggaaactgaaattacagaagtttgaacttagactatgaggtgaacatgtcaggctccagtttaaacttagagccaccaggatcaattttatctctcaagtttgcactgttcaagttcttggtgtaccattttctataacaaatacatacccattatgtacaaaagagcagttcttttttccccaaattttatggtataaaatcacttcagcaaaactcaagattcatcattctatccatccatctcacccttatacagtgtttcagttgtttgcaatccttttcagaggagtttggtaggcttcatgcctcccatacgaattaaaaaattacttcactatcagtttaggcaattaatattattttgttttgtggacagtactggcaataagggagctatgtgaagataatggcaagggagttgttcgattcgtagcaagggatacctttgggaaatttttctcaagaactcccatgatagcaattgttgctgaacagacaaatgctgctgagcttgaaagtccagatcctacataagagtaacaacacgcaatcatgtcaaacttaacatgcttattatttggaagtgaaagaatcccaaaacaaaatatcaaaaatatacctgtaggaactgtgccatcaacaactacatcaaggccaacaggtccacccatatctatcccttttgacctacaatactcataaactcccttgtatctgcagatagagaattgaacagacaggatatgttcgttttctttttcttgtggccaatgaagtgtatgaaaaagtgaacaaatttcgctatttatgcaacattatacaatattataagaattaacttacccacacatgaaatagtggccccatttgtggttttttatgtcaatttcctgcatgaaaaatatttatcaacaaccaaatcaatatatcaaagaaataatcaaataactgaagctaagaaaaaacagcaacttcagacggatcatggcacaattccgaagccagagatagcattttccatttcatattattccaagtcaaatagaattaagaatgaagcaatagtactagtatatgaaaatccatttgcaactgcaacatgatggcccccatcgtttggcttattcggcatatttgaaaacgaaaaataatttataaataaaacttttatattagtgttcttagcgatttaaaagctaaggctgaaaaataaacttcaatgaaaaaacctcaaaatcaactccaaatttaagattaaaaattcaaattttggctgataaggctggatgaggctggatgcaatgcagtattaagcccccatcgaagggctgaatgggagtccacaaggaatgtttgcaatccatttgaaggccaccagcctaaaacaaaacaaaggggaagcatggacttccacaccattatctctgtgggccacaagcccgcggggacaacaaattaagctcacgggcagggcaacgaaactgtatcacgggcttcttgttatgataataaattaattaatggggtaataacgcaaccacccacccatcctaaaatagtaaggagattgtctctacctccaccgaaaaaaaatggaatccgatgcgctacagaaaactctctccctttttctctttagaatctcaactaaaaacattccccgcgataactgataaggacctacgttcttcaatcaatctcaaccaacgaacgaaaaagcaaaaaattaacaaaatccactcaaactgagcaggattaatctaggaacaggggcaaagcagagtagaatgctggcaaaattaaccttgtcggggtcggccgggtagacacagatggggtacttgtcgtcgacattggcgacgcgcacctccttcccctctgccctcctgatggcgacgatcatgtcctgccggatggccatgggcaacaccgagtacccctcgtagtcgatgtgctcccctatcagattcacccgccctgcacacacacacgcacacgcaatccatccttgtcagatcaaatcaaacgcatccaccgaaacctagagtggtacccatccatctatcaacctacccggagagcgggcgaagagcgcggggcgcgcggcgtagacggcgtggaacttgtcggcgaggcgggccaagcggaggcgcgcctcgtcgagcggagagccgtcgccgtagatcggctccagggaggagaacgtcgggacaacctccgcctccgccgccgcggcggcgcctcctcctccgggcacccgagccgccatcgctggtgctctctcgcctcctcctcttccgcttctcgcgctgtctagcgaatcagtcgtcgtcttcttcctcacgcctcgtctctatccgttacaagtcgtatcacactctatgtgattgcggggtggcaacttcgattgactactactaaccttaaccttaaccttaacctccctgggttatatagacgggggacgtgatgactcaccgtcgcagacaggtggtcccggacttatggctggcccacacgtcggtgaacgtgtagtttcggactcggaatggatagatgggaagtgggacccacttggcagtgagagagtgcagcgggcggttttgtggggcccaccggtcagtggcactggatgggcggtggggtggacacatggcgagggcgtgggccaactgccgattagttccactaactaattaattattatccgattatgggtgattggattttgcttatcggcgtcatcggtttatatcctatcggtatcaaaacgatttgccacagaacacgtaatacgattcggcgtccagataactttatttatcatcatcaaaagatcgtttagaattcgagtaagatttatcacgtcgttagaaatgtgggtccatatttgtgttctactagtagctctttagcttctcaattattctctctatttcacactataagtcgattgatttttttaaaattaaacttgcaatttgcagtaaaatataataatgtttttaataaaaataaatattacattaaaatatatttaaaattggatttaatataactaatttagtaccttagataatgttattttttataaatttagttaaacttaatactttaaaaaaaaacagacgggagtactaggagacacgtggactcggtagcaacccaacatggtgcgcatcgcgtcacggctgcgcgcatataggcacagtccactctccagtctccatagagggaggcaaattactacattatggtgtttagttatttaggtgtaaaattattaactatacagatacatatttatacatatttaaagtattaaacgtaaactaataacaaaacaaattacagatttcacctgtaaactgtgaaatgaatttattaagcctaattaatccgtcattagtaaatgtttactgtaacatcacattgtcaaattatggcataattaggcttaaaagattcgtctcacaatttacatgcaaactgtgcaattggttttttatatttaatgtctcgtgcatatgtataaacatttgatgtgatatttttgaccaaaaattttttatctaaacaaggccttagtcaaatcatattggtgcattatttaaaagtataaccagcgttcagtaactagtacggcatgtgtatcatcaagtcacaggcacctagcatgacttgtttttgttaatcccaccttccgtcagcttcaagcttaagcagctaagctgcactttccgtcgagatacggacctaagttttgttatcatactagtattatacaatcgctatttttaaatagatatattttaaaataacatttaaccattcatactattttaaataaaaatatgtaattatagtaaggtataaatcatatttaaagtttctttaatgataatacatgttataaaaaataaatattatttatataattttttaaatagaataaatagtcgaacataacatcaaaagttaatagcattatctatttacatctagctaagcaagttgcaatgtgtactatacagtcatcatgcgtacccctcagaatctttttgggacgaagagagtatatccgatcatctgctttcccgcgtcactaagtttctctagcttcaagtagagtgaatctagcagctgaaactataccaaacatgtcctaacactggatgggtcaaacatagaatatcaaacatagaatatagtacataattgaaaaagtttgaacttcctattcaaacgcatggaagaagtttgaggctttgagccgcatgtgtacaagctcattcgtgaacacaaaataaacgcatacgagacaatgttcacaaaaaccgctataacttacattgtttttttcttttcacttttcttttgttaccagatagctaattctgctggcaaattgtttttacttcctcacaattgacaaccgcgaaccacattacaggacagagatgcaggcgtgcatcatatgaacagaaaacacatcagcgagaaacactacaagatcatcgagtcagatacaaagatgctccattccattgctaatcctgaatagttttacgattgatataccataaacttattaatattgccgcctttcttcttctgcaatagctaccaaatccagctcaaggatctcactcgcatttttgggctcttgtgatctcccatactggaagaaatttctcgccttcaatatacgcttcaatccgctggctggtatttgcaatagcgaccgtaaaattctcattctgaagagtatagagatacattgctcgttcatcctggtaattcatcaccgggaatttttaataagaataggaacagaaacttagcaggcatagacaagtctagtaaagaaaaaaagaggctgatgctacatgatgcacaaaattacaggattagctataccgttttcgtgtgccgaaacatgtaagtatcaggacttgctacctatgagttcgcaggaatgagaccaatagtgactaagctgagactttggcagtgaaccaggtaagtttatatgcaaaaactatcaccacagaattgttccgtaaaatatcccaggcagtggcaagtgatgcgtattgaaaaggtgttctcgattattaggtacatgtgtaagaattttgttggttaatacctcagggagttccatatattcatcaggagatatttgaaggaactctacggctgtttgcccaatgcaccaggcaaaaaccttttcactgtcatctgcaatggtcaagtgaagctgaaagccatgtgtacatccactgatatggcatgcgcacttacagaaggaacactgaagtccgcctgattgatcactcacaacacacccacaaagattgtggaataataataccttcaaactgttgacatcgatgtggtcaagtcgaacatggcatatctgtttattaagatatcaaacacaatcaggatattaggaacgacaacacaaatgaagaatgcaaagttcttaaaacaaacaaaataggtaccagaaaatactttctaaaatgtcactgataactctgcgattccatctaaaagaactaaaatgtaaatgcttcagaagatgtcacaataataatgaagacttacatgtgttctattagttgaatggggaagatctgacaagagtgacaaattatgcaggcatgttgaattaagaagcgctggcagcaagcttatgttaacaaatagagaccctggttccttttcagtccacgcgacttcaagcctgtcacaccaaatagtccaccaaccagaatttttcaccatcaagcaattattgcgacatttaaattgtgagcatatgaaattaaaaggaatatagtgcttacttgtttgttgaactcaaggtacaagtcaaaccagacatgtacaccatatgaccaacacctaccctgcctagcgacctgcataaatatatctataaatggatcgaattgaagtatagtagaggcagatgagctggcataggaaatgacaattttgtaaaaaaaaaaaaggtaaccttatctgaagaacactaaacaaaaatgatcgaatttagaacactgaagagtcaatgccacacttttaaatggaccttaatctttaagaattcattacccacaggctgtcaggcagaacatggcatcaacataaaaaaaccagtgaacataacatcaaatctttgtataagaccatgcagacttgcatacagtgtacaatttaggtacctcatgaattttctaatcagaattcatcagttcatataacaacagctccaatcagaaaaaaaaaagatatggtatagacttcagaacatcgcgcgttcacaggaaatagataaagaggatgcacttggtttttcttatggcaggatgcaattgatttggtgcaatataaaatgaatatcaaaggctcagcattgatttgataacagaaacagaaaatgacaaaacaatcagttcttagatggaagaaacttgatgaattcctatttcaatgatatcctgctcagtgcaaaagcaaattggatatttatttgccaggctccaaactgtttgaaacttagtacgttgaccagctttctatatttaaacctagcacacattaactcatccaaactaccaaagcatatatgccaggatattgcaaatttgacactcaacactatgatcagtacaagaagaattttggtttgtatttcaagtcaaataatcccggtgatattttaagtcaaataagcaaatcattttcagacaaaatagggaatagacagtgggaaaactagatcattgcataagtacaaaaactgataccagagtccaatgaagttaagcttcatcaggacaactcctgttgcatcttctatctccaaataaaagtaagtgcctgatgtacttgctttgcaaacacttgttaccatgccaaacagactaactccaaccattttatcatgaagatcacttacgtatacctaaaaattagacatgttatagaagcacacagcaatgaatatatcacgggaactttactgcatgcatgataattgataaatacttttatatggtataaaagttgcattagactaaaaacaaacatgatccacagaccacggggcaagaaagacagcatgtgtgtgtgtgtgtgtatagctactatatggcaccttaaggtgctacctattaaacggcacctgacacagtgatttagacccaccaactgcgcacacccccaccccccatcctgaacccacctatgttgacgtaatagttaaattctgactaccatccacgtgtcttttttaccgtgtgtagtcttttctgcacctatgcttcattgtacactcatcagagtggagtaaaaaaattactactgacttttacctaaggaaatagattattctacgtgttggtgaatttttaccatccatacagggactaattgtactactgcactgcaaccttttgtttgtccctgaaaatgctaatagcaaaaacgaaaaatacaaaatactgcaacataaaatgaaaactgcagttaagtaaaaatataactaaaggatattggtacctaaaaatacaattaatagaaaaaaagaaaaatacaatactgcaacattcagttaagtaaaaatttaactatagaaaatacagttaacagaaagaaaatgaaaacacagttaagtaaaaatataactgaaggatgttggtgctagtttctgataactctagtacttgatagtaattttttcactaagttgatttgatggtgtgggacccatgggaaagtgacacatggtgagaggcagttatttttttactgtggttgagaaagagaacgggaaggtcgatcgggtggtgagaacggcaaaagaggaagcgaaggcgctgaactggaggcttgaggcccgagggcgctacctattcgatggcgcgctacgcactacgtagcatgaccgtgtatatatatatatatatatatatatatatatatatatatatatatatatatatatatatatatatatttcaatgatttccctttatttcaaggaatcaagaatttcaaatgctgctataatagtagatgatcatgaaaaagatgaaaacaacaaaatgatacgggaagcatgaaacatagatacttctgaaaacatatttctaccaagtaaaacagcagaccacacatatgtttatgttactagatatattacacctgcattactaagaagcccatggaatgagagcacaagatgcacttaaacaatattaccgcaaattatatactaataaattactacacatattagtcagtaataagggatcgagtgctagttttcagatgattcattcagcacgttaagataaacacaatagtattgctttgttgataatgaagatctgaacaatataactcgatgcagattaaaccatgaatagaatcagtcgttatatgctaaaccaataaaccttcagttcccaagcaagtaagcaacataataattggtacgtttatctgtaaaaataaactcagaaaaatgaagttcaggttacttactcgaaatggatatttgctgaaatcaactgaaccatgcaaatcacgtggtaatgttacttgtgaagccatatgatcacttggaacacatgacaatcgagacccttgactccttatttgagtaggtgtaagaagtacctagcacacaatcatttccatcttggtcaaaaggagtagtgcaaaaagatgtagcaccaagatattcataccaacctgttcctcctgctgagcaataggcaccaaataaacctgtgtagcactgccatattcaaggcaaagttcctgagactcctcatgattattgtgcacataatttgcaataaaaggtctgtgcagtgcaagcatgctccctacgctaaaatagaaagtttagtttacaataacttgaatgagacatttggtacttatattgagtggaataaacctgaaaagatttgcaagcaaaacctgctccccccataaaacaaattttatttttgcatcatcattgtcaacaagtacaatctgctttctttctgtagatccaaatggttctaaagactcgatcttttcgatcctacagggcaaagaaatagcagtgttacaaatcgttcaaggtcaagtgatttggttcattctattcaacttatattctcaactggatagataagctcttcttcttctttttaccagaaatcatagtgttggtaactgaatgtgttgtgctaatatagccacagcagtacacatagggtgtgttcagagggcatttttgcagcagcagctgcggcggcagaagttcaaaattgctgcggcttgaagagactatgtacagcagcagctgcagcagcgatagctgccgaacagggcgaatgtaaaaaatgtcaccattaaaaactaaaaagtacaatatatctaatatacctggcataaaacgaataggaaatattgtttctgttctcatctagcatcatagatgagaaagaatacatgcaaaactgtgcggcaagtaacatggcatcttcatcttcctcctgtataaattaaacatgagtcgaaactaaatagtgtgtgatatagtacgagaaaaaaaattgaaccagttgcatctagcactccacagcacaaatgcaaaattttaacttctactagcagcttaatactagtattgaatccttataagaagcaagaagttagcagctagtttactgagggctgagtaaagaacaatgaaattgtttagtgtttagaagatatttttgtaatctattatcactgtgaacgatgaagaaccatgagggatgaaagtgaattaaaagaaaaaagaaaattgacccaagaaatgacaagctgaaaacaaaaaacatgttgtgaactccacttccttataaacctaaatgtgtttcttaggtacctcatcaagtaacatcaccatatattctgttggcaaaatacgagcatggcctgatccctccatagctgtacgtaggcaacatcccgtgagcataacttctcgacccttcttcaagacatcatgctgtccaatgtagttgtagtacctaacatgaaaatttagagtcagtccagtaacaattttaccttcattcactgatggatttctaatgcattattaagtagcattatctaagcaataaatagtcatactcagatctaccttcggtgtagatatagatcgatagtcgatgtgctccacatgtctcccaaggtaagcatgtatatgtttgtacctacaagacagtttaggaggtaatcgaagaaaatgcaagttagcagccatatataaagtgcaagttcaagcgattaattttatcagtacatttattcaaggatcatgttggaaaaaatgataatccaatgatcaaggatattcataagatttaacttgtgcccttgttgaggaaaaatgacatagagaactaataggcattctgtttactactaaacatccctgcagaggacaaatattctgatacaatataaaaatagcttgtaacaccactcataatcttaatgaaatttggctggcccaggctaaaaaatataaaaatagctaacagatatagtttctttgtttgatagaagcaaagtataagcataccaggaatgacaaacacatcaatgacaacagcttcaaggacactcttaggagataggaagttcttctcatggatagaatcgattgtgatggtattaggaagccgccttcttctatttcttgtttttagaagattggtcaattcaactttcctctttgcggtcagagacttgctttgttctgtccaagactagcaaaagcagaaaatatttaaaggctaatccacatgtccaatgcgaaaagaaatggtgaaaaaaaatgcaatcatggatttgaaatgggtttgcatttgttagtctgtacacaagcaagaagcatggattgccaaattgtgttatccttggaaaaataatataagccacttgcttgagcggtgccagaatctatggggggtgattagtgaataattgcttatgtatgcccttttctgtttcgatatagagatcacattggttcgacattcttcgatatatccggaatcgcattcagaacaaatttgattctaacaacgagcacaaggcacaaatagaaactgtaacagcttggagaaagagttgcatcctcgagatgtagtttgaattcaagtaaaaatgtctaacctggaagaggtcggagagcaggatggcggcggtgacgccgctggaataagcgcagcacgacttgagcacttgcgccaccgcccacccccacggcggccgcgcaggcgctggcccggcgccgggggactcgtcgccgtttcccccggaggaggaggaggagagcatggagatggcgtagtcgacgaactcgaggaacgcgcccccatcggcggaggcggcggcagaatccatggaaccctagacaggaggaaggcgggggagacggcgaaggcgaaggagacgggcgcgaaaaagaaaaaaaaaaacgagatggagaggagagtgaaggaaggagcgcgggaaaagagagatcacggatacgcgcgcggaagatactgctgctattttacagcgagtttttgggtcttgcaacgttggacaccgaaatcaacgtcttaaaaacaaaaacaaaacaagaacagaaagtacgaaataattcggagcagtttcttataaccgtgtaatattcacaagcacaaaacttaattctctctctcagtattttttaagctaggttttcctacctacaaaaacccatggtccgtaattacaatcattttgtttttgtttgagataaatataaaattttaaaccatttcaattcaggtcctgtttggcacagttctagatctcaaatccgcagtaaatttgaagtttctatattgaattatagtggctcaaaactttaaatttcatacaaaatgagaataaaatgatttatcctaatgttatcaatgtaatctatggatttgtggagcaagaaaaaaatcttggatccagaactgtgtcaaaaaaggcctcaatttacggactccaaatccagtgtgaatctgctaaacagagccaacccatctatgcctcctcttgtttcaagttatccaagtctcaacttaaaaaattcaagccgaagaggactgaaactaaggcagtcacctatgcatatgattatgagtgaaatgcaccactaataccacaacctgtaaggtgggtgcaatttagtcatccatcttataaaatgctcaaacaagtcactcatcatgttttaggggtgcaaataatataaaacatgcgtcttgtgggttgttcgcaatgaaattatgtgctatgttaatttattttgtaaacatggtcacacgattcataaataagccaacatgcaatactaccaatagtaaaatccaattaaaaataaattttgttattgactgccaagcacaatatggtcgtgtatatacatgaaaaatatgagcgttaatttgtaattttaacgcttgccctgcccacatggctaaaaaatgcatgatgttaggacaatacgatctccaatttgaaaacaaataatccatgtgacaatgtatttggtaagatttacaccattgaaacaagatgagtgacttaattgagcaatttgctagatgagtgactaaactgcactcacctcgcaagttgtgataccaacggtatattttactctatgattattatcaagtagtacaaataatcactaaactaatgatcccagaaactgtccagtggataatcaagtagagatcagcagttttgtatgctgcagaatgtggtgtcgatatccgctcagaaaaaagaaaaagcaaatgtggtgtggatagacaaaccttttttcctcaatacaaaagaaactagcttatgtaaacgagaacaaatgaatcaattaaaaaatacatgataatccttaataaagctccctcaactctaggcaaagttccagcttcaggaatatgcacatttatccgattcgtttgaggggaaaactgacaatttagaaggtagtcagttttatgtgcaaaagccaaagggaaaaaagaaaaaaaaactgctgcaggaggttgtgggctgttcacaatggtatggttgatgaaaccatcagagtagcgattgttgcccacagaaactgatcattcatggtaggattagctcataatcaatgatctaaagcacatctgatggatagagattgcccttgtgaatgacctttagctaattggtcataatttatgaataagacgatgacagtgatatcgtcatggaaatgcctgcgaaccttcttgtcaatcttcataaggtctgaataacgcatctcacgtttccgtgctgcttcatggagagctgcctttatgagccttcttgcacttccctaaatttaaaaaagtgttaccatcaaatagaataaattattatcctattttaagtcgttaggcaacaaccatgaaaataattaccatgctagtaggttgaagcgcatactgaaccaaattttctacagttattactagtacaagaaaaccagtgtatcaaattgtcaacagcaccaattatcttaatactagctaggttagggcatagcaggaaatgcaagcatgtgaatcatcaggagcaaccatatagaaaacaaatatatagccaggaagacaagtaatagactgcagtcattacactgcagcaagtaatatgtccccagtacttatcagaaaactggagctccttacatataagcagtaacaattcattattggtatggacctacaataaccctgtccagtatacatcatcagacaatggttatcatgaccagactgttcctgccagcagcccagcactacaggagagcaatgatccattgagaatggtatttttggcccattgctgatacagtcacaagtcacgacacatgattaaataaatggaaaagatcacagtaataggatgatcctattcctaactgcaaagcattcaaggaaacagccggcgatgtcaatatttttttccagcttgcaggttgtaacccagtggataactgtggacactggacatggattgcatgatagtaaatacttgcatccaaagccgcacccatcaccaaacaaaataactgaaaatttcacggcgcatggcaactagattttatgcagactatgctcatttagttaatcaccaatcaagtatatcagcttaatactttctgaatttgttgttttagaggatacacatagcacccaataagtgtctagtctaaatattgcaatgcttggacaatgctacccaaaatactaatgtctagatgcaaaacagaacttgaattatactgtcaccctgtggaacaaaactagcaatacagaggttcaagatctgaaactttaatgcatacatttgattgtaaatattatagcaaaatacatcaaggcattatttccaggtgaaataaggttccaaggttcaccgttcatgtcctgaagccttaacaaaaaattcagtgggaaaaactccggtcataaaatattgcaaattgtttaagatcacttgggccttgctcgtttaatcctcaagaggagggaattggagagtattgaggggcaataattccacaccacaatatgtgtggaataaattccctccaaatccccctcaatccccttgtgagagggattaactgaacaagcccttaggcaacagcagagaccagaatgtgaagcagtagataaacaagttaaatgtgcagaatcttacagctcgttgatggttgtgcacaatctcaacagcctgctgattactcaggtgttcccacaaaccatcggaggcaaatatgatgaagcaatcacttggttgaaggcaacgtgcgatgatagatgggttggcactcaatataggcctgctgaatggttcagggagcctgaactttggtttgatctgttccgtgttatactgactatgctttagatatgcatcgcctaatgatctggacacctgcattgcccaatacatttactgagaagtgaaaaatatatatattacagatacaatatcctgtttcagcaacaggaaactgaacaatgcgataaaaaccaacctgtatgatgcccttgactctccaaaccccatgtttaagagcaacaatctgaggatcatctgggtgctgagccatgagctcctgcctgacatcctcttcattggcgttatgctcactggacagttgctcggcggtaatctgaccagcgcgaccaaccttcttcccaagaacggccctggaatccccgaggttggcgacgaagagcgtcctctggtgcacgactccgacgaggcagcacgtcccgacggtggccatgtccggctgcgcctcccacatccgcgagacgaccgcgaggaagccttcctccgtggccaggaacgcgtccctgatggcgtcggccgtgacgccctccggcccggacgcggcctctgcacggatcaaccctaagtcgcgcgtttccggcggggcggcggcgggtaggaagggcgagggggggcggtgctcacctcggaggttggggaggaggtggtcgcaggcgaagcgggcggcgtcggggccggcgtggccgtcgaagacgccgatgcaggtggcggcgaggggcggcgggcccgactcgacgcggcactggtcctcgagcacgtggttcccctgcacgacggcgacggacagctccccggcgtggcaccgcgcgaggtcccgccaccacagcaggccatccctgccctcagcagcggcctggtccgccgcggccgccgccgacgaagacgacgacgaccgcgcgggcggcgccggtgacgtgggccagaccccgccgcacgcggagagcatcctaaggagcgcg

SEQ ID NO: 20873 - DNA, 69964 bp, Oryza sativa
  unsure (1)..(69964): unsure at all n locations
gtgtgcgatgcgagtcgagtgcgacgcggaggtcgcaatcggtgtacgagaagggggaaaaaaatagaaaaaaaggaaaaggtgaggtctcgggtcgggttcggtgcgacgcggtgtttgtgcgcgcctgcctgctgctgactcctccgctccgctcttgagggaattggacggccgtcgtttttcttttttttttccttttttttttgtcgatgagtagtgtaaagtattgggagtggcctccacccgtatatgatacgatgatggcggggtcagcgtattgtacgtcgttgtacctatgcgctcacctgtctcttctgcagctcattaacaaattgtgatcttatttttattttagcattggcttctgtcgacatctggaatttattttagatattaggtccatcttttttctactcttgaataggatagtatgctgacagagttttagttcgtccccttctagatacaaaatcggaattcttatcattcaaagataagaaacagaaaaggtgatgcatatcgtttatctgatgaacttacgcacgttcctataaaaaaacaaattgtatgcataaaaatacaattagtattgcttgatatctttatttatttagtgagtgaattacactttaggcatgtcgaaattttactttagactacctttatatcatttttttctttttgtcagtttttagttgtttagccttcctcgcagcaaaaatatttgccttcgcatagatggagaagttcggcagtatgccgaagccaatatgcttacaatcattgatgtgcagtgaaaaaatgttcgcggtagcaataacaaaaatatctgatccaaagaaaaatattggtaaaatggtggtccaaaataaaatgttaccagcaaaagatgacctacattccaattcactcttacttatttaaacttttattatggattattgttgcatgcttacactagggtgaatttgagagaagaggaaaatagaaatttgagaagatatgcaagacgaaatagagtataaactattttaaacttaaaaaatggattaatatgattttttaagcaactttcgtatataaattttttttaaaaaatacacggtttagtagttcgagaagcgtgcgcgcagaaaataagacaaactttctcacaatctacttgggccgtacgctgctaagataatttgtgattgatgtcatagtagtagagaaaaccattaacatatgtcgcatgtgcactgaaattaatattaggtgcaagtaattccattctcgacatgaacaaactgtaatatataaagtgttatgttgatcgttgttgatgtttaaccatgctttgctatgacactaatcattttattccactaaaatttcatttcaattttcaaattattatatctaatcgacatgctatttagcctccttcaaaattcacagattacaaaatttgtattaagttcaattccatctgaaaatacaaagacccttcacgccctcgcacgaatctcaaagccgaagaagggtaacataccaacccacacactgccccgccgttcccagatcttctcctccgttggattgcgcacggcagaagggaatttctagggtttaggcagcgagcgtggtgggagcgatggctgcggcgggcgacgagtcggcggctgccgctgcggctgcggcggcggcggcgggcggtgccgccgcgggggaggcggcggttgactccaaggacctgcagcagcagagcaaggcgctggacaagctcaccgaccgcgtcgaggaccgccagctcgattcctcccgcgtccaatccgtacgtttggttcatctccaacctcaatcccttctagattactcatattagcggcctcatcagcgtggaacatgtatagattgattgtcaatccgttcagtggcaagcaacggagtgaagagcagagctggataatttagatgtttggtagactcatgatggttcactaatgtctattggtagactcacctcgtaatagccttgcctagaggaatttcgtgcattttattttttaggtccttgtatttcagttgtcacctaagtattgatccaataattacacatttcacgtgcatctttaacctgagtaagaacagtgtggcattttcagtacaaaagcctctaatcccgtgtcattgctattgtcttcatgcacctactacaagcactgccatcatcacaagacgccaaactgtagcctgtagagcgatgagcttaagacttcaaattctgtttgtgtagaaaagatcctgtaatttgtccatccctgttacagggtatgttctgcacataaaaatcaagacacacggcagatgatcttgaggccagaatgatgaaatcctttttgcacggtggtgtgtgtgagcctgatttttttttcaagttcttggtgggtgataatgttagatagattaatgggtattttgcaggacaaatcaggctgatttgtttttttcatggtttttagctataatttagtcatgcttggcttaaacatgagcttattttgaatctgactattttattggaatgccaataattttccagatataaaggtcctcataaatttctaattatggtatcagtaatccgtgtttagcccttgacacatgatctgcttacaaatatttaagggattatgttgacaccaacttgccaattaagaaaggtgtttgtgcttaatcgtctctttcttttgcaggctatggcagctcttgcttcttccaaagaagctgattggaatgccatgagattgaggtcagtgtacaaaacacccattatttctccattctgacgattaatacattccctaggaattacctattcctctaagcaggttttatggtgattgcagtttttttcctgagtagatgatgttaggttgccctttattatggtgaaaatatactattaagacttaatgtaagctaaacgactagaaactgtgtgtggaggaaagcaaacatgaagtttaatttgaacagtagctttgcttgccaaaaattttagcttcatctaaaagcgttatgataaagccctggggaaggaaaaccagacgacttgcaccagttgcagtcttgatacctcaatggggtagtcttttaacctgatgaaagaacaagcaaacgaaaaaaagaatcccaaacagtataagcgcaacaagaaggaacaactcatgcatgttctaagtggatatctcccttttatttcttgcaaatcttttgatttagcctgattctgcatgatagtatgatgctatttcttcaagttatataaaccctcttgtgaaatgaaggcgatgcccttgaataggtttgtgagctttctcatcattggataaatgggctgaccctggtttactgaaaacatagtttgcatgtcgtatacggtatattgttattagttacatgtgggaatgtctttgctcttcaccagggaaaaagaattagctgccatcaagatcaaccctgctgatgttgaaattatcgctaacgagcttgaggtgaccaccttaaatcctcatcagatgattgttttataatgttttcaaatcctgttctaatatatatttgaacacacagttggacaagaagattgcagagagaacactacgggagcacaaaggcgatgctgtagctgcagtccggttcttgcttcgctgattcttacacattttgcaagatctatacaccatatgaagcagctgtagtttgctattgcttgctgctgagaggaatttctgtatccacaatgaaacgatcatatttggcatctatgtagaactttttttccatgatgttgcaaactggtctctgttgtcttcttgtaaaacttggttcactcaggagtttattgccgtttatccaaggtctttctataccttctcaagatgttctgattttttttggatatcctaagctctggttctgaatgactggaatgaccatagagcaaaagaatagctgatagattatccaagatgaagagaagatgacatttaattgtttcgtacttgtatgcttttattacaacaaaggtgaagtgccttcaaaggtaagaaacattcatctgtaccacatgccaaattgtatccatttgattgccctgcatcattggcacctgcctgtttgctaccacattgttgtgtactgacagcttcttgagtttggggctgcaactttgcaattcaatttctggaagactgtctgaaacgaagcattgagatatccaattctctatactctttgtattgcctagttgtcttctgtggaaatttgtgagttaactcatactcccttcgtttcgaaatgtttgacgccgttgactttttaatacatgtttgaccattcgtcttattcaaaaaatttaagtaattattaattatttttctatcatttgattcattgttaaatatatttttatgtaggcatataattttacatatttcacaaaagtttttgaataaaacgaacggtcaaacatgtgctaaaaagtcaacggtgtcaaatatttcgaaatggagggagtatataagtttagagagctgtttacgctcatctcggagagatcacctgatcaacaaatacttacgttgctctgacagttcaattttatcaagatgaccttaactcgaatttctgattaagattctttcctgacatgcgggcccaactcatggaccccttggcccttgtgcagcgagaccttcaccggccgtacgtggagggggataactccacgggagcatccacgtggcacgaggcttctgcctcccctgaccaaaaacacgtcgctttatacacgcgtcgccctcctattggccacgctcccgtatcccagtgcactattggacagcggccgtgggccatgccatcccacgtgtacacgcgcggctcgtcactccccgtgggccaggtttgtcagtgaaacatcctcccgtgcgggtaaccacaccgctccgccctttattaagcgcggtgcatttcgcgctcgctacccatctcattttctcaggtggttttctggttcagtggagaaaaaaaaaggttagaattagacttctttggaaggttctagaggtttctagataccgccgtcccggggggtgatggcgatccccagaaggtcggcggccgccgtcgctgccgtggtggcgctcgcgtccgtggccgctgtcgccggcgaggtcttcttccaggagaagttcgacggtgagtcgccggatctaacaacctgtgtcgtcgtgtaatgtggatccagtagactggtaatgcgtttgaatttttttcgttggttcgttggatgatgacgttgatctggtcagtttcttagcctgttcatgatgcatgatcccgttgtttccgtggaattcatcagtggcatttgcgacgaagcgagtctgaggaattctggagttcatgtgccatctcgtaaccgttactgttttggcctcgcgatccacagctttaggatgttcccgtttgcggtttcaaaaaaaagatgttcccgtttgcgtggcgcaccgtttttgcttcgcatgaatggatccatttagttttttttttttaacggaaggatccatttagtttcagtagtctcagtagcgatcgcgtgctttctacgcgttcatttctcagatctccggagaattcgaagggaaaataggatttcctttcgtgaaaaattaaggccggggttcagggtttattacttgattttttgagagattatttttttcctcttttccctgatcctgttggtggatatgtagaatattaaaattggttggtttctgaattctgaattgtgtgtgaaaacagatggatgggaggatcggtgggtcaaatctgagtggaagaaggatgacaacagggccggcgaatggaaccacacctccggcaagtggtacggcgacgccgacgacaagggtgaggatcgatgcacacaccacgctgctgatttcgttttttcttctttttttttttctgttcaggcatgtgcgaagttactctgcttctctgtgcaggtatccagacgtcagaggactacagattctacgccatttcggccaagtaccctgagttcagcagcaaggacaagaccctcgtgctgcagttctcggtgaagcacgagcagaagctcgactgcggcggcggctacgtgaaattgctcggtggcgacgttgaccagaagaagtttggtggcgagacgccgtacaggtgatggtttaatttgatcacttcgcattcccctctgtgtgctcatttcagagcgcaacatctttgattgatcagtttcttttgaaattgcagcatcatgtttggaccagatatctgcgggtatgccaccaagaaggttcacgctatccttacaaagaacggcaagaaccatctaatcaagaaggacgtgccatgcaagaccgatcaactgacgcacgtctacaccttgatcatccgtcctgacgccaaatacagcattctgatcgataacactgagaagcaaactggaagcatctatgatgattggaacattattcctccaaagaataagagggatcctgaagccaagaaggtaacttagagataattcactggttgttctgacttctgaataggctgtctatgctcttctatttttacagaggtcataacttatatggtaatatgttactgtttgcagccagaagactgggacgacaatgaatacattcctgatcctgaggacaagaagcctgaggttgctttcctttgtttgtgcaactttagatgatatttctgtctgaagattaattgagtttttactaataccactctactgagattctgcatgaaaatgggtggcaatactgcactgtatgttgtgagcttgctgctactcagatagcagcagagtacattgcactacccattttattttgagtaaatctaaccacactaccacagcacagcattataaatttctaaactgaactatatatactgttattttcccttgatgcttctctctgatggtttcttttacttatgaataattgtcgtttgaagggctatgatgatatccctaaggaaattactgacccagaagcaactaaggtatgtgttgccatttttattttaaatggacattttccattcttctcatacaagttcgatgagatgcatcaaccagtatgcgatttcacatcattttgtccaacatgcaacttcacattatgcaatctgtacagcctgaggactgggatgatgaggaagatggagaatggacagctccaaccattccaaaccctgagtacaagggaccatggaaccaaaaggtatgagtgtgactgaatagttcatttactctagacaagctaggttcagcatcacgattactcactaattgcatgaaattttgtgtgtttagaaacttaagaaccctaattacaagggcaaatggaaggcaccattgatccccaacccaggtatacaccaaacatattttttctagaaagaaacaaggtaatccagcgatttgtatatgcttttatcgctcatgtgaattcctttcttgtttgtgcagattacaaggatgatccttacatctacgcttttgatagtttgaaccacattggcattgagctgtggcaggttagtgctgaattccatgaaactgaaattaatttctgtagttctgttgaaacattaataattcaatgtattggtaacaggttaagtcgggaactttgtttgacaacattcttatcactgatgaccctgagtatgccaagaaatttgcagaagaaacctgggccaagcataaagatgtgtgttgtcttatctttggtgcacattactgttttattttgtttcagtttctagttgtgaagaattaaatcgtgatttgtctgtgtaggctgagaaagccgcctttgatgaagctgagaagaagaggcttgaggaggtaggcaggaaattttctttttctgagccatatcttgctgttgcttcttgtttgaactatagatgcagaaaataacctgtaatacatgacagaactaacaaaagcatttttcagctctaacttttaattgttccttcttgctaggaatctgcaaactctaaaatcgacgacagcgacgacgacgctagtgtaagctccagaccgcgctagatacagtatacactaaccttgtgctaaacaccatgccataatttgtatgtcaggatgatgaggatgaggcggacgatgacaaggctgatgtcgttgctgagcagaccaaggacaagggtgatgagaaaccgcaggacatcaaggtctctgctgatgagaagccaaagagcagcaaggatgattcttccgctgcgaagaaggacgagctttagatattttattattattagatgataatatgtcatgacgaagaggcaactgaatcaggtgttggtgctaaatatttcctaagcaggggatcagagaagaggagcagagaagcttgtgctagttttaactggtttctttacttgcttgcttgagggctgaacagtacacttgcttgtacgttgggcagcacaccatcatcagtctatacacatgcactggctttctatttataggcttgataaaccgatatgtaagaagcttcaggacctagctagagacttgtagtactactacattgtcaaacttcactggtactagtactactgtaaaatcacatcatgcatgtctacacactacactgttctagaaaatttatagagcaaggacttcaaccttgactttagtttcacgagtagtagagagggttagagagtaggctggtatgttctagaaataaattaactccaacaaactcccccttaatttatttcttgcaaactccgatgagctctctgtcgcggacaaatttttctttggataaagccttggtaaatatatctgccaactgctcatcagttcggcaaaattccaatttaacttcctggcgatcaactgcttcccggatataatgatacttgatagcaatatgtttcgtcctgtcatgactgactggattttcgctgatcgcaattgcagacttactgtcgcaataaattgtagtaggctgatattgcttctcgcccagatcttccataattctcctcaaccaaacaacttgtgaaacagcttttgatgctgctacatattctgcttcggctgaagataaagcgacaatattttgtttttttgtagaccaggagcacatacctgaaccaagtgagaaagcgtagcctgatgtgctcttcatatcgtcaagacatccagcccagtcactgtccgtgtagccaattaattttgattctttaactggcttataccatataccataatctgcggtccctttgatataccgcaaaactctctttgcagcggtaaaatttaattgacttgggctagacatatatcttgataataaacttgccgcaaacataatatccggtcgtgttgcggtcaaatataataaacttccaactaagcttctgtaaattgttggatctgccttatcagctccatctctagccttttgcttttcatttggcaacaagggggttgtaactgacttgcagttatccatcttaaatttcttcagaatattttcagcatatttcctttgtgatataaatattccttcatcactttgatgcacttccataccgagaaaatagtggagcaagcccagatcactcatttcatatgtatgcatcatatcttttttaaagtcttgcatcatcttctcactattgccagtatatatcaaatcgtcaacatagagtgagacgattaggatatccgtacctgttttgttgacatatagagtaggctcacttatgctcttggcaaatcctttctgaataaagtacttgtcaatttgactataccacgctctaggcgcttgctttaatccatataaagccttcttgagtctgaataccttattttctcccccttggactgaaaacccttcaggttgttcaacatagatttcttcatcaagataaccatttaagaaagccgatttaacatcaagttgatatatcttccacctcttttgagctgctagagcaattatggtacgaattgtctctagcctggcaacaggagcatatgtctcataataatcaatcccaggcttttgcttaaagccttttgccacaagtcttgccttgtatttctgaactgagccatctggatttaattttgtcttataaacccacttaactccaataacttctctgtccctaggacgatcaaccaactcccatgtattatttttctcaatcatatgaatctcatcttccatggcctttatccaattatcatgtttttctgcttcttggaaactttgtggctcaacaactgaataattgcaaaattcatgttgttctgaccctctttgttgagaagtagattctaataattcaaccatacttcttacccgtcttggagctgattccggtgtagaaatttgctcttcactgctcgggcttgaatctgaactagcacttgagcttgacattggacttgatggctgtggacttggagtatgatcttccacttcatgagtgccatgcatatgtggttggcctagtgtgatggtagtggttggcaataatggagtactagaggcttctggagacttccagttccatgtagcactctcatcaaaaatcgcatctctgctaatgataattttctttttctccaaattataaagtctatagcctttgataccatcagcatagccaacaaatatgcaccgatcacttttattatcaaattttactctcttttgtgctggcacttgagcatagcaaatgcaaccaaatactctcatatgaccaatgacaggctttttaccataccaagcttcaaaaggtgtacggtttgttactgccttggtaggacttctatttaaaatataaactgcagtattaactgcttcagcccagaaagatttaggcatacctttgtcttggagcatagaattggccatatcattgatcgtccgatttttccgttctgcaactccattttgttgagcactatagcctgccgttagctgtcttcggatgccagcattttcacaatatttctcaaattcttttgagatatattctcttccttgatcgctgcgcaatactttaatttttcgattactctgattttccaccatggccttgaattttttgaatatctccaaggctgcagatttttcttttagaaaatatacccagatcattcttgtataatcatcgataaatgtgataaagtaccaatttcctccttctgaaattgttggcactttaccaactatatcagcgtgcactagttccaatggtgcacttgctctccaagctccactgtggggaaaagaagcccggatttgttttccaaatacacaaccttcacatgggtcagacttgagagtaataaatggaaggccttgaaccataccttttgtcctgagtagcttcaatgctctgtaattaagatgacccattcttttgtgccataaatcggaaatatcaacttcacttctgagagccatttgagttgtatgattcatccttaatagaaaatttctattcttctccatatttattttagcgaccagacgattatttttacggtccaatattttgcaagaaaaatcttcaaaataaaccgcgtacccgtgttctagaagctgcccaatacttagcaaattttgctttaaatcgggtaccaacaaaacatcttttataaattttggaccgtctgctgtttgaacagcaaccgtacctttgccttcactttgggctatagagccatttcccatgtggatctttgcatgatacgatgaatccatttctcgaaataaatttggatcagcggccatatggtttgtacaaccactgtcaataacccaaacatcatctttttcttcttgagcagtatggcaagagaaaaccatttcttcagatttttccttttcttgtgaaaaattagcccgattaatttctcgagttctgcaatattttgcaatatggccctttcttttgcacttgttgcaggtcattttcttccagcacatatctgtagtatgactagatttttggcaaatgtcacaccacaaatttgaactggacgtacctttttctcttctctcttgaccatcttccttctgcctggaaaagccatttttctgaaaataaccacggtctcgcattggaaatccatttttttgaaaatttccgcgaaaccttgagttttgaggcctgaagctcaactttgactgaaatgcattttcaatagagctcccttcgcgctgaagctttctttcttcatgagattccaacgagtctttcgacaagtctttcgactcctcagtagcagcaacaatgtactcgtatttttcaggcagactgattaaaattttctccacaaccttctggtcgtttatatcttcaccatagaggcgcatctgattaacgatctcaataactcttgagaaatagtcttttaccttctctgactccttcattagcaaattctgaaattgtcttctcaaggtttgaagcttcaccgcaagtaccttctgagatccttgaaactcctccttcaacttgtcccatgcttccttggatttcttggcgccaataatacgtggaaatagactttccgcaactccttgttggatcaagaacaaggccttggcgtccgacatccgatcctctgccaaagactttttctgttccgccgtaagagtttctccagcggaatactcttgatagccattctcaacaatatcccacaatccttgagatagcagcagcgtccgcatcttgatgctccatatatcataattttctcctgcaaatacaggaaccatagactgcgccattgtggcgcccgaacttgaagccatacttgtagcttcaattgacaataccgatacgccgtgctactctgtcacgccctactcgaacctgggcgctctgataccagttgttggtgctaaatatttcctaagcaggggatcagagaagaggagcagagaagcttgtgctagttttaactggtttctttacttgcttgcttgaggactgaacagtacacttgcttgtacgttgggcagcacaccatcatcagtctatacacatgcactggctttctatttataggcttgataaactgatatgtaggaagcttcaggacctagctagagacttgtagtactactacattgtcaaacttcactggtactagtactactgtaaaatcacatcatgcatgtctacacactacactgttctagaaaatttatagagcaaggacttcaaccttgactttagtttcacgagtagtagagagggttagagagtaggctggtatgttctagaaataaattaactccaacatcaggaagttgccatttcttcctttgtgtgtgtgtttggtcagagtgattagaggaaagtccatgaatttttagcactactagagacattgctgagaggaaaaggagtaacgcaatctcttttttatctgataaatggaatatccaaaagtcattgagcagctagcgagttcgtctcataactctgcatccgggcggcatacctgaatcttaatgggacttacaaaatttcctactactattgagcaatcctttttattctgatctagtgaattcaattagacgcacagaaataatcaatctgtctgactaaacaacacatcgaggattagtgacagtaattacgagagttctgtacttctgttcatcgcaatgggaatctttacatctcgaggaccaaagctaggtagctagctactccctccgtttcacaatgtaaaatgtgggaaatgctagaatgacttacattatgaaacggagtaagtacgaataaacatctaacaagtcccatgaagttagtgttggacagctcgtcggaggaattctcagaggctcatccagccacagcggcgccgccttgttggtcaccggagaagatgatgtcatagaactccttgtccgagaggttcaccagctcagccgtggcactgtcgtaagcatggctggacgcagcagtagtggcagtgtcatcgtgttcctcgtactccgggcaagggccaggctcaacggcggcgacggcgacggcggcggcgtcggtttctggcgccggcccgaactcctccaacgccgacaagaagaagttggtccagcattgcggatccgagcgctcgtcgaacccgaggctcttgcagaactcctcgtccccctcgtgttcttgcacgaacgcctcgtgttcttgcacgaacgccgcgacgctgtccagctggtcagtgctcaggtagccgccctgatccggctcggatgctgcagcggcgtcgacgtcgacgtgttgctccgacgccggcagagttcgccgcggcgcgctgctcgctggcgcctcggggtggtcggactcctcctctgccttgcgcttgcgccggacgtcgacgacacgggcggcggcgcggccctcgacggtgacgacgcggcggaggacggcggcgagggcgcgccgtagcgcgacgtgcggggcgagcggtagaccttgcagagcgcgaggtggtcggagccggggaacgagaactccaccatgagccacccgggcttgacgacggcgcccaacgccgtcttgatcttgtacgagaacttctgcagcttgccgccggcggcgctgcccttgacgtccttggggcctccctccgcgtgccagcactcgccgcagccgccgccgacggtgcgagccttcctcgcgccgcggctgccgagaacgcgcactggggtgaacacgtaccacacccggccatcgccgtcgccggtgccgggcgccggggcgaggccggcgacgagctgatcgggtggggcggagtacacgtcggcgacgtggaagtaggaggtggcggcggagggcaggtcgtcgaggctggtccggacaaggtagctccggaggtagccgtcggtgagctggtcgtcgctgggggagaacaccaagcccttgccgatctcagccatggcgcgcggcgagagttggcacggacgtgaggaagaagaggtgaaggtgaagaaccctagctagggtttgacttcaggtgaagcgggtgtgtggatggccttcatatttataaggcgttgattttggtttctccaaaaggtttggaactcggtgttacactcggagtcggactcggatttgtgaaaatatggcgggaaacaaagggtggacgtaacgtggggaataaggaacacacaagctgttaattaacaaggttaaggcaaaggctgggctaccctctctccaccccgtggcagctggttttagaactagtggccatcttccaggtcttgcttgcctaagcatcttcgcgttggtttcgactccctggtactcctggtctcttggcagctgtggaagtaacggaactttaaggtttttgactataagctctctttggtctcaatggtgctagagtccatccactcatagggtcatctatggtctttagttggcgttgccgcttttaggaacttgttgggagtgtaacgtggctcggccccttcccgctgcctacttgcttagagtctatgttttagccaccgtagtttttctaagcttcatcttttcattttgttttttctcccttcctctggcataagctggtctggctgattgcgttgtgtaactataactattttcttctaatatattgacgtgttgcgcattcgtgaaaaaggttaaggcaaagaggtctcttacatgatgtaattgtttaagacaaggttaaggcaattaatacggagtggatgaggaagaggatgtacgcgtacaccaaagagtaagtataagtagttaagagaaaaagggaaaaaaagttatttacatcaagagtcatattattgtaaatttttactattgtcgatttgtaaattaggcgggaagagctgctgatctgttttgatcaaattagcaagtttatgaacttgtgcagatggctttgttcgctttgcgagtgaagactgaaagagtatcagcttaccatcattgacagtcgcaactgagtttaactaaagagtattagtttattattatttcaataactgaagtaaatctattagtacacccgttcacttatgcttgtacattgcaatctgactaccacgaacgcaatggcatacacaatttggtgccagaaacctgagttaattcgaaagttcagagtaattttaacacttcagaaatcattcacataagcgagaatcgaattacagcaaggtcaccattcactcttggataccgaaatacacagattaaacttgtttcgacatctcatgcatccttacagataaaatactatctggtagcgattacaaaagttattttcaatcacttccacgcagctttggatcaagaggtgcacaaaactcttgtcctggttccttagaaacaaatatatattgtaatccaggtgcatatactcttcgacctgaaagaaaccacaggtcacaaaaaaaggccgccatggatcattcatttctttgaggaacggaagcctccgaaacccatcatggcagcaacatcagggtctatgtcctcctcaggttcattctgggcagccagctctttctgaaaccatttgacatccagtttattatgaattctactgattttcacagccaacagaactgtaaattaaggaaagcagaaaatatcatgaattctactgaatttcacagccaacagaactgtgaactaaggaaatgtcagccatctgcatgcatggttgcaattacctttttctctttcttcttttctttgcgttggcgcttcctctcctcatcctcttgctgctgtttcaatattctctcatccaaatctgaaggtgtagaacacaaaaggagaatgtttagataatacttcctcataaggctccctttgcagctattccacataacagtttccttctcaagggcaaagataggggaaaataaatcttaaggacaaagatagaacaaaataaatttgatatttatttttgttgctttttctcaccttgttcactaaagctacctgggtctttcctcttcttaagtgactcaaaccttttctgaacctgcagccagaaagttacttaaggaaaaaaaaaacaggagaaaaagagtactgactacatatttcaagttcccgataggaatatcgagaagctaaatatgcaaccattggctcacttgtctcacatgaacaaatccataatgtagtacacatatgagtgagcaagacttgtaaacaattggaacaggattgttaattttcaattgcagatctgacaaataggctcagatattatacctgttcaagtgatgctctctcaacacgcatagacatgcccaatgctctctgatctgtcaaacattcaaaccacgaaacattattattaaaaggtttgatataccaactcagcctaaaccagaggtctcagaaagtcagaatacttacgtttcttgccatttatatggtccaaatagttagctgaatctttaacgacacattcacaaactttacaatagtaaccagcctgtcaggaagtagagttaaaagcaaaattttaggtgataaatttaacatgaaaaacatttaggcaatttctagaatcattgaaattgaaactagaattgttaataatgcagctatcgagaacagacatcatggacagatgaatcacaggctgaattctaaattttttttttctgataaaaactctgtttcaaaagcaaaatgaatgacagtaagtgaattccagagggcatgtaaataaataattaaagctcaatgaaaatactataacatgtcctgtgggatttctggacgaacctgttgactcaaaggtgcaattggagttaccacctggagaaaaacaacaaacataatcggttatgagctcaatcagaagggcattcatatttgtaaaaacagcttgttgatcataaaagaaaataatggtaagactacaagaacaaaaaatcgggagacataatcatgcagcatgaggaagcatggaaaatctatgctaaagcaacagaagaagacttattagaaagcaaagatgatctagcaaacctgagtcttgccaagacgggactcaaggtcaacttcatagtccctatgcttcaaaggttgcctttgcacaggagggcccttttctgtcatgtatagttgaaattaatttagctttacaagaaataaaatgcatccatccaaatctaactgaattgaagtacatagcactacatacccttgcctttccgcgcttcttcctgcatcagcaagagaaaaagaaagaacaaagttaacaacaggttgggcgaaggaagtattaagtatatatttttttagcttcgaaaatgattgtggaatgtaaaatgaggaccttctcctcccgctccctctgccgagctcgttccaagtactcctccttgtcaaatttcctccggaaagtgttatcgacaccaaccggctatgcatcaaaacaagcaaaaggtcagctcaaatgcaccacactgccttattttatgagtctctttgaagcatatataagtaacttacattgctagacatgttgctctgcccactgccaagcagctgctacctaagaagcacaagcagaagcagcaatgagaaacaggtataataacagaaaaaaaatctctccccctaaataactaggcgaagcggacccagggaatcacgacgacgagtgtgcctaggttgtgaaatcaagctgatctgagcattcgaatcatagaaaacatgcactgcatctttgaattgtgaaatcaacttgatctaggcctacaaatcacaaaaacaagcctgatctctgaaccctcactgacttcgatttcaatctatccatcagggagaggattagaggtagttacccgagtaaaaatgtgataacaaaaaactaacctggttggattcttggagagacggagaggattagaggagagcccttcctccttgctggtcgtggtcgcggccgccgcccccgctgccgcctagcgccacagcccgcttgccgagtcgcctctgggtgtaggccgtcggcgttagggggcggggggctcaggcctcacggtggccggtgggtgcggagctgcgccttctcgccgccggtagcccggtcgccggaaccctactttttttttccctttccttttttcctttttttctgtttttcttttgcaaagcgttagagactaaactgggcatgagctttgggcctttatgggctgtgcaagtgttagtgggcttctcagacctttctcagagtagcatttaggcccaaaaataatcgggatcctatgtgctcatgtgaattccgttggatcagaatcggacgactgctgttgaggttggcgtttttttttttctgaagagacctcaaaatattagagaaatccttctcatatttcaagagtgaggcaccatgggataagaaattgctttattcaactatgtcaaagcgcaaggaagaaactagactataatcgtctcatagatgtctgatgtctcatttgacagtactaagaaaccaccattgcaccagtaaattacaggtctaaacagacacagcacaactctgttcaggtaagaacaacatccatccaaagatgatgatgataacaagtgagaatttgagtatctatcagtacactcgtggattccattgctactagaaacatgtatctgactgaatctgatatgagatgcaaactgcaggccacagccgaggcttcctatggctccaccttggtcaccttctcccactgaccatctgatgcctccttccacagtgtgatatcgccggagccggccgccacggacagtatgtttccggtcagtgaccaggacaccctccatgccggagcctcgaagtcatgcatcaccttcccttcccatttgtcgccctctttccccttggtccagatgacaaccttaccgtcttcagaggcactggcgattgtaaactttgcgaggcccaaaacaggtgcccaggatacatctctaacgcagtccgtgtgcatgtcggagggcagaacgctatccagcttccagctgccattgacaaaagcccacaccttgacaacacagtcgaagccaccagagacgagcttctggacaagttcccctgagccaacaatggaaccgagtgcggttgctggagcccatgagactgccatcaccccaacagggtgtgcttgctcaattgttgtggagtcccatcctccatccgggcgcatggtcatgacagagatgctcccgtcggaagagccacaggcaaggcaaaggccaagctcatacggagcccaagcaatggagttgagtgaagacttgtggttgtcgaatacgtgagcctgagaccattgcccagctgcaccctccttccaaactacgacacggccatcgtagccgcaggatgcaagaatcgaaccaaacttgggatgggcccatgcaacacgccacacaggtccatagtgtccgctgagggttgcaagcagctgggatggcgcggatgcacctccaatgctgctgatctgcacggtggagtctgaggaggctgtggcaaggctcttcccgtagtagtcgatggcagaatcatggaccatgtccttgtggtcaagctctatcttgtttgacgacatgctgccaacttaatccagactcaaacttgaatccctcctttgtagtcctgattgtgattaaaatgaagtgacaagtcaattcaccaacacagaccagatggaacaatttaattgcagagaaatgaagtgacaagtcaattcaccaatacagaccagatggaacaatttaattgcagagaaatgaagtgactaagtcaattcaccaacacagaccagatggaacaatttaattgcagagaaaagcatccatctaagaaggaccttgcacaacagcacggacaatagaacatagaggcatcaatgccatcgtattagttcaattcattacacattagcttcccaatgattgttttcagccaacacctactgcaatataatcaacagaaggaacaaaactggcataaaaacgtatcaggctcactacatatatggggtaagacggttttgatatgtccatggatcacaactggtaattgcacattgcagccttagcttgctgcctgcagcttgcaggatcacaagaagagagattcacaggggcggatccaacttgggacatgagggttcagccaaacttttgggtgaacaaacaaactgttactttgtattaaggttaataaggctctgaaattaagaagaagaagaagagcttcttccagatctagaagagaagctagggttaacgaacgcaagcagagagatgaatcagaaagaggatgcggggatgctcacctcaccaggatcccctcccctgctcttctcgccagatggagatcggcgccccctcccctgttcggccgcgagatggctcaaggagcggaggagacgacgagatgggtgattttcttctacgccaagggaagggaagggggagatagtatactcgaggttttcactttaaaaatctttatgatgactccaccttttatctcaaaattttcacttaaaaaatatttatgatgaccccaccttttatctcaattttttttcaccctaaaactagctatactaccttttttttttatggacgtaactacacagctagtggtagctggttccactccatctataagagacaccatttacctatacttcaaatacaattttctattaaactactcatctgatctacgatctaattacaccgttgtgttcgtaataattaaatctttacaacaagatctcacatgattatattttgatgaaaaatcacaaattacttttatgatatgtctaaattatttttagatttcactaagttacttcttaaatatataaaagtaaattcagtgaagcctaaaagtaatttacatatattatagaagtaacttagaacaaaaacaaaggtaactttggcatgtcatttgaagtaaatacgttatagagataaaaacatgactctatgtagaaattaaattaatcagtacaaattatgaaattaactaaaaataataataaaagtaatcacctcggagcattataaatgtataggaagtattttaatcaaatctaaaagtaacttatatatatgataatttgttcaataaaaaaggcattaattaaagttactttccttttgttataagttacttctataatatatctaaattacttttagactttactgaatttacttttatatgtctaagaagtaacttagtgaaatctaaaagtaatttatacatatcataaaagtaatttgtgatttttcatcaaaatataatcatgtgaaatcttgttgtaaagatttaattattacgaatacaacggtgtaatcggattgtaaatcggatgagtaatttaagagaaaattttatttgtagcttagacgataggaatatttcccctacttgcttaatggattagtactatagtaaagtaagattcttcaagttaatacacatctggatagagttcgcttgttatgactaaatcgagagtactctcgatttagattttgcgtttttttttgtgtgtgatgacatgtcaacggtactcatagaaaaaaaatcaacaaactcggaactactcagaccaccggcaaccactatagctgccgcttcatgcaccaccactctttctccatgagacatgttttttcttctccccatcgtcatgcacgctattatcatggtcgtcattgaggctggggtgtcgggcttgaagaggctcagggaggctaaccactatagttgccgcttcacgcaccaccactctttctccatgagacatgttttttcttctcccccgccgtcatgcacgctattatcatggtcatcattaaggctaggggtgtcgagcttgaagaggctcagggaggcaggaacttacccggcgaagagcgaagatgctagatccaggctcctccttggattccccaactatcaaagaaaaaaagaaaaaacgagagagaagtgtggagagtgattgcataatcactggacttgaaggtggagcgatggtagagtcactagacttaacgtcattcttgcggtcacggccgagcccgtgctgcccccgatgctaatgcatatgagatctacactctcatcatctgtactctcatcatctatgataccccaccagattatttattaaccctaaatagaagcaagaaactgaaaggagaagctaaagatgcagtggaagttacttcaattgaccatggggtgaatggagaatggggacaatgtttttgcaaggattaacatgttacaggagggacagcatcacacagcagatggtagtaattattttatccccacaggtgctccaatcaaatggcacatgaacagttcaagaatggttcatcatgacagacatcgacggtcaatcatcagataaacaatgggcaggttagtagcaacattatcaatctttcgtgacaaaacatgcacagttgcatgaccgaactactaccaatttacaatttgtgagaccaacatatggaacaaaaaccttgtttgtggctgtcaaactggtatcattagtgggaaaagaacacctgctacaaagaagtgtcagacactagaagtagatcagcaaccatttcatcgatcaaggaaccaagcaactctgttgtaatgtcaatgccagattcgtatgactccaacttgaaatctacccagctccccagaggactactcatttctttgtacacgagttcatccaccatccactcctcagcaaccttcagatcagtcatctccgcatagatttcttcagctgtgagcttcttcagaattgccatccccaagaaccatgagccgtagccggcattgaaatagtatgcacatctcacactcagtatctcgtttacacattcgaagagcagcctccgattcattcggagtgttttgccctctgctacacccaccgccagccgaatatcgccatttaagtcttccagtagttgtagatccaggatatctgagttaatgaatcgctccaagcccgagcaaatttgaccattaagaggactggtgtttaatatttctcttatgaaatcaatctcctgtctgcaatccattcggcttgaactgctgctatctgatggggggatatccgtcgtagtcacagtgattgatgaggctgtgtcagaatactccgagaaagcgtcagcttccaggaatttactgaagcatgcagaattagacgttgttgcaccttccgttgagctaaatactttggttcctataaagagggaaaatatataagattttgaggaagacatacagctaatgctccagcaacaaccaagcacctgtatatttaccatttgcgcttctccagctctctgttgagctaccggtttcagttgaaacagaagcatcccatgttgaaaggggactgaggtgaaggcgctctatctccatttgatccatggcatcattatcatacttcacagattgagatgactggtgaaagagagggaatgttagcacaatgaccaattctcaaccagtcattgataaatttactcttttatatatttagacgcagtaatcattgtttaggagttacaataagtgtcccacttcagtatagcagcgagaagcttcaggtgtttcccttgattcatccgtgcattccaagtatgccagtttccaaaaggtaaaaaggcatatggaacaaaataaactaggaactacccaattatgcatgtaagaataatcaaaggcacaaaatgttgggtatacagccagggatttcctaacagaacacaatattataacctttaagaacaacatagaatccctaaactaattgttaataaaaatctagattattaacatcccaaaatatcaacaatatacacttttacaccaaaggtcatgcaggaaaagcatatggggtaaagacgtacagttggagctgatgtaatttacaaacattagcatggtggtcaaaatcattaatatgccaaatatgatagggttatgatatcaatctattgctcttatttctgaattctgatggacaacatattctttggacaaactttttgatgttatcaactgagaatcaaagtattctctgacttgaaaataaaagataaattaaccatatcagtttctgcatttatcgcagctacatgaagaaaagataatatgcctaattaactactccctccgttccaaaataagttcatttttcacctatcccacatataccaatacaacatcgaaaagactagaatagccctactttatcaaatcccaatacaattattccccactttatctactcccaatacatttatcccctactttcacaaactccgatgcaatgattattcaaaaataaacttattttgggacaaatgggggaggccaaaaatgaacttattatgggacggagggagtggttaatattttttccatgctcccaacaggtgaaacacagaatctgaataaccttttcaggtatttatcatatgctcacagcaatggaaatgacatgcataggagaaaaaggtgggcatgatagcaacagaattgcctgtgattccatacctgaccactctttgatgcaagatctgtctgggtgaaactgccttttccatccttataggattggacggactccctatcataatcagtagatgcaatgctcgatgtttcacatgctgattgtgaatcttccagaactgatgatggggcatatatccgaacatctttggctggcttacagtagggtgacctaaccccagaagtaagttctctcaacttctgctctaaaaggagacccaaataatcaccatcaattgaatcaaatttagcactcgatgtctcgcttgaatttggtactgagctcgcgtttttcataaactgtttttccactaaatgattgggtaggcgataaccagataatggtttatcaactggtgcggtgaatgtgaatgaaacaatatcagtgctaattttcttcttgttcatggaaaaaggtgattgctcatctattacaatattgtgccgaacacgcctttggcttctgtcagcaatatctttatcacttggacgggttttcactgaatgtatcctcccatctggtaatcttcctggcttggggattgatttggctgtagaattttgccttctatttgcatggccagttgaccgcaattccacgtttctgttaccttgagtattgttttcagacggtgtgccggcagtcccaacctttctcatagtgccatttattgaatgtgtgttgcttctttgccggttgggtgttggtggcttggaattcaccttgtgcttaaccatagcattttgctttctgttattttgcacaagcacattggacgaacttgccatgcccacttgattgttattcttcccttggttaatcccatttctctcaaccattctccgctcaggatcccgagttgcaagttttctgctaatcttgcttatatcttcccttccttgaacattagttgctctagaatctggtgatgatcgactgctggccttgacctttgggccaactggagcacctccatttgactgtgagaccacagaagcagaggtgttccctgaacttttcagacttccatccaaaggctttccagttggtagcctataagatgtcaagccatcatgcttcttcagtgcttcattcattcttggtggcctttgttggactatcgcaatctctctttggctgtatacacgaacagtatttgcatatccaacatcacgaactctgtaagggctaataacctcaactccagcccctataatcctagacgccgcctccattatatcagcagcatttctgctagatatatgattaggattcttcatgggggacaacttgttttgcgcaaccgacagtgtccttttggcaaatcttggtggcaatgcttccatcctaaaccggtcaataggactaccaggcatcttatgaggactaccgggcatcttatgaggactgccaacatagcttctgccaatgaactcatcatggatagtactgttctggggggactgctgcacagttaatggcatcgtataggatccagatgagcttgctgcgggcatggaatccagacccataagccttgctacaacagtggggcccctcctcacaagagcttcatcgtcaaccactgaagatgagcaactgtgctcactgctttccttcaaactcggtgcatcttcaaggaactgccaacaattatgcatacacaattacacataaataacacaaaaaaaactaaaaaactaataagattgctcgcatgaacacgcaccgaatttggtcgagtgcttggtgtgccaccatcagattccctgaaattttcagaaacccctgcaaaggaagtatcagtatgcaatcctaattcctccatccatttgagaaaaaaaggatgtatcgagtttatagcaatgactggactcctgtgccacattgacttacttggagccggagaatcgctcccatttccactgaccagccgcttcttggacttcttgccccaatcaaacaggctaaagaagccatgtccctttgaagtaggcttctccacatccatttccctttactcccctaaacctgcaaacaaaatagctcgcgtaaacacaacgaatgaaccaaagtaatacttagcttaatgcagctaaactagtaatcaagaaagagcccagtgatgagtcccccaaaacccaatctttacccccccaaatgtgacctagaaaacaaaacccaagaaacaatactactcaaactcagagaacaacgcctgcaatatacagcagcattccatcaatttacccgaaatgcaggtaatccccaactaagaacaccccccaagaaaccacaaggcagccctcgcccgtgtagaacaccgcaaagatccggccttctcctcccagctggagtcaacgccgccggattcaccaaagcagcgcccaaccggagccaaatcgccgcgaacaccactccggatcgagccgcattgagccgtagctcgtcgccctcgccggtaagctcccaaaccagcgactttttctcgtgcacaacacaacaaaaccacacctcttggacccagccgccgccgttgagggatccgcgccgccgtcacattaggtccggcgaggtggagaggtggcggaggtgggaggaggaggaggaggaggccgcggccgcggaatccattaatgcggctgcctgaggtgggcgaggaggaggagaagagagagagagagagagagattggagagaaaagaagccttttttttctctcacttgtcctctcttcttctcttgctgctcttctcctctctctctctctctctcgtctttatgacgaaaggtttattaaaaaggaaggaaatttggggaattttggggatcggtttggtcgttttcgtgatgtaacgagatttggcggttgggtttggatcatttgctcacaaattttggctctttgtgtgtgggggtgtttcgcctggtaaaataaaataaatgggttttttcggtgtgttggatccgctgaaacagatcatgtttaagagtaggacacgatgagcccagtggccagtacagttaacagatcatatatgtaccaaaaaatttatttcaaccagatggtcatgtccacggcatagaggagatggacagtgataaaagtacacctaacaatgaaatggaaggtcttgccaacacacgaattataaaaacaattatataaattggttttgggctattattgcagtgcacgaatttaatagtacaaatttcagtagatattgagttcgcgaaaaatcagtagatattggttcaattcccacaaaaaaaattctgaaaaatcatcctctcaaagaagaccttgattctcataaaaatcttctaaatatctatatgttccaaaaaagaccttactggtatatcattttactttattcagtttttttaatgaataactaaatagttgaatgattttgtaataattatttgagagtacaaatgaatgaagtaagcattaaaaagttgaaaaataaataaaaattgttttctaaaagtttgtataaaaagcatttttataaaaaaagcgtacaccgtttagaagcttggaaaattggccgttgttacattacacactttactaaagttttaaatgcttttaaaagggtaaaacgtagacacaccacggcatgtcgcttgcaccctaaaatgacaaggttgtttcacgaaatgggcgccgccggcgacggccacggccacggcggcggcggcggtgcaccgtagacgtcagtagttggtggtagtgtacaatcatgcgtacgcattatcgacggtcgccggctaaaaaagacgattcccgtcgccgtcttcatcattttcgtcgatttccgttgatgttgcagcttatcatcctgtccaaaccagttttttttttttacactctctttagttttactgcaaatccttcgtaggatacccacaagtacacaatcaccccaaccaacaatccgcatgaactgggctacggtttcagtcaaagtttggagtaaggtgctatctataaaacatgtacacctcaacaatagactagattaatagtaaaccacttcaatggtatatctacatgggtatctatagctctctaatccattgcctagtttttctctatagactatctccatgttagtagatagctttgctctctctcttcatttaatctcttccaagtaggaaaatatgctgacatggatctcttgtagagagcttatagataaccattgtgggtgccctaaaagggaaaaaaatatgtggttaagacgtacactttaacctgactgaacatttcaccaaccaacgaaagtgtagtactactctactacgtatggagagcatccaatccaatccatcctgctcttgttgtcttttgtcttctccacaagccaagcatccatacgagctagtgctggtacaggtcgcaattatgcaaagtgacaggagagattaatgcaaactaatcacactagcagcagtggtttcctttgcaagcagggcagagttaatgcgaggaggagttagctgctctgctcgagtttaagggtactgcaactctgcaagtcagcagctgcaagaacatcaccaagttcagctaagctcgtttggagatcagcatcagcttacactgacagagcttatgctgacaagtagtgacggattcgtctgcgttgatgtctcaacaacctgtaggccatcaattaccggtttttgcttaatctgcttgcgattttgtgagtgcttggatagaatagaatccaatgtaggacacgaatactttggcagtgtgtttgcttcgattcccttatctgacagacaacctgcaagattgtgcatatgtgtaggtgcttggtcgccattgcagatgcttttcttttcccccgggcaagcaaaggtccaagatttttatcttattattatcattttttaacaaaaaataatctgcaaagaggactgtactacatatatatcttcattgaaagaaataggagagaaatgagctaatttttgttttagagtgcactaaacagacattccaggatgagaaaattgtaccatttttgtttgttttgtgttacaattcctgaagtatactgaatattttggcacagcatcagcttcagtcagaagttgagattatcagatgtggtgggggaagttgttgtagctgaaaagcatacatagcagtggggtgattgtgtttttcactcttcccagtactttacaccagtagtacatcttttcatgaaaaataaacggaaaaattcgagcttttttgcagatttgagatctacagaacagaacataaccttttcacgttaacgaagtaacgcgaggtttagggggtgtttgggagagaggggctaacacccccttagtgcatatgcagtgcagcactctgaaaaaagatggcaggtagggtagtagtgctccttaagccgcgagagcacgcaacgagaaaactgacagcctcccatgtgattttacctgccaaacctcactttgatcagctatcagatgagatgaggaaagcctttgctgctgtgtgcttgtgtctggctcaagcgagtagcaaattcagattctatagtttttttttctctctctgaaacttttcttttagatggactgaatgctctgaaagactcaaaactattgcacgtttacatgaccaatggcatggtttttaaggccctgtaatctgaaactagtacacgttgacatagagacgattaagttgggaacacgttggtcagaagtacggagttgcaaacactactcctatgctgcataatatagcaacttgtaccatttaaaatctatcttaaaatataacaacctcgcgtctcaactaattagagcaggatcttattttagctattcctttactatctcatctcaatcaatcacgactatttctcatttaatttcacatatcttcttaatctccacgaaaaaaaactccagaaacatttacacgagtattttgggaatagtatgtactaatcgagacactttaccgatttgaagggcgcaaaactgaagatgagatttgcaaaatgcaatgggtcaacaccacctgttcttgtaccaggaggctactatgagggacgcatcagcaacgagatctgaaccgtggctgtcccattgtctgcctgcttgaggcaaagcaatcagagattcagagaggcaggctgcccctccactctgcttgcagtaaacgataaatgcaacagaggcccactcatccaagatcagatcgtcttgggccacctctctctgcggcccaaactaaaagagaacggtggccaaacatcttgctgggcctcacgcggtggaataagaaataagttcatctgaggtcccttaacttgttaacgaatctgattttcgtccttcaaccggaaaaccagatacgacaggtcccttaactatcaaaactggtgtagatgaggtccctcggcggttttgatgacagttttagctgacgtgacgcctatgtggctaatttgactcggtatttgtcccacgtggcattgacgtggcgcttacatggcaattccatccctgaaaaataataaaaaccatgggcccacatgtcagttaaaaaaaagtgggcccccacaagtcagtgctctctctctctctctctcactcttcttatctggacccttgccgtcgacttcactccgaggcgttcgggctgccgccgctcgtcccagccctcgacccggccgtcaacatgagcagccttgccgccggcgcatgcttcgcctccgccggcgccggctacgacaatgccacctctgatcttttcgttagccttccattagagcaaaacgatagctagcttagctacattttcatggtgttcttgggtgacatcacacatgacatccatggagtaattttgtgaggtcgcgtcgtgcagtcggtgctgccgatgtggaaggagctggactacttcaaggagtacgcggcgaggcttcaaagcttccggggggacgacgacgcggcggcggcggcgacgctgtcggaggcgctctacatcgtcagcatgggcaccaaagacttcctcgagaactactacgccatggcgcgcgcccaagcggcggagtactccacggcggtggcgtacggcgactacctcctcggcatcggcgcatcgccgagtcgtactcgttcgtccgcgagctgcacgcgctcggtgcccgcaaggtcgaccttaacggcctcccgcccatgggctgcctcccgctggagcgcgccacggggagcggcggcgcgtgtaccgacgagaaaaacaccgtcgtcgagcgcttcaacgccggcctccaggacatgatcgcgaggctcaacgatgagctcggcgacggcgagatgatcgtgtatggcgacgtgtacaggtcggtggccgccggcggcgtacggggtggagaacgtaggcaacaacaccgtgcccacgcgggtcaaccggcggcggctcacctgtgccatctgcttcgacatgttcgcccccggtaggatgaggtcggcggggtgctcccatagtcccactacaactgcatcgcttcggtgcccggacctgtcctgctcggtcgccggcggaggcgagcgcagcgaccgttcctgaggagggcgcgggggcggaaggcggtgctggagaacggccaccggaggccgaggcaagggggaagcggcggcggcggcgggaacatgcggaggcggcggaggcaggcacggcaggcgacaaggagagggcagcggcagccggcggtaggcccatgggggcgggagtggaggaggccgcgcctacgctatccgcatctccgccggtgagaggagagaggaaaggggagagttgtgaagataggtgagatggggagagaggaggaagaagaggaggggattgagatgagaagagtgagtgagagagagctgatatgtgggacccacttggggcccaccagtttttttaactgacatgtgggcccatggttttttattattttcagtgatagaattgacacgtaagcgccacgtcaaatgccacgtaggtgccacgtcagccaaaaccaccatcaaactgccgagggacctcatctgcaccggttttaatagttgagggaccattgtatctggtttttcggttgaaggatgaaaatcggattcattgacaagttaagggaactcagataagcttattccgtggaataactaatccacgggcttgctctcttactgggccggtcttatcggatcatcagatcaaacgagcactaatacttagattagatggaaatcgaatgatatggatttggtctcccgtctcactgccgtgtgggccccaccgcccactaaccaccccgaggcatctgcgccgctgtcgtttcgccggtaatctcgctgcgttttggtcatcaaaagccctaacaaaaacctccccacctgcggccgccgctcgcgtcccatctctccctctctcctcccacccatggccgccgccgccgaccgcctcctccacctcctccgcgccgcgcctgcttccccggcccccgccgccgtcccgtcgtcccgcacccgagccaccttctaccaccagccgcggagcctccgcctggcggcaggggcatccggtatgcgccgcgttgccgtggcctgcagctccgcgggcgcgggcgggagcggggtcgagggcgatgaggaggggatgacgtacaagggcgccggcgtggatatcgacgccgggacggagctcgtccgccgcatcggcaggttggctccagcgataggcggcttcggtggcctcttccccttcggtactatactactacccatctccttgtttgtattaagtagattggttttttttttttttgcggggaagtagattggggtttagtttgctcgtcattaatgggtgtgtgtttgggagggttctgtgatatgtattggtagttcttaccccaggtgaccaatttcttgttgctggaaccgatggagtcgggacgaagctcaagcttgcgtttgaaactggtatccatgacacaattgggattgatctggtatgtgttcactttgctagatgagtattttatttcatccctttgagtttgattgactcaaatgatttttaattctcatgttaggtggctatgagtgttaatgacattgtgacttcgggtgcaaaaccactgttcttcctagactactatgctacgagcaagctcgacgttgatctagcagagaaggtattgttgacgctattttgtttgctgaaaacagttatgccggctaatcctctcttatctacatctgcttataaagtcataattattctgttcaaaacttttattttctcaactacataggttatcaaggggattgtcgatggatgccggcaatcagattgtgctctgctaggaggagaggtgaagttccctaactagaacccatgttttagcagtggaatacttcaatctttgtaccaatgaatacagaatatatgtatcataattgttcatctgtcttgcaatggtttgtgactactttacttcatacgaataaattttcaattatgcttacagactgatcattagaccattttctaactagcaagcactagcttcaacaagtgaatctttgtaaatgttgatatggtattcagcttagttcacatggtggatcttgtttttcatcatactttggtttgtaaatgctttgagaatacttaactatgatatatgagcataagtacaaagttaacataatgttttgactctgttatgtgcagcaacatactaataaaaaacaattgcatttatcattgatccatttgtcatgcagacagcagaaatgcctgatttctataaagaaggtgaatatgatctaagtggctttgctgtgggtgctgttaagaaggataaggtcatcgatggtaaaaatatcatggagggagatatcatcattggtcttccttctagtggggttcattctaacgggttctcccttgctagaaggtattgcatctatccaattcgagttgttttgatccaaatagatggttgacgcatgctcttttcttttgatgttgatacttgacaacccgtcctcctgttgaattatgtgtcattaatggtacctacaaaatttcatatttttttagagtactggagaaaagtggactttcgttgaatgaccagctccccagaaatgatggcatgataactactgttggtgaagctctcatggcaccaactgttatctatgttaagcaggtagctttgctgatatatgtttcatatttagcatatatgtatatgcaagtttctaattaaattgttgaaaatgaaaaggtgctcgagattattaacaagggtggtgtaaaaggaatagcccatattactggtggtggcttcaccgataatatcccaagagtatttccttctggacttggggcaaagatttttactgcagcatgggaagtgccacctgtattcaggtggattcaagaggtaagggttaacagtccacgagcatgtcatgtgtattcttgtaaccccagtgaagttattcgactgtgttgtactgaaaatcattatagtattgtgtatctgttctgaattcctctggtggaagttatatatataatcagccatatttgaactcggtagaaactttaaagattatgataggaagccctaattagagactgggtttttcttttggtccccagttttcatgcactgtgctgcgctgcctatttggtccttatcattttctccgggtgtttgtaggttggaaaaattgaagatgcagagatgaggcgcacgttcaacatgggaattggaatggtccttgtggtaagcaaagaagcagctgatggaattctcgaaggtacccatggaccgaaccacgcatatcgcattggagaggtgatcagtggtgaaggagtccactacgtctgatctaattaatgatctttataatgctttgagtagtttgaggtttgttcatccgacaggcaaaccagcctaatttttgtaatcgcataacataaagggggccaagtcctggagcaacagtgagtttagtcctgtaagataagaaaacatggggcgtactccttttagttccacatgagaacttgcccccaaacggcagaacctattatttggacttgcatctacgagaggtgtcatcttattaaaatgttcttgcataccaactctagatatcctgatgtgtctcaccatcgaggcgttgcatttctatactcgttataagcatccagaaaaatcgcattaatgcaaaaaaaaaaactttttacgtaattacctgctacatgatctcagcaacaatactcaagcatacatgttattattcgaagttcttgcatccattaccacaagaaaacactcaaaaaaacgtaaagcaaaaaaaaaaaagaatctggatcgaaaaccttggctttacaagcgtcaaaatggcataggataggataggatcaccggttgatatcgccgtcgccgccgtaaggtgtccggccgccgtccggcgagtcaccagcggcggacgaagcggtccttgatccaccggaacccccggcggagcgacgccttgaccctggcctcgacggcgtaggccttgtacgccgccaccctccgccggcgcttcgcctccgggtcgccggaccaccacggcgtcgacgacgacgaggccaccgtcctctcgtcgccgtcgcgcggcggcgccgacccgccccggaactcctcgagatccctcatgcgttccgtctctctctttgagtgcgcgtttgccggcaacgacgacgagcgaggagaggagcttttggcagctcgcatatataggggagaaaatcagggagagtttgaggccggccatgacggcctcaacgcaatactctccccgtctcccagattagccctgaaattgtcgtcgtcgactagtgcttggcacagctcgtggaattattagcctttgcaaccctcaaaaaaacaatggttgacaaattgattaggatttgcattgcatggagatttctatgtgtttcttctcaggtagtagatggcacgccgtcacgttggttttcatacgtgcaacatgttgcagttaggagttttgacagttaaattcacatggtgcttctggtaatctgcttgaaatatggcaaagttgcagacttgcagctcaaatatatttttttttcttttggtgtgtgattgccagtagtggaggagcagtcagcaagcgcgccgtcccggccgtagctgtgatttggtgggcatttccgtgtgctcggctcttggctggatggaacaagtcgccctccatccaattacaaccagatatcagtttgtttccgcagcatatgtaacactcagaaagtgagaacctcttttttttttcttggaatgtacaaggcacaggtgcaaactgatctatcatctcactatgttgatcaaaagtaaccgagataaaaaaaacaatttacatgcaaacacatgatgttgtctaattctaacaaaaaaatctttttttttttgctctttctctttttttccccctcttaagttctacaagtctccaattttcctttccatctttactctcccacaaagggttacctacaccgctacaccagacaacttattggagacaggaaaaaagttagcatgtaggctgatacaacccccgtacaagagggcattcatcatcatatcatcatactctatgtgccataggcagatgtgctcaaggcagctgaaaattcagacggcaatgtttcactaacaaacatttacagtcatctccacgtaccggaacgggagacgaaaaaacggaaatctggatgctctacttgtacgcagctgagccagttgccagcctcctccatcagcgaggtgacacgctgtccttgggtcccatcggatgcccaaatggagctgcgaagtttgtaagatgccagtccaaaggcaggcaaagatagcttgccagttgcatttgcgcaagggctgatgccaccaaaaccagggcatgctggtgtagtgctatcgctatctgcaagaatgggaatgttaagcaatctatgcagtatgtaacatataagttgcatctaggtacaaactatttacaccttcataattcattaggcattagaaggtatttacccttagaaggtgttgctaggcaatggaatgtcaagaaacaggcatcaaggtcttccaacgtcggccctgttggaattctatatatggggtacctgcaatgggaagcacgaggatgaaaccagtaatgtatagaatcatagcaacaccatattagcagtgatgctcttctacacagattgtatgtcgtgctgaatttcagcacagtaggcatgcctgttgttaggcattgcaactggtaggcatcctctgcgcgggccagcacagttggcaaatgtcattattctcaccgttgcaacaacatcattctagtacttataaaacaaaaacgatgtccacagaaaaggaagtgcaatattgtggcactaaaactagaagctatcagacaataagacatgaggtgagctcatggcggatagtctaatatagtaatatgaccattttttaagcggaaacaacatgaaaacattgacttcaaaatacttcttgaatcccaacagtttgacaacaagggacacatcttatcaactgaatgaggacatctcacaattggaacatggaagtagaacttgaagaaataaaataaccataccatgcaacagacatccaactggatggcagcagatcacagcttttgaatgccttcagagctggaaatctactagcaagaattgatacctgaagttcatgcagagtatgattatgtggctatgtgcataaatgtttgtaataagcatgggtgtaaacaaaaactcaccttgtctgtcagaggttctctacaaaacgggggatccctctccatatactgaaagattggagaacttgcagatgcataaccatcagcatcatcagttcgcaaactaccatttgccatcccatgtgtagcttccacggatgagactcttaatcggtcaacatcagtttcactgctactctcgctgctagcatccaggtattccccatcactttcatccccaaggcgccttaagtaagcgagaaaaataagtagagaaagttatatgctatcaaggaatcaccaagataatgaaagcaacactactgaacaggtaagctgttcctaactatcttcatggtggtcactatgcctaagtagaggtcatctaatgataaagccataaattcacagctcgccactctttcagtttaacacagatttatttatttttcttcatttatacatatgtttgtccaccaagacttattgcaaaagcaagttcctgaaacttcaggaaggcatgagataattccatctattagaacccaggaaaaccaaccgaagaaataaagttgaggaattctgtgtctaccctgtgcttgtctaataacatccaatgcataaattatttatttacatataatttggcacggctgtaacaaactgatatactggagtaatttcttattagcccagtagaatttgataagtcctgcaaacatatgaacactaaaaagcctaaataaactgaagtgaaaccaaagatacaaacaaagtgaccagctagacatgttgccatattgatggtttttctttcacaatggttgacctagtgaaggtttttcttccaaaaaggagaaattctaaaaatcaaaacttggcattggagataaagattgctacctggttcttgaaacagatcttgatggatctgcatacaactggatagcagacagatatggcacgtaatactgtgttacagagtcactgccatttagcaacaggggaacgccagctccataagcactccactccctgaaagattcccaaagatcttcaaggcagaaatatggtgatgtatttgtacaatcaccagtcctccacattttcaagcttgtctgcagaagaacaaaggtattacaaccaaaaacagcgtaactagaaccacggcaagatagctcgttacttcaataaaaagctgtttatctcatcagaacattgtacaaacatcactgcacgactcaataatctctcacaaaactgattctaatgttgttacatcctaaatctgattggcatgaacacaaaaccacagggtatgaattgtttatagatgaaaattatagctactgcagtaattaggaagttaggagctcaagaaagacacaattttccatctaggattatcctgcaaaaaatatgcaaagccccccgatagtgcttagagcatagatatagcaacaagcagtgggcaaccacagttttattgagttttaggtgacacctccatgtgttcagaaaaaaaaatcataatataaaaatccttcacttctcaaggcaacaacacttgaaaatagtttgcaccaaacaaaacaaggatcctcttcctaatttaaagaaaacttgctactacacatccacgattactatcatcaagcgtcttaaatggctggtgactatcaatcagatcttaaaatcagcagtcaagcgcaaattcagaaacatgagcccttctgttgatcaccactagaatgctcaacaagaatagttgattttcccctgaactacagtatcgaactatttcatcgatcctacaccaatgagtagcattttccctttgtagtcacgacgcactagctacacttaaaaacatattaattaaaaatggaaacagaagtatagatatcaaaattcgctcgttcttcctcatatcacccaacataacatgtctaagtttccgaaattcgcatgctgcactcctaaaataccttgggcaggtattggaagggcacggagggagtggtggaggtgagaaacctctccaaattcccactctcctccaccgccgtcacattcacgtcagccgcggtggtcgtggcagtcgctgtggatgccacggaaggcttggacgacgtcgacgaggagtcgtccgaatccaccctgctatccccgtccgtcagcacacccgcgcccaccgccgccgcagccaccaccgccggtggcgccgcggcggccgccttgtgcctccccgaccgcggggacggcgacggggacagtgaaggggacgtggggctccgcagccgctgctgctgctggcggcgggaatggggaggcaggtagaatcgttcgacgctgttgcgggaggaggaggaggtggcgccgccggaggaccccgccatggcggcggcgggaggggaagggggatccggttagggttttcggggggatttggggattgggatgcttagggttagggttttggtggctttttcccctttttttagaggagggtttggatctgaagcgaggagcggaggggaggaggaaggaggcgcaacgcaagagcggagcggacgcacgcagccacactcctctccactgtgctgtctgcctgtcttgtgtttgcttcttcgcctcccgtcgctggccctacttccattttccgggagcattgtttctcccgttttttttttctctataccgtgtgatagtgtcgaaatcaaaggaatttctaatgcgttcttcctagtggtttggttcttgggatttttcgtagcatgtcacaaaacatagggaaaaatatcttttaaataaaagcaacggcaatacagagctctaccatggatgaataaagaatggtgttataaacgctcttctgattacggtgatagaaatgagagaatcatattaggagttagcatagaaattcctatgagacgaaacgaggatgtggcagcaaggataatatcatggtaccttatggagtcatagcttcctctcttttgatttcgttagcagacctgaatatcgagtaatggctacctaacaagacggtatcgagattgaagatgggtgcgatgaggaagacgactgttaccgatttgtgggacccatataaataagaagagagatatttaaaagtggtggctaagttatttcaaagcggtatagcccggaaaataaggagttgacaaaagcgacgtagccatcaattgaacatttggcttgattgtcttgccgcgtggatggtgtaacgtgctcaattgtcatagattttaccgtatttatgtgacatcaaacatacgtacatgtgccactgctatctagacatcagcacttgtattttttttgcgtcttgttcacaaacccatcttcttcgacaatggtaatcgcaaccaaagcaagtttttgtcaaataatagaagaggaataacacaacaatactagggagtagggataagaaaaagtctgtggtaagagctgtgacatcatcgaagccattggctagataatatgtaggacatgataaagacattagaatgacacatatcttttttgaaaaatcccagcaacaaaaatcagaatagtaaagtcatacaaggcggcaaccaacggtaataaagaacaaagatagcatagatagatgttggaggtacaataagcatcttgtgtagcatagccaatgccagacgttaagaactaaggcatgtcattaggataggagcaacagtgatgaaacatgagcagagtggtcatgtggggaagcactataaagtgtaatatgttagtcacattcacatctctcgtagaatagtaataatcaccacttaagtagtacgaaagtatggatttcactgggagtagaaaaatattttgcgaactaacatatcataaaaagttagtcgtagaaaaaaatttaatcctaacttataaggtggaaacatcaattgaaatcgatggtcccatacatactacttaaatatggtttagattttgaataatcagattcctacgaaaaagaattctatatagttaagtggaacgaagaaacaactctccttattgtaatacataagaatcgcattcacttgttaaaattttgaaggatttttaacatgagattcaacatgttaaaagatatcttttgtttttccgtgctccaattaaacagttattcctgtattttttatgctttttttcattcacgggattcaagatgctaaggcactgaaattttacaatttttccatattcatgatttcctatgttccaaaaattccgtgtctccaagaaacggctaacgcatacttgtaatcagtagcaaatccttaacaatagttacataatttagctatattttgatactacccaaaaaaatcgatgaggatcacccgataccacaatgttagacatttacccaaaggtaaaagtatgttgtcaacataaatagtactccctccatcacataatgtttgacgcagttaactttttaaaacatgtttgaccgttcgtcttattaaaaaattaagtaattattaattcttttcctatcatttgatttattgttaaatatacttttatgtatacatatagttttacacatttcacaaaagtttttgaataagacgaacggtcaaacatattttaaaaagtcaacggcgtcaaacatttagggaaagagggagtattacaataccattatgtttttttttacattacaataccagtgtgttgtcaacataagagcaagtttaatagaatagctaactattagctctaattcatctatagccaatctaatagtttattcaaacaatatttatctataaacatatactaaaccattaacatatgatctcacttttcatacacaccttgtgttggagtccatagtagtatgttttccttctctcttttttttctctcctctacatatgtttaatagttgacttatagcctgctattgcacttgttctaattcaagtcttcatatactgccatgatttaccagaagcagggggagctttcgggaaaaagaaaagagatgatcacagccagcaagttccaagcaccagtgcacgaccacacgaccatcggagaccgtgagcagtaaaaacagatttcacccaccgcacggggagtgccgccgtcaaagtggctgtccatcgccccatcgccagcggtaaaaaaagccgcgaatacgggcgacccatgccaatggcacacacagacacagtcactcacacggatggacggcgacacgttcatgtggccggccacctctcgcatgcatcgccttgcctctcacttgcccatcctttcacctcgttcctttccaaatccatgcaaaatctcacccggagaaagcaacggtctccgcctcccccctgcttcacagtttgtttccatatttggtactcctactcctaccaggagattcttcgatggatgcatcatcatcacttggaatgtagcactaacaacaatgccactcactccctcacttgtcaccatctcggacacagcaaaggggtgtgtgtgagttgtttttcttcttattcttccacaaataatgaggtatccacaacatcagcaaaaatcatgagctcttgctgtcttgcatgacaacaaaatggaacaaaccaaccaccaggatcacaaagatgctcacaaaaacataatcagcaccactgttattagtattagtgacaccaatccatatcatttcttcaacaagacaaggaaagtactaagcagcaatcaaagaatgatccatccattattgtggcaaccctctcctctcaaaggagaaaacacaccaaacacctcttgtcaaagcctagaacatcacaacaccatcccatccattcctagtaaaagctactactgctgctagtacggagtagaggatagtagtaacagcacaacagcgaagaccctgatcacgcctgatggagaaacacaggaacacctgggtgcttgacttttccccttccaggaaattgcacggatgttgacctgactatttgggctcacaacacctgaaaatagaatgatctactagttgccatatcattgctcaaaaccaagagctaaacatagcaaaacccaacagatctactagtatacaaagcaataaacggaaacaaaccatccatgatcacatcattaacaacagatcaatcaacagatacaacaccagcacatcatagatccgagcagcacaacagccacgggagaacaaaccacaagttgagctgaataatcaaccatgctgtcatcatcagcggtaagtaaatcagtcaacactgtgtgcagatcatgcaataagagacacctgggaggcaaagattcttcagctgaaaaactgcattacttggtgcagatccaggagctaatctcttgcaaagaacaagagaaagaagatggatcataagctctttcttacattgcaacgttacacgctctactaaaaacactactagtaacattacagctaggcaagaacaagtaacagtaacaggaagaacagcagctactacatcatcatcatcattattaacttggcttccactttgatcgaactaattagctggaaaaactaagcaggggagaagaaaaaaaagggtagagatctgtctagtctctcccggttgagatcatgcatgttaagcaagcaaatcactctttcccatggctgcctcctttcctctgcttctctctctcttgctgttgctaggtgggtaggtaggtagggtggtggttcaggcgtagatgactccggaggagagggccatgaggaggatggccgccttctcctcctcgccgaggcgtctcctccgccgcatccgccgccgctgcttcaggaccacctccttcccgaaccccaccatgcggagctccatggtcacctcctcccctctctccctcttgctcttcttcttctcctgccgctccgcgccgccctcgccggcgtcgagccccagcgcctcccgtctcttcttccggtaccggatcccgcacgcgttgcacagcgactggatcaaagcaaaaaaaaaaacacagatcgggcggatcaaccaccgaaaacccaggcgaaaaaaatgcacagatcgagaaagggaagagcaggaggagcagatcggatctcatctcaccttggggccggaggggccgccgcgccagagcggagtcttggtggtgtggcagtcggtgcacgccttgggctcgccggaggccgtgcgctcgtccggatctatcgacccactcccctgcaacccacagatcgagcgtcaaaaaaccacccagccaaggcgccattccagccacagatcgagccccccaagaacccacggatcggaagcttcaccttctcgaccgacgaggaatccatctccggcgccaggatcggcggatctaacaccccggaagccgcagcactccccctcctcccacacctccgctcagccgccgctccgcaacacccgcgcacaccgcgccgcagacacggctggtgctctgccgccgccgctcgatccgcgggcagatctccactccacggatctactactaccagagagagcaatctagctagcaagctagggttagcaccggctactgggagggagcagtaggggttaaggggcgggagaagcaaggaggaggagaagaagagggaatggtggtggtggaggatgaggtggtgagggtgagaagaaaaagggggagggatttggatttagatctcaaaatggaggagggaagaggggagcgagtggagggaaacagaaaaccatggagggaaagctggtgaaattgggcgcgtttatgtatgcactacacacacactctactctagggttgtttctgttctgtctgaggggtttgtttggtttggttgagtgatgatgatctatggaaggttttagaacaaccaggatcatcgtccatcacctgaaggccacgtgtgttagtgtgtctaataattttcacttgtgctagcacatggtttatttgataggctcgtgttttactatgctgttgtagtgttttatttgaagatatttgttgggcctataaacgatagtgaagttgttaatattgatatagattatttaacggctagcgacatgatatgaacagaaataagctacttataaatttatacatatacagatatgatttacaagcgtctatttaaaatatacttaatatagtacaaacaatagaaatatgcatataacttttttctaaaatcaacataaatcaatcaaattcatcatgaacttttttatggacaatggtcacagtaaaaaacaaatgccatctactggagtagtagtatgagagttactctgacgattctttttcttcttcttcttcggctatgtttagttccacgctaaaattagaagtttaaagagattgaaacgatgtgagaaaaattaaaacatagtatagaaaaatttgatgtgagaggttaaaagtttgaaaacagatccttcttcttcttcttgtgtcgcaagcaagcaagacaagccatctatagctcgtacgaggctataccaggcctaaccaggccgcggcggcggcagttctcatctcgtctcggcgagtccactccaacactccacttcactcccctccaggcgtggcgcgcgcgtgtgcggcgtaaaggcgtcgaccgttgccgctggcacgcccacacacgcgcgcggccgcaccgcatcaggccgacactagaacccaaaaaggcggcagcagcagcagcaaagcctccatccgctgcgcggctccgcgcaccggacacccaaccgccccggcgcctcgcgccgtcacgcgcgcccacgtggtccccccacccccgcgccgctgtttgctgctttgcgaaaatttacgagcccgacccggacgcatccgcgggaattccccccgcctctgcgcgcgtcgtctgcattgccgcgggaggtgaaatgaccgctttgccctcaccctctttgaccggtcagaacggcccggccaatctctgctcgggctcggcccagtgagaccttctagaaagtctctctctttgatgggcctaactaggagcacatggtactaggcccagcccatgggcagcaagaacatctcgggggtataaaccctagccgctcgtgccaccgaattcctccggctccgagcaaaaaccctcgtcttcctactccgatcgagaccgcgtcgccgtctccgagatcgccatggccggcggcggcgacctccagagcccgaagaagcggaagcgtgatgcggcggggaagcccaagacgctggcgaaggggggagacgacgggaagaagcggaagaggccctcagatgccaacatggcgcaaggcggcggcggcggcgaggtcaaggtgaagaaggagccggttactgccaaggagaagcgcctggctgctaaggtatcgttgttgctcgtccgctcggtaaattttaatcatctctggagctggagcatgggttcgaggcattagcgctgaacttggtgtggtgtggattggtcaggaaatggcagagtcaaggaagaagaagaggaaacggaattacagcctcgagaaggtaaatttggtccctgtacgatctatttcaacatgccgggaaattcatgcctattgacttatgagccagagtatgattccaggaccaactctcataatgctaggcaattggaacaatggtgtgttcagggttttattttttttaagatatattctcaccaatatattctcacatatagagcttatatgttcacgaatttcattagaagagtttaattttcgctgcattagttgaacattgaataaggggaacctactattttcatggtcatgtgttatatccaatcttgatcttcactcttggaactatatgacatgaatgcaaaactgtaatttgattctggtacccttgtcactggtggggatacttagcttcacgagaatagctacattgtcatatttctctctactaacagtaagcattgggtgtcaaatttatgttggtttcattcgaatctagtttactgattgcatttaaatattgtcaggagcttactgtactatgggaaaagatgcgatgccacaatgtgagcagcacggagagatctaagtatgcattacatcattgtcatgactcgtatctttgagatcttacagtgacaaatcaatttattatattgatttttttctcaaaatatccaggctggtaagtgaggctctccgtaaaatggatgggaaatattcagaaattgctggttcccacgtaactgcacgtgttttacaagtaagatgatcaatcgatcatattcatttgtatatcaacatgttacatggttttgatgttctttttcctggtgttgatgagcattgtttcttttggcagacatgcgtgaagttgtgctcacaatcagaaagggatgcgatttttgaagccctacagccagatttgctaactctctctctcaagaaatatgctgttttccttgtaaagaagctcattaagcgaggtaaaagctctgttgggttcatacatgataatatttctttatggttggatatgccattggctccattaacatgcctgtatttgtgattgcagccactaaaaagcagtttgaatggttcatctcttctcttcacggtcgtgttgctaaacttcttcgtcatactataggagcttcaggtatatattacttgttattgtaagagatggcataaaacttgctattttattatcatttgttaggaaccttaagagttgatagttgtgtgcaattcatgtgaatttgtttgtattttatctgtacatgataaagtaaatgataatttaatgttatgccaattctttttctttcagtcgttgactttgcatatcaactggcaacaccgcctcagaaaagaaggttgctattggaattgtattctactgagctccagctgttcactgacctgactggacagaaaacccacaggtcattgcactaaactaactcatgtttctgttttcaaatttccttgctcttttgattgttctatatgctttctgaaaaaaagattcgttttcactatagatcaaacaactgtctgcggtaacaggctactgcaatttgctaacttaaactccctttttcagtttgttagagacaatttccaaccttggattacaaaaatcatctgtactgcagcatatgactaccgtgatttatccgatcttggagaaaggtatcgttgaatatcctatagtgcacacggctgtattggagtattttacaatcgctgacaaggtaatgctatccatttattgtgtagcctatctacagtctaaacatgcctttgttggcatatcctttccttttggtttgtctttatcacactgtcctataatgcttgattttgcagacctcggccactgatgtgattcgacaatttatcccccttcttacacaaggatcatctgccattgatggagatgagccatcggttgcccctgaattacaaaagaaactgaaagctaagaaaaaaaggttgacagagccacttcttgttcggattatgaacaccagagaaggattaaaaataggagttagttgcctcaagcatggaagtgcaaaggtaggttatatttttttttctctgagactattattttatgttgactccataccttttcttatgggacactgaagtagcatgccaaatgactacccattacatagtccttcctctgtttttttcttagtgtggagattatcctcataattaaaatgtattcggcttccatgtaagattccgttaactttgtgttgaacttcaggataggaagaagatcattaaaagtttgaaggggcacattatgaagcttgctcttagtgattatggatgcattgtaagtatgccagtgtttacatttgcagttaccgcttggtgaaaacaacattatgaataaaattgttatatgtgaaagaacttttttgctaccgaagatttcagtttattttgtgctcaaatgatttatactctactgatatgtcatcttttccctttcagttacttgttgccattctttccgttgttgatgacacaaagcttgttaccaaggttagctagctccagtcttctatgcacctgttctgagtattgtgctgtgataaatatcgtatggagcatttatataacacttttgtttgatttgatagatcgtaattcaagagctcgccaaacatttgaagcaacttatttttgacaaggtgaaaaggaaaactgagcttctgatatttttcaaaataaatccacaatgcactaatagtaatgaagcttcttgttggtacagaatggaagacgtccattgctgcaactacttcaccctaattgttcacgctatctgcctccagctgatctggcttgtctgaactatcgtgtgccttctcttatttcaaaggcaagctagctattctgtttagtattttaaggagaacatagtgaagtgctgtgttataaatattccacttttggttaggatgaagcttccgagagtgctgcagaagatatcccagagaataaggtggatgttgcaactaataaggagcaagatggttcagaaagcatgcagagtgcgtctgacagcaaaaaggacccatttcaacggcgacatgaattgttgatcaaaagtgaacttgccgaggtgacatttattcagtgctatgtttattcaaatacagtgttaaaaggatgcaccttttcacattgattactgcagtagggtacaatatgatttctttggtgctcgtttagtcgcaagcagtagccagtcacagtatgtatagctacatgcccaccatgtcctaaaccccataataccaacatgcacagcattttgtgtgctcacgaatattattatataaatgatggcaaaatggtccattagggattttcctatgcaaggtttcaagtatgtaactggaaaacaacacttacaataagggtctactgtattttcttgtgtgcccactattttgcccaattagtgctgacgtgacaactaacataagttaatcgtgatgaatttactagccttgctcataggcctttctttttgtgattattagatataatatctagatgccatcgtggcagcatagagttacttgtgactcaaagtattgaatatgctttatgtggatttaatataatgcagaccttcctgatcttttctcaggtgctcatccagactctcattgagaatgtcggggagttacttcgaacaaattttggcaaagatgtattgcatgaggtgaactacttttgtccttgcagatggtgaaacctgctttttattatatgctaacaatttttcatgtcataacctcattggcatggcatgatctttggctggtactcttctttccgtgaatatcggtcacttgtttactgaatcatgtatcagggaaatcatgatttgaataagttgcaccaagaataccctttcgtagtatatcaggcacaaacgagttagtgaaatacgatacacagtcataatctggaatattgaagcaacgtgtctttgccaatctgcggtgcttgattgttgtcattgtataaataatgtttcataagtgccactggtgtcactctgatatgttgacatttgcaaatctgaaggttgcggttggtggagaagataatattctggagggcatcactgacaggatccacagcttgcacaatgcaatagcttctgatgcagcacgtccaaaggcagaagatactgaacatgcctttgataactatcattccagccgtctaatcagaagacttatacttgaatctccagcatttgctgccatcctatggaaaaaagctcttgaaggcaaatgcaagacatgggctgatgggcacaggtacctcgatttttattgatatgaccctctcgcctcttctcatgttttccaggagtcacatatagatatgttctattcatcggatatttataaaattcaatcgttgattggaatttgacaccagtccctttaggtcatattccggtggcattgtctaatttatcatgcatactgtaaatttctgatattctctcagcttgcttgttctgcctgatgaacattttggttttgatttcttgatatttttattcagttccaaggtggtcgcagcattccttgaatcgcccgattccaaggtaagggatcttgcaaaagctgagctgcagccgctggttgatcgtggcattctgaaaatctcagaccataaagcagtcgaaaaatgagttttgcacctgacttccaagcatctacagcaatacgagaaatcgacagacgaacatccgtgcttctgtgttggatgttttttttgtaacatgagtatgttctgcggagcaattttgtcacctgttaaaagagtgtagctactgctgtcaccagtgagtgagtattaactctccgtaatgttatgtacctttacagtaaaattgcatttattttggtatgactgcaagatacgaattctccggccgtgtttgttctgcataggaatgcgattgataattttattgacaactgacctgaacaaatcttggagaaaacggatgccttaatcatagagttgtcatttttaatactagaaaacgatttttgcaaaacacttacaaatgcttcaaaacctgggcagtatttagagcagtatttagagcaggtacaatagtaaactattagccagctataaacatattttaatgagataaaaaagataagagataagagcagcggactgtagatatgtagctagctgcagcacgaacttcaagacgcagtgtgtatatgataggtgggatcgtatattaatagtatagttagctattagattgactatagatgaattggagctagcagtggacagtggactatattattaaacttcttttagtgaatttcactgttttcctcttcttgttgccgtaaaatgaactaaagaaagctaagcaatctgaaaatgtaaacgattctttgagagagaatggaagctaataaatctgcaatgtcactagcaggagttcgtccgtcaccaatgacgctttgttcttgcggcgcgctccggcgcggttctgatctgatacaccggcgactcgccggcgccgctgccgcaccatctctggttccgatcggcggcgaggttctcctcgaaccggcagaactccgcggcgaacgccggcggcgggggcgggcgggtgtccgggtagccggggaaccgcagccggtcggaggggtcgaagagcgggaacgactggcgccgccgggcgccaccgccggcgttggccttgaggcagctgtcgatgacgcggcactcgtcccggagccggttntgcacctcccgcagcgcctgcgccgcaacgggaatcctcctcccccagcagcagccgccgcggtgcttcccgtgctgcgcgccgccggtggccgtcgccgccgccggcgtcctcctctccgcgcggtgcctgaacctgtcgtggcacgcggcgcagtagctcgcgcccgctcgtcgtcgaaggctcgccggcgagccccgtcagtgaggcacgcgtgcgcctgcacacgttacacgatttgatcgtcgcatcaaaagcagaaaccgcaacgaaacgaaacggtttttgcagaattagtatactattacgaggcagtaaaaactgtagcaaatcaccacgtttaatcactgttacgttaaccacgaggattcaaagtttcaaatcgatttgaaaacgccgctctgtgggcgaccaccgctgcagtaaccgatggtggcggcgatcgaaaattgaccatatctccaagaagaggagcccaatgcaatgcaaccacccactaaattgaaagcaagaaaaaaggcaaagattccaagccatcattaggaagaagaagcatgcggaggcagagattaccaacctcggagacgatcttgaatgcgacctccgcctttgcgtgcgtgttcttgtccgggtgaagctgcagcgctgcatgcaaaccaaaccaaatcaaatcgaaccaaatcaaaatcaggtaatccgattcagggcattgcattgcgtcgcacgcaccgagctggcggtagcggcgcctgacggcgtcctcggtggcggcgtcggcgacggcgaggacgaggtaccagtcgacgaagggcggggatcgctgccggcgccggtgcgtgcacgcggagaacgccgccgacgccgcgcacacctccctcaccgcctgcgccttgctaccgccgccgccgtccgccattgccattgcccccaccgcgtcactcgatccgcttcacctccacggccatgcacattcgatcgatcgatcgatcggccgcagtgagagccgagccgagcagtgcaggcgtcgcggcgagatgctaccagttatagtaaccgtgtccacttcgtctctgcgtgtgaggagtggagtggcgagacggtaccgttcaaagcagcgatgagaggagatctcgaggggggaattcaacagcgcaaattgcggccaagcgacaaaaatcagaatagggaaataaaaaaaacaaaatgatttgatttaacacggatcaattaaattcatcacatactactagagaaatatttatcctgttttttaataatatatcttattatcatattactctctctaataataagtatttgataattatgataagatttggtgaaacttctacaattccgatcatcgataatttctttctcatattgttggttcaaagattaaataaattatgtacgtatatttgacttaaaaaagactatcgtaatttaataggtccatttatggatctatatgctttgattggaaccaaaagatctagaaattacagtcttaatagattttgaaaatttattctaataaaaacttcaccaaattttctactccttccgtttcatattataagttgtttgacttttttcttaacaattttttttagatttgactaagtttatagaaaaaaaatagcaatattaatgatatcaaattagctccattatatttaactttgaatatattttgataccatgtttgttttgtattgaaaatgttattatattttactacaaacttaatcaaacttttttaaaaaagatttaaaaaaaagtcaaacgacttataatatgaaacgaagggaatacttaacatctcatttatgggagtatcttttatggtaccacatgttagtctctctatattatcttccgatgctctccttgctcgaatgagtacatgttgtatggacagagggttgcagggatcaaacaagtgcagctcgccgacgagatttggtgtttgtcctgttgctgtaaacgtccaatgttttaggttggccatggcgatcaaagtcctgatgacaccgaatactgatctggaaatggaaatgcagagctgtgatcattcagatttcagagtttcgcatctctgatgatcgtcatctgaatggaaccagtccctgtttcttggactaaacttctcacataatccagttgcgccaaacattcagctggatgattggctttcaggttccgattgttcacactgtcactacgattggaagtactcgtagtataataatcaacaaacaataacagtatattatggtcttacagtttcagataataaactccggttgtcagtcagtcgccatttcaacgagactgaaccagaaggttcatactgaaccaaacatttctcaataatctgaactgtatttctgtaacatttgtcagccaggcaggattagtttttccttgagccgtgagaccctgacaccagtggctatgtcgaattctcgatcgattggcaaggctagtactctactgctacttgacaaatgaattcagtcaaaagagagagttgcttcgagactttcaaccagaagcactgtatcaagttaggctgctaatgcatcggttgccgatgcaagaattttgtccagtatacttggatcaccacagaatgccaataaaagaataatattttcaatgagcaatgaaatactattttcattttgcaaagacctgaagaacgactgaacacactagctaaacacgaaccctatcttttcaacgttccaatttgcgacgccaaacacaagcaacaaagaatccaaagctgatcttggaacagtgtaaaaattttacacacccaaccaattgctaatatgagagagcctttggagtaattgtggctgttcacagctaaactcaaatctgatgctagaataataaagaagacatattgattattgaagcgtagctcgcctgcagcagcaatcagacagagctaaactgctataaacagtttggtggctgcagaatgcggctaagattttcgagcttcatgttgcgatgatactcgaaagatcatacggatatcctcccagcaccatctggccgtccgtagcttgatccaacggctcggagagaaggagatcttcttcttggaaaaaaaaaacattcacgtgccactgcatgtgggccccacagctcagggctccaaactctcggcatcttcccacgagggtgccagcatcatcactcaccagtcaccacggagtaaaacccacggcctcattgtccttggcgccctcttacatgtgggcccagtggtagaagcgggcccacatgtcggtgtgtgtggggagtaatgggtgagaaaaaacccgtggtttttttttcttcttggcagcaatcatttcggtggggccatgtcgagctgaccaattggcgcttccatgtgatccacgctgtcatcccgggcccaccagctctcccttgtcgataagcatccggagctcgctgctgttcttgtttctaattgctggtttctaccagggccttttagcaaaaggggacaaataattaatcctactagcattttgtgatcttgagatccactgttttgtttggatgattgaccgagcacgaacgtaaaaaagactgtgaggaaagcaaattgtactgtacttatattcaataaatccatttttagagatcgttttacaatgcgaaattgcgaaccgagagccagaacattccttgaaaattagtagacctatgaaacttagggaaaatgcttccctttttttgtttggggaaaagaaaatggatcaatccggtaaataacatcgcgcctgcaatggataatttatcgtggtgatgtcaaataaaaatggaatagcgtttggggttatgtcgaatttcctttcattcaatctctatcgtaattggaatagtagtgtttttctattcaaatgcaaatcacgtgctctgagccctactcatgaacaatgattggagcatactaacactacagtacaattattgccaagaaaaaaaatggtacttgatgcgcagccatgttttttttttatgcttaaccgatgaatatgcaagtacacacgctttcagttatgatttttgtaaaacagctttacgcacatactactaaatcttttagaaaaaatgtttagattgttttaaactttataatagttaatttatttatttatactattttataattatcataaattatgaaggtattcagccattgatgtaagaacattatgcaagtggagactatttcatctgaaaaatgtcagtatccagcgatgacatcaccctctcggcaaaccattttattttcgaaaacgacctccacaaaccaaacatatttggctcacaagcttcccaaaaattccaggacgaattcgaaaaccaaatttcttaggggctctttagttcgcaaaacaaaattttcacctatcacatcgaatgtttggatacacgcatggagtgtaagtagtattaaatggaaaaaaaaccaatcacacagtctgcatatagattacgagacgaatcatttaagcctaatttgtgctatgatttgacaatgtggtgctacaaacctacagtaaacatttgctaatgacagattaattagacttaataaattcgtctcgcagtttcttagcagaatctgtaatttgttttgttattaggctaagtttaatatttcaaacgtttatccatgtatccaatgtgataactaaacctaaaatttttcccaaactaaaccgtgccttattttaaaaaccacctcacttcacttggggggcaagttgcaagtctcaagtttacaaatccacccctttcacaaacaaaccgaagcttcttctccacttcgtcccacacttcaacgcctcgcgatcgatcgccccaaatccccgccgccgccgccgccgccgcgaatcgccggatgcccgccgccgtcgccgccgcgggggcggcggcagcctcgggcaccgcgctgctcgcctacatactcctcgcatgctgccggccgcagccggcgccggaggccggcgaggaggaggaggaggagtcgcggctgttgtcgtccggggcggaggcgcgggggagggaggcgggggatggcggcgaggaggaggaggagtggccgtacaggccgccgtcaacgtgctgcgaggcggcggcggtggccgcgcgcacggcgcggcgcacgtgggacctcaccgtcgggcgctggggcctccacggcatcgccttcgggatcaagcgccacatgaagcgccaggtccgcgagatttttcgcatttcacctcgtgattcctcgctcttgtgcgcgattactgcgatgctgccagtattcagttcttctgttcgtttctgtgtctgcgctttgcgtttcttacttgcaaattgaggatcatttcgctcgatggctttaacgatagcgactgatcacgatgttctaactgcgctcaaatcgcactgagcggcggaacgtgtagttgctttgcttcgagtggactttttcttcgttttagttttactcttgctgaaaattttggtgtaaaaggcaggatttatgactatttcaaggtttgacttgatttgacttgcaagtaagactgcttttgcctttttatttgggaaataaaggctcaatgttgggtcagtggcttacaatagcttcacctctaccactaattcaatacattcctcgtacttgcaatgtcagatcatacttaaattctgtgcgggacttaagatcgttgatgtaaatatgggtaaatctcatggatccgtaaggtcggattcatggattttttcagagtcaagctggtcatggtggtcaaggtctcctctagatgttgatctgaagtgagaaacgtttccaactgttctgaacttctgataaccaatcgatatgcgttttatacagagctggttattttgttgcgcatgtgtgaatttgctagaagaacaactaataaaattggaccagaattctgttgtcttgctaaaactaaaatggttgctcaaagaagaggaaacaggacgcactcaacattcagttcaatataatgtactctgtttatctgcagatgttctttgcaaagctattcaatgcatcaaaactcaataagatgtacttcccgtgagtgaagagaagctggctatccgatgttctgatgaatcagcataactagcattttgttctttaagacgtaaattcggcggtagtagattgtttgctgaagcaattcagttatgcagattataatcagcttggttctgtatagctgtcttgaacatattacatagtcaatggtgtggaatcatattgtgactgtattttttcctgtttgtgtgctctagggtgatttgcagcatgagtatagtggaaatgattgccttcaactaaaaggtcacgacgcacacactgaagtagcttatctacttgagcacttgaagatttgcatgttctactcaaagaaaacattttcagcgtttcttcagtttggtgggtacaatcaagaagacattcttattcacaaggctagggcgagggtgagtaagtatcactgtattcctcttatctcatgcttaaggtactcacatttacaatttgtatttgttcctccacattttgactcactcttaactatcaacttgatgcagcttatgcaaccttctttcgcgcttgtgtgtgacaaaaaatccaagtgctttctgcttttcattcggggtgctatcagtactaaggagcgcctaacagccgcaactgctgctgaggttccttttcaccatatagttttaagtgaaggacaaatcagcaacgtggttttaggatatgcacattgtgggatgcttgctgcagctcgttggattgctaaccttgccaagccccatcttcacaaggcagtacaagaattccctgattatcaaataaaggtatttcttattagtgctatgcatggatgaagtgactacaatttataggtgtagccgctgcagtgcgctgtgatctatatacatgaccttatttgaaataatttgtttttgataaatatcactgagacagttaagaagcgtaatcagatctctccttttgtcttttatgtcatgtttatttttgtgaagatttctgacccaaattatgtctccttatttgtcatttgtactaggtcattgggcattcaatgggagcaggtatcggagcaattctgacatacattcttcatgagcatcatgagttctcatcgtgcacgtgtctggcatttgctcctcgtaagtgacttattcatgatttacatctttaaagccacactttgcttagtttttgcattgtgccttcgagatattatatggctttatgattatcaggtgttttcttatattattttcctgagttgtaactttgttctgtttcagtacttaatgggtgacaaaagttgttttggcactatgttctcatgatctcatccatgccaactgtttggttgaacgttcttgtgtacaatttgcattattggacagtgatggagaattagccattgttttatacagatatgatagaattgcattgacttgcaagatttattttattaggctacaagttaatccaggaactgagacagttatactattttctagatttaagagaggaaatgctttcagatttttaaagggttcctgttttgtatagctgcctgtatgtcatgggagctggcggagtcgggcaaagaatttgtcacttctctcatcaacagaaatgatgtggtcccggccttttcaaaagtttctgctgagaacctgcgagctgaggtactctgaatttctgatggccagtgtcttatgtgtcagcataataaaatcagaccttcactagtatgaacttcttttgtaattaacaaggaaacattttaagaacttagcaaagtgttaatacattaatttcttgtgatatttcaagaaatatgtgatgcaatggagatcttagcttcaaacttgaaatgttaacctcattggcatactggacagtggccatataaaatttctgataaattgtgaaaacgaccatatacctgattcccaacagtgttctatcatcactgatttttttgtctctactgcaggtaatggtatcatcaaagctagatgatgagcaggatcaagctcactttagcttatttacggcaataagtaagcgtgtagctttcataaagtctcatatgctgtcagtatctcatccaacagagaagaacacagatcctgattctagcatatctgaggtaatacctcttaggcactttaatttctactatttaaatgattgcttctgtcacttgtcactggatcctaaactagcacaatgataattttgcgtccttaagccacatgtgaacccagcacgagtattaatttgattacccagcggttttaatgactgttaacagctgatccagcgatcctttctagcatccaatcccaatcaacaccgataacactgtggcgggcatgctaatattatctgttagtatactaggtagtaggcatatctttggtacggatgattttccttccattggccatacaagcatcacatctattacaaaagggcaaaatgagaatttccatcatgcacagttcctgcttctccgtgcagtgtaccttccaaaaatttacagaagcaaagtaactcttgggtttactgattagtgccaacgtgagtacagaagcaaagcaacgagaggattgacgattttctgacaccctatttattctgtcaatgcagcccttgctcaaacatgtccccgaaatcacgcagcctgtaacaaatgggctaagcacagactgcaaccagcatcaaacggacctcgttgctaatacagagcaggacttttcagctgtatcagttgttacctctgaagaaaagattgtactatctagcaacgataatgttatcagtacaaagtctgttgctggatcaggctttgcagcacaaggggatgtgaacatcaatggatcactggacactgaacaagaacaatcatccttgacagggcaggaggaaccagaatcactgaagcagaactgtgatatcaaagacaagctgaaagaaccgctaccaacctgcagttcgcgccagtttttccctcctggaagaattattcacatggttgcaatggcctcacctgacccaaatcctggtgagggatccagcagcaatgagatcattagcatttatgaaacgccaagagatttgtatgggaaaataaggctagctccaaacatgataaaggagcattacatgcctagttacataagcacaatggaatcattattggaacagctgctcaaagacgataatgtagatacaataacaaatgatttgtaaattatgtaaaaactcaataaattattaatccaattctttgcaaattgcattgttctaaaacaatttccatatgcctgcatgttatttctgtcccaatgctactctgtatatataccactaaagctaaatttgcatggtcaaagttggaaccattccgttgaccggatgacgtggacatcctccgtacggttggtctctcatgcatgcagctgtaaatcctctcggcctcacgctctatatcatcactttcaagtgttttcatgaaaacgaaaatttagctcgccatcacgcagatcgacatggctgctgcttctctccgtctggtcgtcgtcgccgccgccgtcgcgatctccctccggggcgccgccgccacggcggtgaccgtggaggacgcgtgccggcacacgaggcacgaggcgtactgcgtgaaggcgctgtcggcgaggccggagagcagggcggcggcgttggacatgccggcgctggcggaggcggcgctgtcgatggcggcggagagcggggcggcggcgacgtcgttcgtgaggaacctggcgaagatgcccggcggcatgccgccggagtgcctggaagggtgcgtggcgaagttccaggaggcggtggcggagctgaggcggtccgaggcggcgatggaggtgcgccatgacgccgccggcgccaaggcgtgggtgacggaggccagggcggacggcgagacgtgcatggacgagtgccggatgacggagggcggcgccgccccggagatcgccgacaggatcgacgagctcgccaagctctgctccatcgccctcgccctcaccaatgcgtccatgagcaaacatccgtagcaaatcatcgtgtataacaaaaacgagatttggagggggagacctctatccaaacatttattaaaaagaaattatgagcgtgttaaagattgaacacgagatctcggaatcgggattgaaaccatataccctttaccactgtactatcatgtgcatttcatgtatcctcgtgtatatatacgaccaccaaattctctcttgttatattcatgacttgagcacgtctcattgcaacgtttcaaatttccaacaaaatttatgttggacacatcaggctatgtaaatctgccaaatttcaatttcaagagtaaatattgtatttatcatgcattagcttgtgaaatagatggtatcacctatcacgtaacagaccaaacgggctaaaaccggtgacgaatgtggtacgattcgattggtttggaattttggatgctgagtgagattcacaaaaggccagaaagggctgagtacttagaatcatcatttttacagttttcacacaaaatcaatttaaatcctacaaaaactatcccaaaatcctataatccagatgagccgaatattcttggatgggccgtggagactattgcagcccacagtcgcccgtcccactttcggaataagttcatctgaggtccataaacttgtcaacgaatccgattttagtccttaaccccaaaaccagatacaacgggtccctcaactatcaaaactggtacagataaggtccttctgtggtttagatggcagttttggctgacaaggcgcctgcgtggctattttgactcggtcttcatcggacatggcactgacgtgacgcttatgtggcaattcgatatagaaaaataataaaacccgtgggacccacatgtcagttacacaaaaaataattaaaaaatagtggggcccacgtgagccccacatgtcatcctcaccctacccttcttcctcatctctccctatctcccctctcctctctttccacgcgccattggacggggaggttcggcggccggtggcggcggcagcgacgcaagagaaggggcggccggctgggttcctcaagggcgacgacaacctggacgacgacgacgacgactgcggtggcgggagcgttgggtgaagggggcggagcggggcggccggcgcacgcctattaacagtgaaatttggtaatcggcaaagacgtcatcggcttagaatcattatctgctgcagcatctcggaatcagccgatgggagttatcaagtcgccaatagtcggattcctgctatattcggttaaggaaatcaatctactaaaggatacttatccctaagtgaccgagtttaaagaggatgcggcatggcagtttatctattaattaggaatagtttgttagtttccttttatctttaggaaagtgtgtccgataaggactttatattttccttttatctttaggttagtttctttcttgtccgacaagggcttgtatcaacccatgggtataaatatgtacacccggggtctatgtaatctatctccacgatcgatacaattcggcgcatcgccaccccttttaccttttctactttattttatcgtctggcgggacttggcacccgacgcggggctgcatcggtgttcgatctccggcttcgatctccggcgaaggggtaagtccaatgtttcgccggtccaggcaattgtatcatttatgtcggcgtcgttcaaggctgcactagtacattcgacctcttggattgctctggtttggatgatatatttgcctacctatttatcatatgtctctgttaatctagtcttagcatatcaatttagctctatcggctgcttctcgttttagggtttttgccggtattagctaaatcgtgtttctagattagattagcttagacatctaccaccctgaaaactcagtcaacggcttgattgtctagatataatgtttcttttcatacttagtgctgcatcagttaagtttgatctactaagtcgtgcttagaaccataatctctagcctgcttcttgattgccaataagggtatcatcggggttttagccggtgagttatctggacgttgcatcggctcataaggattgtatatacatataagttggatttagcgatgacaacaaaggtttcactgtttaatctaatcttgtggatttcatgacatcggacctccagccgatgtgtgctttaaacctcggatcgatgcttatttatcatatcattgctagccgattggtttataccggattatattgcaatattatattatcatcagccgattgcctttatatcatcatctacattggacatatagccgatttatcaaaaccctatcgctatcggctggtatcggcatcggctattatcgactatcggctggaactactctatcggcttgtcagccgatcggttgttttgatctactatttgcatatcttgtcagttgcaggatcaaactgactggcacgcccgcatctcaccaacctttggacctgcacaggagttaagcagatctcctaggccggtgtgttcgattttttcgtcaacaacgccggattcctcaagggtggcgacgacctggacgacgacgacgacaactgcggcggcatggaagcccacgtgatcctcccatgaggaacccgcgcgtgcgccggccgccccttctcttgcgccctccccttctcttgtgccgccgccaccgctgtgccgccggccgccgaacctccccgttccgtggcacttggagagacaggagaggggagagagatgaagagcggggagatagggagagatgaggaagaaggatagggtgaggatgacacgtgggccccaccattttctaattatttttttgtgtaactaacatgtgggtcccacaggttttattatttttctggatcgaattgccacgtaagcgccacgtcagtgccacatccgatgaagatcgagtcaaaaatagctacgtaggcgccacgttagtcaaaaccgccatctaaaccgccgatggaccttatctgcaccggtttttatagtcgagggacccgttgtatctggttttggggttcaaggacgaaaattggattcgttgacaagttcagggacctcagatgaacttattcccccactttttcgatccccctggcatattcggcccaagataacccgatacaaaaaaagcccaagagtgtgtgtgtgtgtgagagagagagtgagtctgatttgcttcctccgcgaaccggtcgtcttctccagcgagacagccgccgcagaaatgggtgggagtcagctcagcctcaactcacttccgctaattcgctgcatgcaagctctcccacgtccatggcggatcccgcccgcgcatctctcgccatggcagcattagcacgcctcgctcacaaaacgctcccgaccacacgaacccaactcccgctccccaccaccatatatcgctcgccgcggtgcctccacccatgatcctccatcgacgacaatggcggcgacacgcggctccgtgcggctcctcctcctgatcctcctcctccgccccgccgcggcggggagcccactgatgatgacgtgcgccaagacgccgcacccggacgtgtgcatcaccgtgctgggcgccatcccggagtgcaggaacaccggcgacccgcgcgtcctcgccgagaacgccgtccgctccgccgccaccatcggcgcggcggcgggcacgttcgcgcgcgcggagctcgacatcgtgaaggacaccgacatgtggcagtgcctggacgagtgcgcgcaggacatcgaggaggccgtctcccacctcgacgacaccgagggcggcgtcgtcgacctcgacgccaagttcaaggacgtgcggctgttcatggacgtcgccgagagggacacgtggtcgtgcgaggagagctgccgggacgcgccggactccaccgtcaaggccaccctgctcgacaagaacgaggcgttcgagaagttcatgcgggtcaccggcgcgctcatcgagatggtcatcggaacggccggcgagccggcgccggagccgtcagctgatgaacactcggacgaactaataccggatgtccagttatgatcaattcataatgtactaatcgctcatgtgacttctcatctccatttttgatcgatcgtgttcaggtattttgattaggttaattaagggcccgttcaatttgacgtcattttcaaccataccattttttttaaagttgtcaaaaaaatgtctacgtttagtttgctactaaatttgataaatatataagaaatcctgccaaaatttggacaacattatcatcttgccaaaattttgatattgccaaaatttggtaagatttattttggctacaatctgaacaggcactaattaattaattagctcttctaattcgttgaatgttttgtttaaccatcaataaagtggttgattcgttcattagctaactaataaatcatcagattataatctttctttgtcatatatgcatctctctctctcccctctctaagcttgagtattctatagtgtcacct

SEQ ID NO: 20874 - DNA, 1942 bp, Oryza sativa
cagtaagaaactgaaaagccccagttcgtttcatttatcgaaaaaatataagggattctaaagatgtcaagaaaaaagtacaacaaacttcacctttgtttttcattcaatacctcaacctaacacttattttatttacttcatttctggtaaatatgccaaaagtacaacatacaacttgtagttaacctgcgcgaacacacgaaaattactgacttgtagcaataattctggaacaattctttgccaaaaaaaaaatctggaacatctgaaacaaaaaaaaaacaattaagagaaacacccttcacttatatttctatttgcatttttgttacattgcatcaactttctttatttaatgaaacaaacctttcctcaaaacactacaaattgaatctgtttttttacaggcacaaaatgcacttgtgaagcttatggcatgatttatatgtacaagatataacaaagacgaagaccattgccggttctgttgtccaaataatctccaaaactaaaatattgaagaaagcttcagagaggctcacacgcttttcaaataagtcgcaatgatgcatctgtatgaaacaaagaaagaacaatgtcagagaaaaacagtctagagtgtcctatatttttaactttgttaaaatattcaaaagcagagagatctcatgtgcaaattaaaaaagcagagagatctcatgtgcaaattaaaaggagaagttgtatacctgtacatggtaagtaccatctgttttctattatgcattatccacaatccaaaaggcaaccttcaaatttcacagctgtccttggtactttttacagcatcagaatcatcagcctttccctcgtccaatttcctcaaatccatggcttcttcatgttcgctgcactgcaccccacagtcaccatctgcatgcgaatcacccaaatgcgccttgtaatttgggttctgttctttgttctccttgccagcatcatcagccaccttgctcctatgcgcccacagatggcttctcacaggacgttctcctctgccaccagcagcaacgctctttgctgatctcgggctgtcaaaccgtttagcagcagcatgcctgttcttctctgcagcttcggtttcagagccaggttgcttattcagaactttccctgacaccgatgcccttggctgagacgccggccttctcttgtcggcgccgtcagctgagatgattggtcgtcttggctgagacgatgacctctttggagtggcttgcttgctagtagcgttgtccttattgctagcagacgtgttggatgattcatttctcatgtcatcttccaacgccttgagcttcctcctgagcttgtcctggaaaaggagccaaagtttcagacaacgacatggagaaattaattgggtgaaaaattgattgaagtatctttgccacgtttctcacattcagctgggcttctgccttggcagacttctcggccatggcaatcttgtcgcgcagccgttgaatctctccctagacggtcattgtgaaaatgacaaataatcagatgataaattgagaaaaatctagtacaaaggccagtaaaatttggaggcgccaccgtgtggtgtacttacctgcaggagcctccgttcctcgagccatctcttgacaggcatcagcttgtcagcatcgtccttccactcgttcgcggtcgtcgacgcgacacggttgacgtagaccttggcgcgagctagctccctctcgagcgtcctcttctcttcctgcaggttgaaaaagctcgtcagaaactaacgtaatcaatccgtcttctgaatacgctaccccctccgtccccaaaaaaaactcctatgggacctctcctaggacaacgaatctgaactaccctttgtttagattcgttattttaggaggagttgagttttttttgggacgga

SEQ ID NO: 20875 - DNA, 914 bp, Oryza sativa
agtggagtccatagcaatgtaaggcctgcatccttccaaaaacccatcgatacagggtttaagagcaacaaagaacctcctaaagcagacatcaccattgcactcttcagtgtccagctcaactacactgcctggcactgatctcaatagctcttcacgataggtaggcagcagatcgtagctgtcatcccactttccatttataatgtcaagtgctctctctctacctctgaagaccttgaaatatgggatatcaatctgatgcttcctattcaactcctcctgcaaatcctttgctccccttgaggggttatcccgcaacaagtccaccactcgatcagctacccacttagtggtgaccattgtttcaccacacttattgaaagatccacaagtgtgctttggtccacttgtcttaacctacaagcaaagaataaatagctcatgtttcatcttgaacaaaaattccaaacagaataaccattcataaatacgcatgtaaaagtaccttgcatccaatgtacttagggcttgtagatgcaaaaaaacaccacttgcaaccctcttctgctcttttgcaaatggctctaaaccttttcttgtcattcttgacagtttcaaaagcatgatcattcaagatagcatgatgggtaactgctaacttgcattgatccacatctgggaacactacaccaacatcaatacaaggatcctgaacatcatatgcaaagacaggtacatcatcatccttatcaacaatttcttgatcaggatcaaactcagggtcagaacaatcagagtcggaagattcggccaaatcagaatcatagctgctatcactatgtgccacaagtgattcattggcagagtatatgccctcatcatcaatgcctactgcatcctcatcatttgac

SEQ ID NO: 20876 - DNA, 4491 bp, Oryza sativa
cccaatgcgcacaacccccttatctatattgagctgaaaccactcccgcaaatgttcatcggattttatctcaacaaaaccatcatccaaagaacgccacaaactcacatattgtttagatccccacgtgtagtgttcagcaatgaaattaacaacttgcagcagatcatacttatgcatgtcaatattttgggttggcaaggttttaccctggaggtattgctttggacctccatccggcaaactgaaaaaagactcaactctaacaactaattgcaaatcgctgtgagtaggcctacaaatcacaacacaagtggcacatttaggtaaatcgtcctaaatagcaaagttatatagagagacgaaaaagcaaccgtactgaatgcagccctaagattaaaatgcatactagctggtagttcaagtatatctaagtatatgtaagtatctaactctaagtttcatctaggtttagctagctctaagttttcatgtccattttcataagatagcatgacaagaatcaaattacctgttgaactcttccatcaaaattagctccattgatatgatttcctccattgccaacaacttccccttttctgccttatcttgccctcggctgtgagaggccgcctccacgtggaagagaactggccgccggctgtgaacctcctgcgagcgggcgccggcgcacgccctcggccgcggcctcgcgcacccgcggcagcggcggcggccaccgcctcctcgcacggccgccgccgcctcctcgcgcggccaccaccgacgccgcctccccgccgcgcgagctccctcccgcgcgtgccggccgccgcctcaccgccacaagagctccctcgccgccgcctcccttgccgccacctccccgccgccgcctcgcgcgcctctcgcgcgcgcctcggccgccacctccgcgccgcgcgggctccctcgccgccgcctcaccgccgcatgcgctcgccgccgccgtcgtcgcgctagcttgctagggttttgagttgactcgacccagggagtcccgacgcacgggaagagaagaaccctatccattcactttccctcaggggtagaagtgtcattacataattcctaaaaccttttttttaatttctttttgtatttctttaacacataatgtgggacccaccaaacggctgtcacaaatgggagtagacggctgcttcaaattcaaaaagtgggggtaaaaatgcaaaccctaaaaaataggggcaaaacaacaattggctttcaaagtgggggcatggatgcaattgccccttattattattaatatagccaatttatcttttgcacatacttaagcattaattgccaaaattttaaaaatattggtttcatggattctgggacagcgtatacttaactctgtatggagtagctgttaaatttttaaaaaaatcacaccaagtaattaattaatatctatgtcatggatatgtggctgcagcacattaatttcttgtgaaatagatattttccttagaaatattttagataaattgccatactaaatttattcgaacaagtatatgctgatgtatcaattgagagaaattttacagtctttaatagatattttaggtacttgagaaagtcattataaattatgctactatacctccgaatactaaagacgatggtaaacttacccattaattaaaccatttaatgtgatagataaaaacaaaattacccttaaatgttactctccgtcccagtgcctataacctatgaccggattgatacataatacaaatacacatactataaaaattaattcggacagaaggaccatatagattcatatatagtctaaagatatgtctaattcggtgttagattgctatattttgggatagagagagtatagtacatttttccgtgccacccggtgtggcaacatatttcgcacatcgccacagtattttccaaatctttttagatatgggttttccttaatatcattataatgttaaaattccgaaaatcatgttcttcctaacgaacaattctacattggatgagaaggaaacaagatatatactgtacattccaatataggagtatatggtggttctctatggcacgacgccatgattggtggatagctgcgttgccagcaaatgtcattttttgcgtgtacccctgcgaacagtgctgtccttgcacacagtggcacttgctgtccttccatagttccattcattctaagaaaaactcactgtcctttcaattcgctctatacttcaattcatgcgtggatttatttacatcattcgtaaatatagatgcatccttaagaggcacagtcgcatgacacctgcacatatgtagctgtgttatgtagtggtgtgtgtgccctcttgtgcatctcttttgtaattgtaattgaaaaaaaacgtgcaatgtaaatactccttccgtttcaaaatatttgataccgttgactttttagcacatgtttgaccgtttgtctaattcaaaaacttttgtgaaatatgtaaaattatatgcctatataaaaatatatttaacaatgaatcaaatgataggaaaagaattaataattacttaaattttttgaataagacgaacggtcaaacatgtttaaaaaagtcaacggcgtcaaacattttaaaacgttaaaacggaggtagtaagtgataatggcttcatttctagttagcattgctgtaagcgcggtgcaatggatttggtcattaacgcaatactccgtctgtttaagaaactccaaatcttaaggatgaatctggacaagttcattgctagatttttttttatttttaacagagggagtaggtcacaaacagtttttgccaaattggtccaattagggtcatgaacagtttccgctcgagataggttaatttagtttgtttcttgtgccatttatacttgtattttatagcaagccaaaagcaaaattacaaacttcaaatatttcaagttatagctaataaaaaattagttttttaaatggatcctggtatagatgaatagcatctgatgtcgtgggcaaatgtggtgcaaccacataaaacagatcgatttgttcatgtgcaaatatgtgtggtgcacctacaaattaaaacatatggatatttgatttatcacttcaatcagctctttacgatggcatttaacattatacctcccctagctactaactgaaaaaagggaaccttgcattgctcacacaggtacagtgttgccaaagggcaatataccacagtttgtgctcaaatgtgtatatctgtagcatgaatgttctgtgttcatatgggtccacgtggtcaaggaacaggagagaatattgtttcaattaatatatctgaaactacaaatttgttgtaccacctacctaggggtgacaacactgcacatttggctatttagggccacgcatatatgcatgaaaaattgacacacgacgttacttgagaacctattcatgcaggtctatgagaaaaccccaccaaaaaaaacagatgtgcaaaataatgctggattttcatatgctataaattaagtactactttaatcaaacaccacattgacacacaatgacacaaattaaatactcttacgaattcaagtcatatatactctaatacgcacgtgcagcttgttactcaaataaagaaacagggcaatacggatcagtatatccaaccaggctgcatgtaggccaagaacctgacaattcgttttccttggagaaagcaaagaacgtttggaacgtgtgatgtacatgcagatcgaggaaaatagctaatcctgctctttccctttccagcacaaaaaaagattccttcgtagttcgcactgcatttatactcaaacctgcaaggctcccaaacagtttgaaccaaggcgagggaaaaaaaaaacatctccatagccaagagaaaacatactgtacatgtcaagagattccctcttcatattcttacaatcctatttactcaaattaaatcttcatatttcacttcgtaaattccaacggctaatttggtcagcacaaattcagcatctcaatcaacacaatttcaatgcatgaaggcgatcaagctcaccactctcctgccatacaagatggaccgccaccgcttggaatttccgcagtgacggcaacacgaggaagaggcaacactagcggatgtatgaaggagtctgccaagctcggctatttccggcgagcttgagagtataatcgagatagaggccggtggaaagacgaaaggcggcgtactcttgggcttagtgtggaggcaacggtggcggcctcgcggagaggtgacaacaccttggcttggcatggcagagttccacttctcaacagggatgcatgacactcctaggtaagaaggcggcggtgctggtgggtgtgggtggaggcacatggacttctctcaacaataaagt

SEQ ID NO: 20877 - DNA, 10493 bp, Oryza sativa
cgctgcgcaggagagagaatcgatcgatggaagaacgcgacaggagcaagctagccagcctagctgtagcgacgtgacagcagtttgatctttctttttttcttatgatggctaagcttatacgtaagccgatcgatcgatggcgagatagatcagagattaatatacaggggtaattaatgtactaattacaattaagtgtgtggacgagcgagccgtgtggagttacagctagctagcgcttatgctactcctacttaaggcgagaccccaaactccaagcatacgatcaggtagccaaaccacaccaccataaagctagcttgcaaaggggatagagtagtagagagagagagagaggagaggaggaggaagaagatggggagggggaaggtggagctgaagcggatcgagaacaagatcagccggcaggtgacgttcgccaagcgcaggaacggcctgctcaagaaggcctacgagctctccctcctctgcgacgccgaggtcgccctcatcatcttctccggccgcggccgcctcttcgagttctccagctcatcatggtacgtatagcaccaaaccaacgccgccgccgccgccggcgtgcttgttccggcgcagcagcgcatcatcatcgatcgatctaagtctaataagataatcaattaaccctaactaaataaaatgataagaacagtatatatggttatgatcagtgaaacactcgtcgatctgagggaaaatccggtcgagatcgagggagtggggagacaaattgaactgcaggctagctaatttaatcgtgtcgatcgatttctagcttttgttgatctttatatatacgaacgcatgcactttcccctttgtttttttttcccttcgatctgcttggagctcatatgctatagatcttggggcatatgtatctgtcagctttcgagagcggctatgtccatcgatccctcttttttttctctttctttttgtagtatcagctgccatgcatatatcagatttcgttttcgcgtgcttttagtgcttcacttatctgttcgccatatctgatttcttctcatcctttgccgacgtcgtctgagcagtctgacctccaagatctggcgaaataaacctcaatcgttgctatttcttgccttgaatctgcataaacatgacaatagatccttctattttttttcttcaagacaagatcttgctgtttcttcccttgctatttttcattcaaagattcttcttttttttctaaaagaactatatatatatgaatcgagtttcatcttcatcgatctgtctctctccttttgttttctgtaaacacacacacgagcgtacgtatatatactctcatctctacttttatcaaaaagaaacacacatgttctagcttcagatcccaaaataatcaaacaggaaaatatatataatatgcaattagttcagatcccgaggtagatttcttgattatttccattttccaaagtgaggcgcgcgacaactcgacgcggttcctctttgcacacacacacagtataactgtacgcaaggggtaagaacaaaggagcaatcccttctgggttgctgcttgcttctcccatttttagctatttcagaatttcactttctgagactcatctctctctctctaccagctgcattatttcacttcccttttttcccatttctgcctattacacggatggcctctttgtggactcgtccaaattgaggcacggtagctggtgtcaaaatgaacctgcaggcccagcccggttatgtatatgtatagctatatagcttttcttgcaagaggtatatacactttgtagttttagccagtggtccagctagccatggatggatatattatacacacgtatatatagtacatgtatgtacgagtgttaattaaactcgtttagttaatttccaaagtccttttttattactacagctagcctgatctgtgttttagtgtgttactgttccattagttactgttctattgaagagagcgcgtacacgttgttgttttatttctctttttccgatccggtgttccttttttttttcttttggtcatcttcctcgagtcccgagcagtagaaatactactactgccctgcaaagcacacacatcaagtgatgtgtttttcttcagagcttcagacgtgtcatatcaagcaggtcagcacgcattacatgcaatataatactcctatatggacacgcagaactcactttgatcatgtgtgaccaagctggatgagccgttaatttgttgttgggacagggtattgaatcattaattgcggtttttcctctttttcctgtcttgttctactcagagaattgaacggtgaactgtataggcagagctagtcctgcatgcatcggttttctgaaattattaactatacacacacatgcacaattgctaaatctggtatacatgtcttgctgactcacatattcgttcctcctaattaaagcactcatttatttattttacacggttttcaatgatatactttaaatattaatttgtttgatgttatatttctatgaatatgaaattagcatcatatgaaaatactttaaaacaaatatagtgatataacatgcataatacttagcatatacttgtatgattagcatggtcattaatcaaaagttgccgagcttgaattttctaaaggacagggtgccttgtaatttgggacaaagaaccattggaaaacgaacacaaagaaactttcattacattaattatctgaaaaagaaagaaactttcattaacctcgtacagtaaatagaaaagaggaactatgcatgtataacgaaatagctaggatcacagcaattaattagttgttctctggctttacttttcttttggagtaactttaatttttctttggaggatgaagtagttaattatacaggtttccaattcttgtttggtagatccttttttatgttcctggaagagctactatatttttgtacttgagatggagctgaggtaccgttatctagctatgtcgcatctcaaggagttacgaattaacatatatcaccaatatcacaaaaatgctccatacaaaaagatcataaaaattcttgaatttgcttgctgtgtttttttactatatatgcttggaattaaaaaaatgactgaattaatcgtttgcaatctttaacggtgcgtgcagtaccaaattggaaaggtatccacttgttcaaacttaaaaatattttttttactgatattactctctaaaaaggtgcatgggaaatgctattggaactactagttttcgggacattataagaaaatgtatgcatatatatatatatatatggacttatgatatgggccagatacctatatatatagaagatatatgtgtgctactacctccattcaacaatacaagcatttgagccagttctggtcaaggatataaacatcctgcactattagcttgtacttgtcaaattaatgatctctaattcaaactttcttgctactttacccccaatcacccttcccaaccatcttaatctttgctaaacattctagaaatgcttattgttggatggaggaagtagctattaactactcctatagtttttttaactacctcatattaattttgtaatcctaataaatgcactatatatgcccacttttaccgtgtttccaaactggcatcaagctaaaatgaatgttaatttagtttccccataattttatgagaatcgcaaaattgtacctattttaaacaaatcaaagtcactgaacaaatgaacggaggttaattattatattcacctgatataggcagactaggttgggctaagagggacattaatttgggcatctaggttttgaaatgggagatatggagagtgaaccaaaaaaaaactgttagtgaattagtacatgatatatactagtattattagtgggaacctagagaaatgcaaagaatgttgcgcaaatcatcattttgtgtaaattaaaatgggatatacactatggggaactatagctgagtgtcaatccccaccttttgtttgtaattaaacatgtgtttatgctacaaattactccctccgtactcataaaggaagtcgtttaggacaatgtttaagtcaaaccttgggaatataaattatgaataactctcaagttgttgagtttgaaaatgtaaaaaatatatgaatagatttgtcttgaaaaatactttcataaaagtatacatatatcacttttcaataaatattttatagaaacaagaagtcaaaattgtgttttggagaccgtgtcactgtccaaaacgacttctttacgagtacggagggagtatgttctacatattggctaatattgttgaacccttcggatcaatcttagacacagtagccattttacccactgatgcagcaacccaattaggtatctactaattagcatcatagtgcaaatttgtacttttcaagtggaaaatagaaattatttgtcctcctttactttaatttcttgataatatgatatatgtaacataatttctctttgctcccaagcatataaaaaacttcaatttgatatgtccaaaaaatgtcatatatatagcatgtaatcctctgtggcaaacacgtttttttggctcaaattaagaagaggaaaaaatggtatatatgtataaacctaacaaaaatgccccaacaagaatagctttattttgtgaacaaggtcatatagaccagggaacaaaaaccctgtactgtgcttctattttgctatgcattttggataagtgattctacagaaatatgactatataggagatattctcaaatctgatcttttctattaattagcccatacgatatgaagacatatcttcctctgttctgattctatttgttgtgctaagatagtctacaggatttgctaggttgccacctgccgtcaacaaaattcagctcatcagattttgttatagttgctagcacagttatattatacgtatatctcttttgagaatatattattacagtccattgatttttcttgtagagtggaaaatattattgtgttttctaaccgtaggagttcatgtggtgttatttattttggataatgtggtgtatttttatgagaaatcaggatcgcgtcaacatgaaagtttcatctaatacattattaagtgcatcgtagcaacaattcatatattaactcaaaggtagctttgaaattaagatgcatgtcattaatgcataatagagaaatcaggttaccaaattatattaagcccatatattaactcaaaggtcatagctttgacaaatgctccttacagatttctccttgaaccaatttgtaaaatatcctctcctttttttttgcgcgaacgctaaatatcctttgtttaacaacctcgtcaatttgtccatttcatatgtgtgaacatccttgtacattcttttttgtgccgtttgaaataaaactttgaataaatatgcacaacttaaatgcttaaatgtcaattggatttggatgaaacaaaaccaaagttttagaatttacgatctatcattatgaatttatgtatgatatatcacactctttctgaataaacttcagaataatataaattgcttaattatggtatacatgagcatatatagcttgcgcaaatcaaaactgtacagtaggtgtgtgttcaattcagaatagtattctatttcgaatttaaattaataataccttctgtagtaatttctatattagaaaatttatacatacaaggagcactgttaattagctagctagctttatgggttccactaatcaatttatatataataatgtgctaaactatacagcgtccatgcatttttattcttcatgcctaattaatttgattcaccattaattaattctacgtacaatgttcgaatgtgtgactatatatgctgcatctgcagttctgcacctcattcagtactaaattcaagttcaggttcattaattaattcacttattccttcatttttcacttccagcatgtacaaaaccttggagaggtaccgcagctgcaactacaactcacaggatgcagcagctccagaaaacgaagtaagcatcctcttagtttcttaattaacaatctttgacaaatcaattacttcttactagcagaacatatattatgatttatgagtcagttattcgcttatagtattctctactcactaaaaaggattatgttacccttttttttcttatgagatgaagggtcgtgttatctttgttaattttttgggacattgatgttatccttaatgtcgaatgcatatatagggttttctctagcttcatgttttgctctgatatgtgcagtgatgctcatgcaagtgaaaatgagctgggctcttaccgtgcgtaggttaacaggccggcccattaatagctaacagtttagatgggccgcaatgctagatgccgcgggggacgaaggccttacattcaatgggccgtagggcgagatacggcccacgtcggaggttgtgggccgtagggcgcattgtgactttgggccgaatatgcttacttaaattgggcttagaattgtgagaggtttctgttcggatccgaagagattgatgccatgttgtctatgttaacattcctcatgcataagtaggtttagctgatagtctaaaacaggagtgaatttagtagacttggtttgcaattagaatgctacatggtttcctgaatactttgttgtgcctacagtttgttaaccatcttttttttccccttcggccaatatggtctgatatcttgtagcttcaggagtcatgagctaatccgtgtgtctgcaattttgttgtttaaaccagattaattaccaagaatacctgaagctgaaaacaagagttgaatttcttcaaaccacacagaggtagtcttcagagatgaatgtggccaatcatttcagcttcttatctactacagagttgctatgttcttcctgagggacagagtttctatgacttactagcaagcacttcacaccatgcagaaatattcttggtgaggatttgggcccactaagcatgaaggagctggagcagcttgagaaccagatagaagtatccctcaaacaaatcaggtcaagaaaggtaaaaatgtttgttcgccatgttacctatgcaagcaaatggcactttttgatatgctcttcttaaacactgaacctagattagattaataatgagcttattataattttttactgcaactatcatgtaattcggtacttattacccctcaactgtatggatttgtttatgtgcatggcttttaacacaggctcaatatttctgcagaaccaagcactgcttgatcagctgtttgatctgaagagcaaggtactgaataaattctggttcttttcttttttcctctgcacctaaattaaatctgtgcacatatgacaaacactaaaattgattctgcaggagcaacagctgcaagatctcaacaaagacttgaggaaaaaggtaacacagccatcgatcaccctgaaagtcattgcgtgcatcagtattcggacaacatacatctttttccttgctaaagtcccaaccatgatcttttcatggctgctaaaatgtttcacgaaagttacagtatttgcacggaataaacctttttccccggtacggcttaaaagttaatcagcttctcataccgctgaagcgtttgtttgttcgtgcagttacaggaaaccagtgcagagaatgtgctccatatgtcctggcaagatggtggtgggcacagcggttctagcactgttcttgctgatcagcctcatcaccatcagggtcttctccaccctcacccagatcagggtgaccattccctgcagattgggtattcttcttttcttccagttacagttaatttcttgcctgaaaaaattcccaaaatgcagaggtcatgttctttttaaactattcactaaattattaaacagagtatttgctcaagttcgaacaatacactttcttaaaagatggtttgctatgtattacttagaccacttatctcgatttacttgtatattttattttttttcaaatatttaatttataactatataatcgagtatatcgataatcctgacaataattcgcccaataatctagatcaaattgggcctaattttgtctttgttattcagtaatttaaaatttatgtatatatactccatcgttttcatagctttaatttaatttttccttggtgaaggtatcatcaccctcatgctcaccatcaccaggcctacatggaccatctgagcaatgaagcagcagacatggttgctcatcaccccaatgaacacatcccatccggctggatatgatgtgtgtgttcagttcaggcttcaggcttcagagaagccaatgcaaacagtgtcctgtaatccagtaattacagggcatatgtaatgtaatgtaatgtaatccctgatctatattttgctaagtacgtgcgtgctctcttacgaccttctcccccaaacagttaatcaggggaataataatttcgtttgatgcacgtactgtatgtctgtatctgtcactgtatcgtaggaccgtccatgtataacaatttccgttttggatgtggtaacaagttaattggcacttaaatttatatttgtgatgatctgggagagtacctaatctcaaaaacttgtggagattatgttagggagtagtgcaagaaatgttttaagacggcagctgttatctcatgagatattgataatgatgttgtctctgctgctgtcgcgatcgccaaattatgctgtttttttagattataccgaaatatgctgatggatacgtggttttgatctgtggccgttgcgaagtaagcgcgatttatttctgcaggcgttcgaatcacgttttactgttggcggtagttactgcacggtgactgttcgacgaaatgccaaaacaacccgcaggctgcagccagtcgacatgtgcggcggccgtcgcccgatcgcgcggctagctagtagctgtcggcaccgccggttggttacccgcaccaccgggccctcgccgtcgccgtcggccgtccttgcgctgcacggacgcgtcacgcgcactgccgcctgcctgcctttgcgctgtcgggcgggcgcgcgggcagaaagcgaccgcgcgcgcggaggggggcgccctcttccacacgcagcgatgcggaggcggcactggcacggaactcccaccgagccgacgggcccgcccgcccggcggccggccgcgccgcgccagcagctggacgaacatgcgtgcacagcgcgcgcgcaggcgaggcgcggcgcgacgtggtgcttcggctcgcgtcctcgcgtacgtacgccgccacggccaccaccgccatcagtgtcgcgttatgcacttactcatactgaacactggacagagcacgatatgcagcggtgtttgtaccgcccggcccaagggacggcagactcgccggcagaaaatcaaattaaaattgcaatgttgcaagtatatgcagaagatcatgcatgatctactgaagcaatggattgcctgcagttagcctgatttctacctgaaaatcctactccctccatccgttctaaaataagttcattttttatccatctcacacgtatcaatacaaaatcaaaaagattaaattaattttatttatcaatcacaatgtacttgttttctatatattttaccctactctcaatacatttatcttctactttaaattttgatgtaaggattacttaaaaataaatttattgtcggataaacgaaaagaacttcaaaacaaacttatttttcctattttgtaacggaaggagtacttaatttcaattcgatcgccactgaaaatcttactgcacagaccaacagtgcatgcacactgaactgaattttgacgacgctacctgaaaattacttctctaccgtctcgatctctcaggttctctgcgcatccttctggagttctggtaacggactgattattcaagtaatcaactgaataatactgccattaaattaacagcgcaatatgatctcgtggaaccaaattaaagcgaaaaaaggccatgcaaattgacactccaacatacatcatggaacgaattcgcaccaagaaaacatatggtactgtaatatagtactatctgtcttaatcaggctaacttttgtgactttaatttctagacaaaaacgtatgggatagagacggagatacaaaggaaagagactacaccatcgaatggtacatcagaatatctaagctgatgtatatctgtgtccaatacggatcactctataaactgggtcaaaagatggtcctcacactctaaccagtagccagaaat

SEQ ID NO: 20878 - DNA, 11448 bp, Oryza sativa
cggagctagattgatttttagtcttcaattcacaaatttcaatataattattatttactaaagaaattaattccgtcatcaatttattcatctctaactctactattataaaaattgaagttgtttttcgctgatactttggtacatcgtttgcatttgagcaggtttttaagttcgttcacttttgacaaaaatataaggtttttaagaaatcattttaaaatactacatgctaacctacgatgagaatgagacttctaattgcttaagaattcttgccagacaataagaaaacaacgtacaggatatggccatcatcccaataagagttccaaatagatatcattactatcaaataaaaatcccatttactttttagacaaaaaaaatctaataacaatatgattaaaatagcattcacctgttgcaatgcacgggtattttttctagtcaatattaaaatttaatggagttttcactggcaagcctgggcaactgcctaggctagccgggcggtggctccgccactacatgcagttaattcagagaaagcatatatcctactaatagttgtttttagatgtataagggcttacgtgtttggttacctgcttagagggtggctcgcacgcacatataggtgctcggtaggggaggtttcatggcatgcacgaccatcggggctaggccgcacttgtgcaaaaagcgctcctaagccaggcctgcgagttgcgagcttcatttgttccatctccacatgcatgttgttgtcgtctctccattggtcgttcagatctagcttggatccgatcgacttgggttttcttcatcgactggatttggccggccgcaaccgtcatcgctttcgcctccacctcttcgccgacggccacccccaactagatctgccatcctcgtccttctttgctagatgccacgcccctagccatctccaccatcatcgctggctacacctacaaatccgacgatggagaacccccaaccagcggattggttctatgatggtggtgagcaattgggcagtgagtgggtctggctcagcggcggcgagcccacgaagttgccccttgtttttcctcccccaccccctccccctagcccttttcctcttccttaatttttcttttcaccaatcaagtagtcatgtacatatgtgatgatggttttgctgttcatggatatatggatatgaattcaatttttattttaaaaaaacaatgaatttatttgacttagctgcatttatatctgaaatgtgtgtattttataataatttagagtatcttgcacttggtaatatttctatttatgggtagtagggataatcttaccatccacatagaaagatgagtatactcaaggttcatttatccaaccaaacgaataccatgcatacaagttttcacatatcgatccaaccaatgaaacaacacctcatataaaaccaggttaaactaatacatgcaaccaaacaaccactattacaccttgctaaccacaccaaggtcagcctgaatgatgcacatatgtaaggcaagctgagagtatttgagcaaccggccccggccctatgaaacgcaagatagaaaaaacacaagaaaaggaaaaaaaatgcagaaattgtgtagttgcatgtttctttaatcgtacaaaaaaagcgcaggaaagatgaaaaggagctcttcgctagcattgtaggaactaacaaaggaaagcaaagtttccaagagatttgacctcttgcttatttttcccctataaaattgaaccatagcagtgcaatcctttatgaaaaatttcctatccttcctatgaatcaaagggctctataggaaaatttttccttaattaggaaattgaatcctccaaattacttatggcaaacattcatttcaaagtggtatggtgctatcttcagtaaaatatctcctttatctgaaaaataaatttacagataattgtatttcacatatatagagatagatctgcactgactactgattgcgtgtttatatatgtgaaaacctgcaaacatgcgtattttacatatgataattaattatatcagttgtcaactatagtatgaaacttgaacacatgacatatactttgcacacgatttataagatgacaaatatatatatatatatatatagcatacgtacgtatatcgtacggtagcagcagctgggtcttatagggggtacatactccatgcaacaacaaattaacaagatcaaacataattaactaataaacacaaaacgagcacagatatatgctaaaggggaacgatgagcatgcatgcatgagctgagctgacgacggtgataataagggggatctgaaatttggtactctccccagtggccggcctgcaggctagctagcttcatacgagcttcaccgccgatatagatcgccgccggctccggccgccgccgccgccctagccgctgcgctccatctgcttgaagatgtcgaagctctcgaccacctgctcgttggccctctcctgatataacatcaataatatagcacataattaaagaacaattccacggtgagatcatatcacacaagaactatctaaaatcataatcgttttgtggtggccatgcatcaaataaatcaaatcatatagagaaactgccttaattatactctcattttgtgtgtatgtatatatgatcggtgtctctgttgctatggcaagttaattatcgtcaatatgatcatcacctgatgaggaatgggagcagctactactctgggctcggggttgctgttggaggtggaaaccgtcgatgagcagcgggggtcgcacttcgcccactgcataaatgcagagctgatcatcagacacttgcatctccatcggtgcaagtaattaatattattgtactagtaattgatgtgtaagcaaggtgcgagagatctagagaccgatggatcggttgattatagctaataactgtcacaattatcacatgcaaattgggggccgggagatattggggatgagtagagcttacgttcttggcagccatgctgaaggcctccctgtgagggatatctggcttggcagctttgatacgctgtatttcctccctgcatcatcatatattaattataattaattgatccgctaaaatatccatgtgcagatttatttctgagaagagagtgtagtacgtacgtaggtacatgcaatgcatatatgcatatggttgtgtcgattagatataaactggcattgtctacatatatatcccagtttagttgtcccatgcatattttattccctttggttaattacttcatcgatgatatatcgaagtacgggtctgtaaaaagattaattgatactctctccatctcaaaatataataattttcagctcttagaatttatcctaaaatataacaacttctccaccaacattctctttccaatcaatcacaaacttccaccattcacttttcccacctatctccactactcatccaatcacaaccctccaccactaacttctacctactttcttaataaccgtgttcaactctaaaacttcttatattctaggacggagggagtactaaatgtgatttatattacagtagcattagcatatgtacaataattagctcgcacacattggataataatgcatgtgtggtgttttgctaatatatcatatgttctaccttttgatactacttatttgtgttcaagctagtatattgtcccattttaattttccacgaatctgtgaaatttcccctgcatccaactttcaccataaaaatatatagattggtcctaggcttattcagttttagtgaaataattggtttactaactcaattagtatttaattaaagaaatggtcaatctagtagcaatgcagtatcaaattaacttaaatttatagcacccactattttatggaagggtcggttaatttaattaaaactatcccatggatgggcatctaagagcatgctgaaacttccataagttgtacacgttaagatggcacatataaattaatgtcttttattcaaaatgatctagtttttttaataaactgttatactacaagggcgcacaaattaacagccccatcttttacagttacgttagtaatttctaacaacaaaacaatgaacacttaaaaggcaagatggcttgcattatcaggaatttaacatcaacaagtgtgtgttacttatagcaggtaggttggtaggtgaaactacttttaaattaagtgtgtttaatttagttaaaaaatttcagaaaaggatactccctctgggctgataatacttgtcgttttggacaagggtgaggtcaaactttaaaatctttgattatgaatcattttcaaaatatttgtttttcaaatatggtgaccacatgtatagattagtctttaaaagtactttaataagatcatatatttgttaatatttttttacatattatgatagaaaataatggtcaaagttgtttttttgaagaccgtgcccttatccaaaacgacaagtattatcaacccgtactactagaaaaattatttgttgccacgaaaaaaatcgtggcatcaatactaaaattgtggcaatagatacatattgccacaattttaaaatcgttgctagccgtggtaataaatagtgtagtaataggttattgcaataatttttatttagtggtaataaatttagatgttgccacggaatggatgtggcaaaaaatcatattgcaacacttgatatcgttgtaataaaaattattgccaccactccatatgtggcattagttctacgtaccaaattaaaagtacaaatattaatctatcatcctatctattaatttctttatacagtgtcttggctaggattcgaacccatgtatattgttccatttgagcctacctaactaagatttgaatatctaaaagatttcatatgaacaagttatcaactataaaattatagatctcgtcgagagctataatttccatataaaatttgtctcaatccgtatccatatgaaaaaaattaagttaaattatgagacgacaatttttttattgcaacgaatttgctgattgtggcaacaaaaagtagtgaaaagtaccattattatgtaaattgccacaaaaattaaaattgtggcgatagaacatattttttttgcaacagtaagattttttgtggcgatatctcattttctattgcaacaaaagtactaaataaaacaacaattgtagatcattgcaataaaatatatttttttaccacagaaaaattatcattgcaatagtacaatatattgctacaaattattttttgttgtaataatttggtggcaatagctcaattatcttgtaatgccggagggagtagcatttatacttagtgtttatatcgaagaaattaaacataattgtatccaattgtttataaaatatatgtaacacgtacgtattgatgtaataatttgtcgtaaatattgaaaaataatctttgactagttatttataaaaaataatgatgattacgttctataacacaaacaaaaggtagttcaaatatcaggaataatgtatgaaaatattaggattgttggtgtgaacaggaaacaccaaaactctttttttttactttcattttgttgaaacaaattaaccatcataactgctttagatattgtaaataaatatctagcataggctgcaggcatcagatataagatgcacacaggcattaatagttatatatgggtaactatgatataagtgttttttttcttgtgtttataaaattatttgggaatcaagatgaacgtactgcccagctcattgaattaaataaagatgtattttgtcaaaaaaaataaagatgtgtattggtcatgtgttttcaaaggaaaatgtgtttactaatttattaattattactatcatggcctggaatctgttccaaaacctgagcaattaacagggaaaggaataaattaaacaaaaataaatgtacttttgttaaaaataagtgttaattaaataataaactaagttaaatgtgtatatcaacatatacatatatgtagagagagatagagatatgataaaatcaatgcaaattggcaataactaggaccacattataattatatgcagagatctcagctaaataaaacagctggacatggaagcctggaaacagagagacccttcactatatatcaacaagaacaaaatatattaaagaaaagaacatatatagtggcaactaaaaaaaatgtaaaatggggtatttattttagatatacaattcattcaccatatccatgtataaacccccaagctatcacaaggtttaaatcagaccatagatcgatgccctaaaaaaagtcagaccatagatgcactttatttctttttttttttgaaaatatccacaaaatgacaaacaagctagatatccataatatgcacaatggtctagctaggtaaattactggagtagagtgtttttgtttgattaacagaaacaaattaattaatattcttcaattcacaaaattacactagctatagtagcctttatttagtgtactgagatttacaatataaaaatgtcctgaccttggatgataaattattttatgtatattcttccttcttttagaaggggataaatccccttcaataaaatcgaaactttctcccaaaacaggtgcagatctcatagagtttatagtacaggacaaataaaaaaaatattgaaccactactagctccctcaaaaaaaaactcagaacaaatagaaaaaatatatataagatcacatgagtgcaaaccatattagggatcacaagcatatatataagataaatgcatggacaaataggtaaatagtttctcacctcatgaagcggttgtaagcagatgggaggcggtgtttcttctctggggctacaatggaagacataaaaacatttgtcagaggaaacacaagatatgctagctagctgtttgttcatatttatatattccatgtgaacacaagacacagagagctagtgaaggactcgtcagaagaagacagttaacaattagcaagaaactaaggagagactgaatgactgatataaatgagcagtaagcaagcaagaaatttaattagaaagatattgatatctactctagctggtatatatgcacgtgtatgatatagcaagtgaagtgtgcatatagttgctttgctacttacgcttcacaacgaagggtgctcttgggctaccctcatttgatgtcggcgagaccagcggcagcggctggttcctcctgcagtcagtgcaaggtccctaacaccaagaaatatccaacacaagaagcaaccaaggttaattactagcttccagctctagcacatttcaagatctctcaaacgcttgccatgcatggatcagtgtagtagtagtagtagtagtagtagtagtagtagtagtagttggatgatgataaaatcatcatttcctaactattttctcagatctctctctctctctctctctctctctctctctctctctctctctctctccctctctctctctctctctctctctctctccctctctctctctctctctccctgcttgggtagaagtagctatactagtcaactcggaaaacaggcaatgaatgcatctttccacaccaaaataaaaaaaaagaagtaaataaataaaaatgcaggtttaatttggagaggcatgaatgccacagtagagcagctgctagcagcatatgctgcctgagaaaaaaaaaagatgaactggccggccgcttttgcagcatgaggctttcccaggccacagatgggcaagagagaaatcttttgcaatccagctttgtttaatcttgccttgcaaacagtattctgagtggctccataaagccgagacaggacacagagagctagagagagaagggaaaagaggagagagaaaccgaacaaaagaacaccccaaagctctgctaaaccatatttcatgagaaaaaaaagtcccactctccatgtgcaattaataatttctttaattatatgtcttccctttcttgtataaggagaaagatttatcgccagcctttctcctcgcaagaagctacccatatgcagaaaagagaaagtagctagaaacagcaacacgagaactgaagaagatcaagacgacgaagaagaagaagaagaaagaggaggaaaaatatcaagaactgcaaggagattcagagaaagagagagagaaaagaatgaaacgctagcttaattagctagaggagaggactgacctgaaacgggcccaaggggtgatcagttggggagagcggctgcaccatcggcggccgcgggctgaggaaggagaggttgttgcagtggccacatttcacggtcacggtgtccatcagcctcttgcatgggactccaacctgcagctacccaaaagacgaaaaattaattaatcacatcatgcaattaagccaatactttcttcgttaatttcatctctttgttgcatggcactgtccttaaggagaaaaagtagaggagaacagcatatctgtgtggaaggaatctagatggagcaagcaaataaagtgggatatgcaaaacagagagggaaaaagaaaaggaagaagagaagattcagtagtacttgttttttaatggaagaacagaagatgcaggtactactaaattggattcttgtccagtttaaaaatgcagcctgcagctggtaacaatgaaagaaggggatataatggaagcgaaagatggaacatgacactgcgagagaaccagctgagtagaacattctaccacaaagcatcatatcaagagctatggccaatgaattttatctaagaaagaaaaagagagctagccaataaaacaccatgcaggaagacagcaagggcacatcaatcacgtgtcatgaacaatccccagtggaagtttccactagcttagcagctagctcctcaggacacagagagagcaagcaagaagctggatttggtcccagctatctagctagctctctctcactgtgtcctgtgtgagagtaagcatatgccatgatgcacattaagcaagccaaaggattggaccaaaccaaagtgagagccctctctgcaatctgcagcagcaggagatcacgagacagaaccaacactttgttctttgctctcttgtccaattcaaaagataaccaaagaacgaaggccatggtgcagctgcagctagcagcagcatatatcgatcgttctctgcatgcgaagctaagccgctgctccggtttctcgaggagtttaccgcgagcacggtgttgcagtaggtgcagcgcacgtagcacaggtgctcggacggcgacacgagatccattgcggcggcgacgacggcggcgacggcgacaagcaagctagccctagcactgaggcggaggaggaggaggaggaggagcaagtgtgagcggtggtgcgggggaatcaagggcaataagaggagaagaggccggaggaagaagacgggaaggaggagagagagagaggggggggggggggagagttgggcacagcgggaggaaggatggggtagggtttctattgttgcaataatggcgagggggtcccacgcacacatggaccccgtacgcacgagaccaaccacagtgatcgggagagcgagcaccagaaaagtttttatttttccttttctttctttctttctttcgaggcaaatgttgcaagcaaagctaagatagatagcgagatgagatccatggttggatggatggatatatcaacatacaccgctctatcttgtcgaaacgaaaaagagaaacatcttttttaaaatggtaattttaccatcattaaaaagatacctagagaaccatatttactaacgtttagtatctcgatattttctcaagaacggtaaaatttctctttttgaaaaaatatagagatggtgtgtaagaagcacgggatattctcttataacgtgtagaaagactttttcatgtacgtatatatgtgtaactcagcatagtgatctgacaggtctcttctatctctctctctctctctccatatgtgtacatgtacactacacatcgtaatatcatatgcatctcgaggctatgggaacagtatatgtttgctcctatagctagctatagcatatgcttacagtaactagctagagtggtgtccatccgatccggtggcgaagccacagtagtactacatcccatccagttgtgccttgtactgtgccctcaaattgtgaatggtccaattgctccctctctctctgactcggaagatagtaccggtactgcttgacatatacccctagctagccaggttcctaattaaatatctaggtgttagttctcagagcacctaaaataatctctgcagtttatagatttttgaaatgttttttgaaaattgaaatatctaggagtttcttttttctatggaggatcggaaatgaaactttggagcttgtgtggtgtgaaatctttagagaatatcttccttaactggcatttgagttgttgaggaatgtagtaggtttctcagttttattttgtaattactccctccatttcatattataagtcgtttgacttttttcttagtcaaaatttttcaagtttgattaaatttatagaaaaatatagtagtattttcaacataaaacaaacatattattaaaatatatttaatgttcgatttaatgaaactaatttgatattttatatgttgctaattttttctataaaattggtcaaatttgataaagtttgacaagaaaaaaagagtaaaacgactacaatataaaatggagggagtagttgacagcaccttgtgtatacatattttctcttcttaatataacaccagttgggctggctcgatttcaataataataattttcttatagataattctttaaatataaatatatgaaaaataagtatatgatttttcaaataaaaatcgcattagtaaaattaataataaaaatatttctattgattatgcgtgactagtgtacttccaatcttttttaggagtgttttagaagaagtaaattcagataaattatagtagttaagagtatttggaaaagctgatcgtggacatttactacataaactaattgatacgcatacccatacatggtaactaattaacagaattatcgtctgtgttaagtaattaccctgttggaaactgcaaggaagtcgatggcggatcgatcgagacatttcactagatcgatcattggttgctgccagcttgtttggtcttgactagatcgagcatgatcagcg

SEQ ID NO: 20879 - DNA, 8970 bp, Oryza sativa
ttgtaggtccagataacatactttgatgatacggccgatcgacactagctatatgtgttcattatgcactcgtgactaatcgattatgttagtaggtgagtttttcacatgagagttgcaggtacgtttaggcatgctcctagcttcagtgaaaaagtacacgtaccgctaattaatgaaagcttatgatgggctgccttttactgatgtttcttcggtgaaagaaattgaaaaatataacggaaaaagcaacagttggggatcatttggtttaactgttcatgacaaaaacaagacgagcagggaagattttctatctgagcagcagctagctagcgggaaaaaggcgacgggctcgcatgcatatgcggtcgtacgctcccaaaatataattctgtgattggtaattatttctccctgagcaggtcgccagcatgtcgcagttcattttctctattacacatgtggagacaaaacagtgcacaccatgaatgatatatggagtatatagcggtacatgcatgcgtatatatattcccaccctgatgttgttgattaaattcagtgaaaatgtactgtctaattaattactaccagcagtaattttattctcgagctgaacaattaattactctcccatccaaaaatatactactacctattttagcatctaaattttatccccaaaacatatcaacttcttcacttactccctcgttacaaccttcttttatttaacttttgatctttttatgaacacgcaaaagaattgcacgtcaatatatattaaaagaaagcagagtttcagttacacaacgcaacctgcaaccattgccgggggacaagggaaaattaaaaagaaagaaaaaaaggcaatcgcaactaattataaccattcttatttaactcttgtcttaatctagcttcatgaaaaattctagaaatatttatattttggaacgcgagagagtacgtgtagagctttacaagaattaaactcatgatttgccaatgatgtgtcccactatggatgatagagctagtagctagcaaggctgcattattattgtgcaccatgggtgagtcaaagcgaaagtcaacaggggaatatatatagtatatagtaatgttgatccccttgatagggccgggcatgcacaatagagcagagagaaagagagagagagagagagagagagagagagagagagagagataactagcatatatatgcggcggcagctagctgatcttgctgttatatgagttgtgacaacacaaaactgcatgcactaagctcggacacacttgggggtatatatcatgcatggtgtatctctgccgacatatgatatggaagcaaagtttgattcctgcgaccgatcgatcgatatggccaattggccatatgatatggaaaagtagtttgttatctctcgctcgatcgtcggtcggtcggtcgatcgatcgatcgatcgatcgagagtagtagtttctgtacatgtgccgccggcattgtgttcgcatgcatatgatagagagatcgataagcctaaggagagcatgcatgtagccgccgcttgcacacacggatctgtttgcatgagagcaacactagtggctctcgctagcgatgggttgtgttacacgcagcatagcatgcagctggggccatccacggatgcaagcatgcatgccaacatattgatcacaattagatctctgtagtagctgatctctccctcatcatcaaaggctctctcgctgctcgagccgcatgcatgcagctagcgacatttccaacctagatctatctcaggctcaccagcgagagctcgatcgattgagagagatctcaatatctcatcagccatgtgtgcactttggccagcagtttgatcgaaatcaagagagagagacagtcacacacagacatcacagaggattgattacgagtactgactgatcatcaccactgagatcagaacgcacacgggagcacacacgaatctgatcgatcggaacgccgcgctgcgcatcagctagcggcgccattcatgcgcggcaaaagcttgatcaaggcggatggcgacaccgggagcgcgacggacggacggacgcccaccaccaccaccgtgacctgctgctccggctgatcgatccccctctcgcttgctgcatatgctggcaatttgcaagctagctccagtgtttgcgtgtgtacgtacccctagctcgcgtgctgctagctgcaggccgtccaggccggtgaatgcgcatcgatcgcgtgcctgcacaccaatcagctcccgccgcgacccggccccacatgtttgacacagtcagacacacacacacagtgcgatatctgcgcatgcgaggagagaaaagattattacagtgtggagtagaagtgtagagacatactagctagccgacacttgtttggataccagccgatgcgtcgtacactgatcgatttacgcacacatttagtaagcgaggtcgctgtccggtggaggttggcgagaccaacaagcgcagctaaagctagtgacgacgacgacggcgacgactgcgaccgcgcggcctgtgtttgtgtgggtggtgatgtgacgaatcctcagtttcctttccaggaaaaagcgccccaccccaactctgcccttctagcttactcccccggcgcaacgcgcccctgcagcctcgctctccccgtccatggcttttctcacagcgcggcgcctctaccacagaacccattaaactccctccatttcataatgtaagattttctaacattactcatattcattagattcgttaacatttatatgaatgttagcgatacgctagaaagtcttatattatgaaacggaggaagtatgcgacgttctattagtgtcggttagacaaaaaccggctccccgaaccaccagctgaaacaaaactagtacgtgcgggacatattctcgtactagttttgtttattttgaaatgacggagagagtactgatctgcgccggaggcgccaagaaaattaacataataactaagcaactgttatattggatgtgtggtgaaaagagatagtatatgtgcatgcaattgcagtagtagtgcgtgtggtggtggtggtggtaggaagattctaggatatcttgtcacctcaagcgccacctttggttggttgggcgctaggtctagcccagctacgtcgtacctagctacacctcgcgctcgatcgatccatcgctgctgtagctaagctatcgatcgagcaaagcaagcatatgcagcagcttattatcaggggcatgttttttttcagcgggatgcgtgtatgtaacccatctcgagcacactgtacatgtggcgtctgtgcccctcttctccattgccatgacatgccctagctagctattactagtagagatcgcagctagtagtagtatagtatagtactagtagctactatgctgcttgcattgctgatcgatgctgtgtgatggtagtacaggggaaatttaatagcagtagttcaactgtggcgcatattgcttgtcagctgcatgtgtcaagcgcatgtagtccatcgatttggatgctgctgctgctgtggctctcggtgggctgtgggctgtggctaagctagctgacaaccaagcggggacaaaacgagctcatcgatcgatcgctacggatgaacacggcgggcgccctagctatagctagcagcagctggacgttttggctgcttcaaattcgcagagatcatatcacggccggtgctaacacacaaccatcgatctcactggtgctaacacccatcccactggtcttagcaatgatcgcaacgcttcaccgtacgtgtcagctgcaaaaaaaaacaaaaaaaacactatttgatcatatcatatcactggaatgtatatatcgataatacatcaagagggatatatatagctttatattgggctggctgcttggattcttggcatatcagaggaggcatgcatatatgatactccatatatatacggttcaggcgcaaacagggatgcttgctgttactgcaagttgctaggcacgcagcagccgattgctgtttgtttgcttacaacacgtagctaggttagaagagagaccctgtttaaccagactggttgatcgagcacaatattgtgtgcgtgcgtggtacccacacaaagttaatgccgaacaaccatcctgtttcaatccaaacgaaatagtgttttgcatcttttgaaatatgagcacggctcgtcgttgactccctctccaaaccttccaggtttgttgaccaaacatttctgcagtggcaataagaggaagaaatcaaattgaagcaatgattaatttgagtgggcagctatttaatcaccaaagaataatgggacaacattcatggtaagctagctataggacttcattaaactctctccacaagcttatcaattccattctgctattggatagaatgacagggaaaatagggggttccggcgagccaaatactgtaccttttaattcaagttgttccagtcgaattctggctagtatattgaccggaattgatataaattgttccaagcatgaattataaattcttaagccatgttgtattataaactcatttatctatatcatattttctctcattatagtaccattttaaatataattacatctgaaatttcgatgaaatagcatatttatattgttttattaatcccaaaatggtggatcattatcgcctagctggtatatatctgaacattgagtcaaaccaaaatatcctctgtgattgaatggcaagcctccactacacaagctactccctccggtcataactatttgatgcacggttgactttgtccaaaaagcttaatcatttatgttattaaaaaaactatgtaaatattatttattcttttgaattattttatgattaaaggcactttgaccgtggtatatactctcccgtctcattttaggtgtagttgtgggttttcgtgtacaacatgatcgttcgtcttatttgaaaattttatgaaaaaattaaaaaaatcacacataaagtactattcatattttatcatccaataataataaaaatactaatcacaaaagaatttttaataagacggacaatcaaacgttggacacagaaattcacaactgcacttaaaatgggacggagggagtatattttttcgtatgtgttctatttttttaataagataaataatcaaagtcatgactaatatactggctagctagacacgtattggcatgttatttgtctacgagtgcatagtttcagtaaatatatgaggttttaattgacagaagaatcaaaaggctaataaggttgggaaaatattaattgtgatcgcaatgctctctttgtaaagcagtactgtttgatttgaacaataaaactagtaatttaaaaaataattttcttgttgattttcaattcgtatacatagacagacatatatacatccatgcacttccctgtcaccatgttggttgtctccagtgccaggacaggtgcactgtcatacctttttaacgaaatactggtggtagtgcatgcatggacgcatcaatacggggtcgttcacatgcgtgttttctgttcaacattgcatgcataattctatgttcataatgtaagaggaagaaaaatatgaagacacattttcctaatagttcgttactctctatccatccacaaagataagcattttaagatatcaatgcaatctttgaccaataataatacctatgaggaaataaaatactttaaatgaaaagagttgtatataacgatggattgtttcacaacaaatttagtaacatatcattcttaagtcactaatctttataattgttttttttctattgacgatcaaagttaaaagagaaatgcttgacttgttaacactattataaacgtgctcatattatatatttgtgaacataggaagtaaaacacacaattaaacggatattaaatccagccatttaaagccgaattgatgggaaatcataagaaaaatgatgatggatgagtggggaatcaattttttgcaatcaattggagaaggaaatgcatggagagacagatcgacgtggcgacggaggtaggattagcctgggaagaaaaaaaacagtgacgaaaagaaaaccgaaaaatcggaagcctgcaagaaaaaaactgcaaaaaaaaaacagcggtggaaaaaagtatgtaaaaaaccatgacggaagaaaacagcgacaaaaaaataataaaatcgcgatggaagaaaatgacgacgaaaaaaaatcagacggagcttggagcataaaaaaccaaaagccttacaatttttttattaggtatatagattaaaaccgtttgaaacatggacgacgtgccaaaattctggcagaaacatcttcaatttttataataatagagatatactcacaaggaacaatattaagtggttttcgattacctaggttatattaaatctgattagaaagaatgacccattagttcctatatatatgcgatgtttttttaacataatattcactttttccttttggacaggagggcgcagcccctttatgtgctctcatgcatgcaatcactgtgtatagcatgccatgttaaggtggtatgcatgatgcatgatagttaatgatcgaagtgggatatgatatggtagcagtgtatctctacaaaacaaacaaattgagacataaaagagaacttgtgagaagtaaaggtgtattgtgtttgaaaccacactagcttgtataaacaataggttggaattatgtttttagacatcaatacgttgctacttttccactaattaatttagaaaagaaatatggccactgtctattgacttgcttataattatgaatgtaagatcattttttgttggatatatgtacatatgctttcttgtgctctccacgcggtgtggcgcaaattaattttgttcaccacaaagtatagcaaattttgtaagagtttgcgattaattaggttgtgcgggggacaggataaataagctagaaaagtatagcttgccacaagtattgtcgcaatatataaaataaacatgttggtaatataatatatagtcaaacttccctagctacaacaaatgtggcaagttcatatccaaccaaatgccccttaattaaatcgttgaaaacagtttccttttttattcttgagttgaactgtcaaatgtaagagaggtctccccttatacaaatttaacattttcttttgttttaatgtcattcatgttggcatacactgtagcaaattaaatatgttgttttgaggtttttccatgtggtcatgttcatcaataggaccttatttgtatgcttctatttgatgcttgtcgagccagagtagtgaacatggaaaatacgcattaaatatataggtgtgttattttccaacaaggaatatatggtggatgaatgcgcatgcttcccaagctcttaaacgatatgatttgcttttctttaaaaaaaattatacgaatttcttatataactattttaatttcatttttaactttataatattttattaacttgtcaatagaataattatcacaaatcacttcactatttcaaccatttaagctatgccatgccgccattcagatattcagtctcatacaaagacgccattgtgatgatataccacacctattaaggtcggatcaagctataatggtttaatttgctccaatatctcacatatttctccgagatgcattcaagaaggaagtttagattggcatcgtcattgaatcacaagctaagacactacgaaaagaaccaaaaattaatattacttccgtcccaaaatataacaaaacttataactatgaatctagataaacatttatccatatttatagttagaaatgcttatattctgggacggaggtaactaatactcgaatgaagccaccacacaggatgaccaccgcaaaatatatattcccattccccaacggccacctaataatcgtaccaccttgaagccacacgattgggcatttatatttctaagatgtacatcccatgcctagtatgtcctcctatcaaaataaattcattttttgactcattccttgcataccaatacaaaacaaaaaactaaaatatacatattttatcaaataacagttcaattatttctttctttatatactcccaatatatttatcctctaccttcacaaattttgataaaataattacgtaaataaatttattttagaataaacagggggctaaaactaaacttattatgaattactaccataataaaaaaaacaagatttggagggagatacatcacatcaaatattttttaagaagaaactataagcatgttagagattgaacacttattgtatatactccagtaaccctatagtaacgatcgggtacttacaatcatatccttgactttgacactttacttgcctcggagacacgcacacatgcatgtaggtgcgcgcacacgcgcaatgatggtgcaatgagacacgtcggtacgaacgacccgcgctggcctaatcggccaaagaaaaagccaaattttaaattttcaaacttaattttgagattgattttaagatattttcaacgttgtttctttttcaacattgcttttaagttaccaagaacacatttataaaagttttacttacaaatttatttttattttctaataagctgttttggcttattaggccaaacgatggagaccgaagtataaagtatagccgtagtaacagcaattgcactttattagttgtacatgtcgatccgttagagacatgcgcccacacaacaagcacgtatatatgtacacatactgatcgatcgatcggcctcc

SEQ ID NO: 20880 - DNA, 13567 bp, Oryza sativa
ccggtcgtcgtcgtcgtccgcccgcgcgtgctggctctgcagcccccgccgcagtagtgggaccgcgcgtgctgggtcggggaagcccgcgcaggcctgtcacgccgccacgatcccacgagccacccacaacgtaacacgagccgatcgagtcccgcgttttcactcggcctacatgggctgacgctgcggcctgcttcggctttgggcatcccgcggcccatcttctgcgagccccccgggaacgtgcggcccgcgtgataatcccgtggatatgggtccacgggttttcctctcctcttcccatcgcatccgcatctcggcatctcgcgtcgcgacccgcgacccgcggcggcgcgtcccgaatggcggccgatcgcccgctcgcgagggttgatgagatagcaaggcgccatttccaaatatttcgatccgcagcgtaatctctctcgcgtgcgccggtgcgcgatcccctccctccctcctcctcaatcccccagatcgcgtgcgccgcgggctctccccgcgttgactctccagcatctagatccgcgcctgcgctcccgacgaggtcggccggtctacggtcaccctcgtggtttccattgacttgtttttctcttctttttctttttttcccctcttctccccaacctcgcaacaaaatcggcggctatcctcgtgtttcttcttcgctccgtggccgcagaatccccccaccgctgttcttgcggcgccggtgttcgtttgaaaggtgaggactcgatctgcttgccgtttctccttctgggcaggggcaggtaggcatggaatgcgatcttgggtggtccatggagggattgatggattgatagttacatggagtttattggtgtacttagattggtgggggatcaattatttcttgagttctggttgtgcacgaaacctctatttaaatcgaagttttcctattcatggtgatggggttgctcctacctaacaaatcgatactccttgctctgcttattctcgctttttatttaatgggcagcatgtatttcatgacgcatccgtcggcggcgacgaactaattttcagttctttatgttattcagcagttggctgcgctgtcctgggaggcctcagcagcagcagcagcgagctttgctcttgtgagcgcttcgtgtgcttgcagctgcgttttattattgcgtcttggagctgtcacgacgtggttgttgagaggaatctatcatcccttcacagttgcgaggaaagcttcctgtggtatgtgttgtgctttgttttcttgtgggcaactggcagattgcaatggcattattaggaccttgtccaccttgacttagacaaactgcgaattaggtggtgtgacatgtgttgatattttcttttccaatcctctgatgcttacaacccggttgtgcttgtgacgtgcccctacctttgtttgacttcaatgtgtagtataacatggttgtcctgggcaagctcattacgtattccccatgagctatttagttgattgggcgatgtggtagttgcatactagtcgtcctttcttcccttgtcacctttggcggcctcggcttgcttaaaaggatacatatgcttttgtaactagaacatttgttgttgaatttggattatttgatcccatggcgaattctcgggctagccgtttcaaggtatttctttatcttgccttggattcctcagttgtgatctttctttggttgtcatcagtttgatgtgttcttactcctttcttgaagtatttctgttcttgctgttcagttctgtgattttgtctgaaaactttatctttgtgcttatcatctgcctgctgtttaatttaatccttgaccttcttgagtcctttcaatgcttgtactgagttttttgttaatataccgtagaaaaacatatggaagcttagagatcaatgttgagcgagttatttttatgaatcatgcttttcttgtgtgtctgtaaagttgaaacagggacatcttttttgctaaatatagcttaaagagggatggtatgacatgtgactagagttccatgatttctttttctgtatcttctcagtgttgtaaactcatattagaatgaacatcatttgacgagcacactttgttctgtgtggtaaattagcatcttacatctcacatattgtggatcaggccatataacttatttattttttgcaatatgtatgaattgaaagtgcttttttttttcttcttgcatacttgattctagctaatctagagagtttgatcactcagtattggatatgtctacagctatatttagctggtgttcagagcactattatgttgatgtacattttagctttctgctaacaatttttgtactatttctagtccaaagtagagatctttttaataagccaagtctatataactgtgtgagtggagctaaaatgatgagtatggtgtagtatgaagctttgattgggatgtgaaaatccatgggtggaatcaggtgcatggggtctatcaagaaattagataattattgttagtaaacattttttaagtgttcctctgctttgtccagtaccatggtatattgtcacattgctattaactctaagagcaagataagggctaaagatcaaataggttccagcaatgccaaatatttcaccatgttacaaacaccaagatcgattaaagtttctaagtattttggtttgttccatttgttttttggcagcttcagtatggtttttgtgaggtaactttttattgaatttttttctttacattgccagatgtctaatctatcagagccctcaaaagaagctgcatcagctgatgattcaagtgctgtccagaaaactggagcatggagtaacacgttgaacattcttctgcaacaagcttcagtctatggtgtggctgctggttattgcctgtcagcatccctgctctccattatcaacaaatgggcagtcatgaaatttccataccctggagcattgacagctttacagtacttcactagtgttgttggagttctcttatgtggacaactaaagcttattgagcatgatggccttaatttgaggaccatgtggaagttcttgcctgctgcggtgatgttctacatctccatcttcacaaacagtgaacttctactccatgccaatgtggacactttcatcgtgtttcgctcagctgtgccaatttttgtggccattggagagaccctttatcttcaccaaccatggccatcactcaagacatggctttcactttcaactatacttggtggaagtgtgatctatgttttcacagacaaccagttcactgtgactgcttacacctgggcagtggcatatcttgcaagcatgtccattgactttgtctacatcaagcacgttgtcatgaccattggcctgaacacatggggccttgtgctttacaacaatctggaggctttgatgctcttccctcttgagatgcttctaatgggggagcttaatcagatgaagggcgacagcgctaaagtgacaaactggctttcatctgatgtcattcttcctgttgctctgtcttgcttgttcgggctatctatatccttcttcgggttctcctgcagacgggctatctcggcaactggatttaccgtgctcggtatagtgaacaagctcctgactgttgtgattaatctccttatctgggacaagcatgcctcctttgtgggaacaattgggctcttgatctgcatgtccggtggtgttctctaccagcaatccaccacaaaaccaaaggcccccaaggctgagccaaaagaggagaatgatgaggagcagcagaaattgctggagatgcagcaagggctcgaaagtagctcaactcagaagcaagcgtcatcttaagcctggtaggaaatttggcgtcgatatcttactctcaacctcaagacggcttccctgtatcatattatgggatgctaaagaagaatcatttggccaaaggatgtttgttcgtcatgctagaatcctgtaatgctgttggcatgaaaaatctcagagaaaacttaatgtcactttaaaattctttgtttagtggtataccgtaattcatttgttagacctgtggtagggtatcaattatcaaagaatcctgaaacatactcgaacagaatactccgtatacaatatgctgtttcattgataatacagggtggttacccttttccatgcagtatatttgtttttgcttttcgttttgtgatgaaggaaaattatcttttgtactcaaattgcctgtatattatgtattctgtattgtgttgaaggcttgaagcaggttttgtcctgagttactccttatctgtgcacttccaggtcctggctggcgatctaattttagcccttcgacactgaaaatgatctcctgtttattttttttggattcagggattcagattcaagtgaactcggacttagcgtcgcgttcactgcctttgatgggccgtaatacgcatcgcgtaggacgggcctattcattgggcctgcaacttgctctgttgtcacttcgccacggtgttcttctccacatcatcctctataaaatccacgtcgattatggatttgcagtagggatgaaaacggctagagaaaaatgattatgaacattgttcggagcggataattctcagataatccagatacaaatacgatatacggtgaaacataccttatttctctttaattctagactttcaacctacctctttatattttctgttttaatagtagcccatctcatgacactatcctgcaccaataatattatttaaactttcaaatgtttttataaattatactatagtttatatattataatattagttagacatgtgtttataccaacgctgttgtacatgttaaacttaattagcattgtttagtttatgatcagacttaggcgggagttcccaattccctaccctcgttttccgcacgcacgcttttcaaactactaaacggtgcgtcttttgtaaaagtttctatacgaaagttacttaaaaaaatcatattaatccatttttgaaaaaaaacagttaatacttaattaatcacgcgttaatgcgaacatcattttgtgtgctgggaaggaggaacccatcctcccaaatacagccttaatataaaacaagctaattatatgtgatgatacttatttctattaaaagttaagacggttttcgtgctctgaaaaatatttgtttatgtatttgtgccttagcatattcggttcttatttgtatttgaggtaattaatatttattttttgtattcgagctattcaaatttatttttttgtccgaccaaaaaaaacgaaaacaaatacattaggagtatcatctgtttgtatcagctttgttttcatcctagtatgttgtatgctgtttttttttcgatggtgagaacgatatgtgaatgtgattaccatcgattcataaattaatcgaggtagagaagaacacattttctcgcaactaaggataagactatcatatttttctcctgaaagaaaatattatctttttgaacttcgaaagaaaaaaaaaacgcagtacagtaccagtagtactgtatttttatctctctacctttattcctcccttcgtactttcgtagccagccagagaaaaatctggaccgtgcattcccttctccaacggcccagatctctcctcccacgcagattccacctccccgtttgttcgctccagtgcttcgcacaagcaagcgcacgcacgcacgcgcggctttctctctcctccccctctctctccccttcacctccgcacccaacaatggcgcagccagagaaggtctcgtaatccaaagcggcccgcctcgaatcccctcgcgcagccgccgccgccgctcgatccccgcggcgtcgcgcggggtcaccggaggagagccgcctaacaagcccctcgcgagccccctgggggtattctgctccagccggaaggaatccgcggtggaaggccgccttcgaactcgcggagaggtatatctatatctcggagcctcgatcctcctgttgagtggtggctcccatttatgtagcgcggtttctacgggtgtttcgatccttgttcgatttgatctagggttttggttaggggggtggggggtattggttggttaatcgcgttgttggtggtgtgagtttttattcatatattattcggttagtgtgatttttgtgcagcatatagtagcggactagcgggtgcttatgattggcagcgattttgcaggagattttacccgagggtttcgattccgagcttgggatgtacggtcagggagggaacttcaatccgcagtatcggcatgctgcgccaccgccgccgccgcagcaagctggggtaacgggtggcttccctcagcaaccactaccaccgccgccgccgcgaatggcacagtatccgcagccgccagcaatggcggcgccgccgcctggaccgtaccagcacaggatgccactggttcagaaccaggcctacccttttgcccagatgcatcagatgccaatgctacctcagcagaggggttacgcccagatgccaatgccagggccgccatcgcagccgccgcctccacaagctatgtatcaggcccatcctcagtatcccatgccagggtctctccctccaccgccgccacggccaccaagctttgctccagagaatgcgctgccaccatctagccccccgcctccatctcccccaccaccaccaccgtcttctccacctcctgtgcccccttcaccaaccgctgcccccacaactgggcagtcatggaattcagagccagaaagaaaagaaggtgccactgccacagatgttggtcatgatgtcaaaactgagaaggtgactaatcagctaattgtctctgatgactcggatatggatatggatggtaagcgaacctacccgtcttctgcctctcaactgtacactgttaatttgtcacaattctaaaaattagtcctgcatgctgctccactctgtatttgtagtcaaactttgtcttactttgtgcatttattggacatgcttcccatcttattcctacctgatataatgatcaccactgtttcttgcaaaaagactggtataatcctcctgtcatcagaaatattgttgaatctccatctgcaggacagtttatatgatgataaactattaatatttattttcccttttgtagctaaagcaccaaacactttacttctcaattgatatgataccttaactcctgtgttaatccactgctagatatttactttatcaagttaaatttcagctgacgaggactctccatcaagggaacatgtcagtccaatcaattcttcacttgcaactgctgaatgtactggaaatgttaacacgcgaaagcctgcgtgtgatgtttctaaccttgtcaaggacagtggtggtaaggctaaaactacaaatgtaactgatgaaggtaggagcacattccaactaattcaaggctatgcctcagatgacagtgaagatgaggatggtgcttgtgctgtcagcaaccttgtgccattgactgaaaataatgagcctgttcattcaattggtacaaatcctgatattggccatcaactccttactgaagctgctccttgcactgagagaagtttggaggatcgagagcatcaactcatgagtaagagcaatccagtgaaacatgattcagatgaacttggacatccagtcaaagaagatttaagtggcaatgattctgatagagggcaacagactagaagacatggcaggagccagtggaaacgaagccgtggccagtcacctcagggcaggaggagctgtagccctctgtcccaaaggtaccaaaccttgtaccttgccttcaacttaaattggtgcatcaatttatctccacaaattggaactctatttgttttagatttttatatgtcatccagtttgcacaagtgaccccctatgggagtctaagaatcttaaatttctttcagtttatcatctggaaggcaaagcaattctccacttgctaagcgggctaatctactcgagagcaaatcaccagatggagtgggtcagactttcagggcacaacctggcgtcaagcttggtataagcaaggatggattctacaacgacaaacatgattcccctgtaaaagttgccactccttttgatattcatcctgctggagggcacatttcaggagatagaatatctgagcaagatggcctgatgggaacaaagaagtttaatggttctccagatgatatagattgtaacgagaaaacgaatgatgcatctgttggttcctttggaccacatggtcatggtgcagttttaacttgtggaccttctcaatcagttgcttcttctgcaaatggttctgatcctcataagatgcaaaggtcaggccgtgcatcaatacctcaatcagacatggataaatcatctctgggtgctcatcaaagtctttcgagtcaacctccaggaatctcatttgcaacagtacatgctactgagaagaatatgatgtgtgatgtgctccaacctcattctcagaatttatgtcctcctggacagatgccatctggtttgagaccagctcatataccatcctcaaatataaccccactcccagggcaacagttactttcgactccagaatttcctcagatgcacttccagcctaatgttatggcaccagctaatgagtttctgcagagtcagatgcaaacctatcctgcaccagatctgcctcatcctaggccattggatttccatcctcatactctccagccagttgtccctcctcatcagcagcctgctgccatggttcactcctctttccaaagattcacaccaaatctaccaggaagtactgaatttggtgctatatctgatactgatctgcctaaatcatctatcaagccccactacaacccttttgcgtctacctttgaacaaacagatccgactctaaatattggctgtgatgttatcccaaatccagttgagtctgcttcaacaaaagcagcagaacacgcgaatgcactgtcaccttttggtctgtcggttcctggatctggaactcatgtgcgtgagaattctgcggaagttgtttccagtcggcaaaagcagcctcatcgtgaattcacttctagtgctccctatgatccactgctcgacagtattgaaccctcaagcagttcaatcaacaaaatggatcttggtcgagaggcaaatctgagtgctagcaatcataatgcatctaaaattgtgaacatagaagtggagagtaaaaatatgcatggcctggggcttgttgctgaatcggaagttgaagaatttggagaggtggcagcagatactgaagcaggtgttgtggataatttaagtcctgagcccttgggtgcaaaagactggagctcagatatgcccggtgatattgacaatgatgaatcggtggataaaaataagaggactaaggattccagatcaatgaagctatttaaggttgctattgcagattttgttaaagaagttcttaagccatcatggaggcagggaaacataagtagagaggctttcaaaaccattgtcaagaaaacagttgataaggtttctagttctgtccctaacaatcatattccaaaaacgccagccaagatcaagcagtatgtccagtcctctcaaaagaaagtgaccaaacttgtaatggtatgtccacgattcttctgtagcaatattgattacttagtttgatattctgcaaatactcttctgaccatatgttgtagttctctataatggattgtgtttagtaactgatttttttatgcgtgatatgttaagtatctaaacagtaaacacaaattttggagaaaaaacaattgcgtgatagtagggaacaaaagttgtgtgttctagtcaactttgtgctattcagttctttgatgttgtgttttgattggagatgtcctggtatctttgtgcaaggagtcttccagccacttggtaattggtttgtgagtttcagtgtcatgttgtaatatacactattaattgaataaaccaggtttatttagctattgaataaatttgaaagcacaagtactttcaagattgaaacattctgattctggtgtatgattttttttagtatatgcatataactctacagttgaaggatcccctgagccaatcctctgagccaatctgtttcttttattcagggctatgttgacaaatatgtgaagctatagttggatcagtaaatgggactatgaactggagcaatcaggacagtgtccttttcctgttgcagaaatcgtgatgggactatggactatgaacagctcacacgaatctgagctatgctatggtattttggatcatcaatttgcagtctttcagcagtaagggattccgggtaatagttctgcagaaatggatgtatttatcagaaaatcacgagtttacattggaacaattgctgcctagtcttcatagccttgtaagatgtatctttgctccactgtttctttttttcttttcttttgagtagtttgctctactatttcaccatcattaggcaagtgatagtagaacgttctttaatactgactgcatgaacgcattgctgaaaagaattatatttcttcaaggtaaatgtaaatgatttaatcttattgctacttcaatagttcaatgaacgtgttcatgtctgatttagccaaagatctccctaagaccctaccgcctttgctggatgctagtttgaccatttgaacaatataaagcgacttaaactgcagttggctcaatctttctaatgtattgttatatttacatgttacaagtaatgaacacacaccaatttgacaaatatttctcatgttgagctacgtatgttaccatcgtgaaggggatcgcattgcaagattctagagcgtggtgttgggcagaggcagagaggaggaataagttcacttaacgactgagtttagatcacgtactaaaccgcaatataagggcagtagcaatcatggtttcccaaaccgccgggttaccgtgcctcggtggtaagcacggtaaccgttgcaaaccgtacgaaaccgtgtaaaatttatcaaaattattttttaaaaaaaatatttatggaggttaccgcggttgtctttttaccgtacccccgcggtaagcgcggttaccacggttaccggcggttctgcaaaccctggtagtacccatttgaggaacctaaaaatgccataggttctgcaaaccctggtagtacccatttgaggaacctaaaaatgccatataggctataggtaccgtgtccaaattttggttccccacagtgcaaatggtctcatgggtgacttcaattttttgtttcagcccctactacttttgatttcaaccctcatgtttttttctcaatttacaaagaagtaaaaattttacagtgaacatcttacagtggagaaaataatacaaatcacaaccccacccaggtacccaccaccactaggtccacaaccctctccactttccctacccactcggcgagttcaccggcgacaccgccgcctcccgcctcttcccacctcggcgacgaactctgctgctgccagcctttccccactccccataccttggcaacgaactccgccatcggcggcctcttccactggagcagcgtgggagctcggcctccaccggagctcgagcggatcccacctggagctcgatggtgctacccgaatctcgcccggcgcggggtggcgttgccggacatggagctcggcctccaccagagctcgagcatatccgacctagagctcgacggcgccgcctagatctagcccggtgcggggtggcaccgccggacatgaagctcggtggcggatcgggcgacggattggtctctcttatcctctgttgccggctcctgtcctcctcaacgtcacaccaccatcctctcccctctcacctctccgggcgccggatgctcaagctcactgcccctccccaactctgcagatcggggggtgtggagctgtggaggggctcaacggtgataactgcggggtggggaacatggagcgttgatccagtctactatctctccccctctcctacgcgttctctgacgaggccgagtgttcttcagtaggacgcaatgggtgagctagagaaacggggccccaccatctctttcctccaagtaagctattcaccgacgtggcgcgatgaggtaactcgccacgtccctgcactgtgaagggcctaagatgtttaacttgcaaaatcggagtgcacgaggtcttcagatagtattgaggtcggttttagatgatatggcacttacattcaggaaaaaggaataaaatacgatggtggaacttacatgtcagacaaaaaaaaaactacccttctcttccccctctcccactaacacgtcctgacagtgtgctcctgtccctctatctccttccgctgccccaccacttagccacctgtggcgacaaacagagagagctcgcgcatgcaaggaagtatcatcgtcttcgcccatcatgttggtatccgcaacattcgttggagcaggggggaccagcctcgttccttgtcatgctcgctgtcgtgttggctgtagtgtgtgtgtgggcggcgtcggggataggcaggaggacgacaggcagtgcttcgtcacaatcaacacgctcaccatggccatcgtgttgtacctcctcgttggcgacctcatcggtgtcggcgttgtcaataatggcagggttgtctcgaacaccttcgtgggcatgctcctagtactagtgctctctctctctctctctctctctctctctctctctctctcttcgtcgatgttgtaggaggctcaccgaggggcaggacaagctgtcctccccggcgtccctccccctccctgcgctcaaagcctccgttgaaatccaccgccgccgcagaaccccttttaccccaaactggtcatgtggcggctgccgcgtgtttggacgaaggtgccatccacatcattgtggtggaaacaaaggaaaattcgatccaagaggttggggagtgggggggtggggagagagagagagagagagcatgggtttggggatggaattttcgagcttagctctcctcccgtcaatcgctgtccttctccctgctagccaccatcctaccttggagtccatagaaatgggaatagaggggaggaagtgagagataagggcccctaacatgtagggcccatgctgattcagcgttgttgatttcgatcaattagccacgtcggacaaaaccagccgctatattatcatgggacctcctttacattggttggttttgtaagttaaggaagatgttatatctggtattgcagtttaagaacaaaatttgaactaggtgtcaagataaggacctaaagtgaactaagggg

SEQ ID NO: 20881 - DNA, 9256 bp, Oryza sativa
attccgcttgctcaaatgccagcccaatttaaattctaaatgtggctcccaagaatggtggattatgcgattttccaccgaacatgcctaaagcacaatgaattgctcacggtttgcttgtgttcaggggaacataaccttttcaacataacgaaaatcagtaagattttcctccatccatgtccagcatatatgaggaaaagaatatgaaaatacccgctgagtaacaatctaaatcacactgggaaaagaactacaatgacaccctactggtatgaaacttttgatccgcttgtgctttttccgtgatcaatgcatcaagctccaggcctcaacgtccagaggatttaaagagaaatgaaattacaggtcctgatcaatagggtgccagggaaacgttcaaggcaacatgttttcatcacccagaaaactacagccaccacagccagatcatctctcttttcgcaccgcacccttggtgaccaaggccatatagcaaaaggaaggttggataagttatgcagctacaagatcaggcgtctctgcctcaacggacaacagggtggtatgcacttttccaacccaggcgtccaaccgctcgcgcaacgccttcacctgtggaattccaagtactctaggctggacccatgacacgtgaactgtgctgtccacctcatcaattatcccctctataagatgaacctgcaaaatgggggaatcattaataattctctcatattccaatttacttttaaattgtatggcaattgatggcctcatggaaatacagcacccaggctccattagcaactaaatagaaaacatcagcatggagcttttgtaagaagctgatagcagtggcattctatcttggctacctatatattctgcctttcaggggcagcattattatatactataatgtactaactgatgtagaaaagaactgtaatggaagaaaaagatgagaacatcaactaggaatactagttgatacattgtgcaaacactgaagccgtataaggtaaaagcaatagtagcatgtaacaaggagagacacaggtttgctgtgatcaacaaacacaaatatatgaatcacatgtctagtttaactgacaacgcacacccataactcacaactaaagattcacaaaacaaaccatcagcaattaaaaaaaaagacaagttcacaaaggggaggaattgaaggcagtaattatcaaataatcactatccatatacagctgccacattaaaatgacagaagcattagaagcattctaatgtctaatcttaaaaaacaatttatgcacaacaaaactagatgtttatgaatggcattcatgcattgtctatcccaacaatgaattaacatgatattggcatattgcaaataatatcttatgaaagatcgaatgtaagaaatgcaattaccgagaggctcttcataagaagatattccacatcactgatagaaagcttagtgcgctcggctataacacttaatgggatagttctgtcttctgacgcccggctacaacatgaaaaagaacacagggcttagaaggaataaaggaaaaggggcaagacatttgtggtggcatagaaaagcaagtagcaaagttgtacctaaagattatctccatcagacatagaatgttgatcttctctagcagtttccgttcattctgcaccaaagctggctgagcactgagagcagcattgtggaccctacatagttcttggtagagagctaggttgccggtgttgaatgcttgtaacatatgatagacccactccaccttggttccaataagactgttgatctaaggatataaaaatataaacaacttcagacagagatgtaccaaatgacaaccatatatgccgatatatagatttaggggccattcaatatttcaatcccataaaggctaccttgtgtctggaatttttttgtttggtatccacaagtcaatattgatttttccatgcacaaaaaagatggtttgccattaattcatgcaaacttaagtttatgctatttcaattcaagaaaatacgaagtttacataattataatatagtggttcacaattacatcattcaacattcagcaaaaaaggatcaggcataggatatttcatcattttgatatgctttacacaatcggtagcattttattgtgtcaatgttaactgcatacattcaactcatgaaatttctgctaccgatttggcaatagatgtaagttactgtgtacaaaactccgaaacttaactaccataacatacacaggtaccttggacgccttgcagttctagcaagcatcagataaaaacaactaataaataattatcagaactggcagttgtgagtaccaagaaaagccacatgtaatgtttatataggcaagcagagttaattttaatcaagcaatcaagaaacacaaaaaagtatggataaaacaaaggtggtactactaactagtggcaacaaaagaaatcatgcgtaagcaaagtccaacttacaatcgggtgagctaacaattccccaaagttgtagatgttatcaccaagcaaggctgcaagggagagatcaaatgccaaatcctgacacaagacagcatcaaagggtaaacatagatgcaagatacattattaaaataatgcgaggaggaaatgattttttgtcatgtaattgcattgttaacaatagaacataccagtttgaaagactcagagagtgactctacagtagtgtaagccagatacagaagggcattcttgtagaactcagcaaattcttggcgagccttatggtactgagatgatatccagtagaggctagcatgaactgtgggatcaacatcagtcatgctatctagagtagattttccttcgtccaaaagtttcttgcactccttctgatttcccttctccaggttaatcgcagcgatttgcatcttgacgtagagaatgggttcattgatgcgcaggtcctttgtctcgcgcaattttgtgattaccccctcgaggaaacttatagcagcatccttgtcggggtactggcgcgaagcgatgaccgcgaaatgcgcaagtttgagaagattgatcttcgtctcgaaatcagtgatgaaattgttgtagagctgtatgagggtgtcacccgtctgtaggagaatggatgccgctgttagaattgcaaaaacgcagaaggcacaacacagcagttacaaacctaagcaaggttcaaacaacaagagtaaatttcactttgggcatctttatcaaccaatatttcacaacagagtaatggactagggttaaggcttatcctttcacataacatcacatataattaaaatcttttgcgctttggaccacagcttattccctggtacctcaatttccaggtagtgaaatctgatctttaaatatttcatatgcaagtaatgaaacccaaatatttatcttcgaatgttcatatgtacttttcaaggttgaaacatgaggtttaaatctccacaaagtggcggcctgtttgcggccggatcggtatcgaatttagggcccatccagtccaactagggttcaaatcgaactaggcacggtgggtagggtttgcggcgagatccgtacgggggggacagcagctaacctaaccaagaacaagaaggcgcttgcaagagagggtgaggggaggaggtggtgggaaacctgcgcggcagggagctggaggaagtggtcgagcttgagggtgagctggtgccagagcttccgctggtagaggtcggcgaggtcggcgtacgggtcggcgagctccggccgcgcctcgcgctgcgactcgacgaactgcagcgccatggagaaaaatccccccacccaggagttggtcgctcgctagggtttggggaggagaggagaggaggcgagagggggatctgcaggcgcggcgagcggaggcgaacaacaaagagcaatctcttctctttccttctttcttgtaagaggaggaaagagtaggagacggagacggagacggagagagagagatactttgcgtgggctgggctgattggtgctgctgctgccggcccgcacgaggtcgggcctagtgggcctagtgggccttataggccgaatagtttgttaagtctgtttttattgagtgatcttttttaagatcatgtttattaggttcgcaacttgtatttaaaggttgttttgggaatttctacttggtaatttcaacttatatttgaaaattttcaattcaaattttttaaaaaaaatcaaatccacccaaaatttgaaaacttcgtatattaccatcgtgacaaagtgaatctcaatgctccctgccatgttgtttgaagtgatcttacgctgaatttctttttcattttcccaacctatctcacttgtttttcacgccaagtttttcaaactactaaacaatatgtttttttaaaaaaaatctatacgaaagttactttaaaaatcatattaatttatttttcaagttttttagattaatacttaattaatcatgcactaatgtgtaatatcgtttttcatgtagagaggcaggggcggagctagaacgaaatggaggagggttcctcttgcttaatttactctaatttagatcaagttttaagctgatatgtgtatgcctaagtttgtattaaggagggtgcacacatggtgaaaatcggtgagttataactaaaaatttttttttgaccggattcttgggcaccccttccatactctacctccgccccatcagggaggtggagttaacacagtcttaaggtggagcccaagtggcgtgcagaagtttctctagatttgcaagtgtttgggaaatgcacatatgtgggctctacattttcctaaaagtaaagaaaaatagaattccaaaacaacctgtgagtgctgctcacatagggtgtaggagaaacgagaaagggatcgtattcttttaaatggagtattgcttgaagcttggcataaaactcgagtttggcttaaagctaaggccaatctaatggggtcagggttgcagttgtggttacgtacctcgctatgggtttttgactttatgccattctcccggatacgtattctcaaataccatcattataatatacttaaattatttgtcatctgtactcactagattctttctattttgtcacttttaactaccaactcagcaacttgagatgagaatgactttattgcaccatctcttccttctttcgttcatctctactttgtgtatgaacttgtcttctctctccattcgtccctctccagcatgccgaagagtctatcaacattagcgttggcgccatccatgacacctcgatgaggaagttaagtaggccccaggtggcagagctacttgagagcatagtattcatcgtctagattgacatgctggcggaagttgttgcggcgacagtcccttttccttggcatcgtcggcagtcgatgaagaaggggaaggggtagagctgcgacgaggtccttgtcaaccctgcagtcaccatccccaacaaggtgtggctcaggttgattccttgatcgacgatcactgctcggggatccaacctagatctaagcgaccgtccctcacaactccacatagggaaaaagtgacgacgtcgatagcgcaggggaagagcagagagaaagggacaactggtgcttgtaggcggaaagcttgtccgcgtgcatgaccttgtcgaagctggagcaactcgttgaccaaagggagtggagtttgaaagggtgggagagagcagataagggataattagatcttttgttacacggttggctgagctagcaagaaaaatggcaaaatagcaacaatctagtgggtccgatggcaaataaataaagttgtttggtaagatggtattggagaatatgtcgctgagaaatatggcaaatagtccaagatccccctagctacttccttctccttcgtgcgtgttttagcgtgtaactgcttcgtgctggctttttctttctataaacgtttgatgaattctgaaacagctggaagagcaagtttgctggcaaggtagtatagggatattccacccgggctagagcatcgcattcgcatatatcggcgctagacgccttcaccatcgtagcgtgacaccagcaaattccgcagccagcagccagcagccagcagatccgcagaagtccccaatccgtccaagctccaacaacgctggggagtgtggccccgcctggcccccaccagctccaccaaccgaggcacacgctgcggctgcgcgagcagggcccaggtgacggccgcccgcacgcacacgacacgacaccaacgacgcgacgcttcccctttccccccctcatccgccgtttgcctccaccccccacccactccaccgtccccgctctccccccattgccgccgccgcctgcgacggccgcgagctcatcccgagacgacgtctctagctagcatcgagcgttctttctctcctcgggctctcgttggtaagccctcgattccggtttcctcctgcttctcctccaacctgcccctcggattagtcgccagtttgttcctcgttagttcttgcagtaattatagtgctaagctccggttgtccgtcggcaatacgccggtagtccatgcaccagtctcgttttcatgggttttgttgtttgcagcaggcatacccctgtttcgctagctcaatcaatcatttcattgctactattttttttgttttactttgtatttaacgagtacttgcatctatgaaacaaacttcacacaaatttgatgctcatcaggttcttagttccaccttcttttgtgttttttttgttcagttgagataaggcaaatcaagagagcaaaattttggtggtacatgtggtgattctatgtcgacaaggcgtcatcttgcagtatttaccactgcaagcctcccatggatgacaggaacggccatcaacccgttgttccgggcggcctatcttgcaaaggatggggatagggaggtcaccttggtaatcccctggctttctctgagggaccaagaattggtttacccgaataagattgtgttcggttcgcctttggagcatgaggcctatgttcgtcgctggattgaggagaggatcagtttcagaccttccttcagcatcaaattctaccctgcgaaggtacattgatatattaacgcaaagagttcattaaccatttaaccctggaattctctattctttgtgagattttcttttaggtggttctgtacttgatatatcaagttctctatactttgtgggattttcttttaggtacattgatttatcaagttctctacaatactattgtcttctattttacttggaaaataaaatcgagtcaaattggttaaatatttaccgttgattgaacctgattaccttaccatggagttatggttaacctgggtcagttttgtcagaaactcaaccccctttcaggtttcagctaactttaaaaaaatgcagctcaatacagatgatgtggtgcatataccatttttatttgcactgttagcttccatctagtaatactcatatttatatcttttttttgctttagggattttcaagacaattaatacccttttttctttatgatgcagttctctaaagaactgagaagtattctacctgttggagatatcacagaatgtattccagatgaagtggctgatgttgctgttctggaagaacctgaacatctcaattggtaccaccatgggcgcaaatggaaaaataagttcaggcgagtgataggtgtggttcacacaaattatatagcatatgtgaaaagagaaaagaatggacaagcgattgcctgtttcatgaagtacatgaacacctgggttacccggatttattgccacaaggtaacatcaacgccatatataacaacagtgaagatcccaagaattatggtgattaatctgaggatgcattttgcccatttaatttatgttccaattttacatggcgtcttgatggaaatgaaaaatacaagagacatgtcttttcagatttttctgtctgaatgcatctggttgttttggcttatgctctattacatatttattgaatttgaagaaccccaaactcccataatcatcatgtccttattaaagcatgcaatactgacttttgttgattttagaacagattatcagattgtcaggtgccacccaagatcttcccagatctgttgtgtgcaatgtccatggcgtgaatccaaaatttcttgaggtaggtaaactaaagttgaagcagctgcggaatggggaaatagccttcacaaaaggggcatactatattgggaagatggtgtggagtaaaggatacagggaacttcttgacctgctgtccaaatatcagagcaagttggtgggtttggaagtagatttatatggtagcggagaagattccgacgaagttcgaaaatctgcagaacttctgagtttggccgtgaaggttcacccaggacgtgatcatgcagatcccctgttccatgagtgagttctcttattgttcaaaaacttccttccgtcttcttaattatttgaatgaacatgagcgtacaactagacaagtttaaccagctacttttttcattgttgttcaaaaatgagtttgagggttacatatcattataattcattgcaacaatgcaaggttactgaactaaacaaaacgttgaacacaggctacataatgaggtaagacaagaaactgagagtgctaaatcacctaggaatgcaatataactcataatatattttgtcatctatattacattcagcatatggcaatggtttgtgtggatactgaaacacttcaatttcccaacagctataaagtattcatcaaccctagcacaacagatgtggtctgtacaacaactgccgaggcccttgcaatgggaaagattgtcatatgtgccaatcacccttcaaacgagttcttcaagcagttccctaattgccgcacctatgacagtggcgaggaatttgtacaactaacgctggatgctctagcagagcagcctgctccactgactgacatgcagagtcatgacctatcttgggaggccgcgaccgagagattcatggaagccgcggagctgaaccttcctatctcagcagagccaagaatccatcaaacatccaagg

SEQ ID NO: 20882 - DNA, 16328 bp, Oryza sativa
  unsure (1)..(16328): unsure at all n locations
cgccctccgccttgtacggtacggcccggcccgtggggcccacctcgtcgcagcggccggtgcgcggcggccctgtggcgagtcgacacgcggcggcgaggctccgcccctcctccatgtgggcaagttgggccgaccggccacttgccggtggggtgtgggcccccacgcgtgcgtggcgcgaacgtgtcgcggtcggcgcgccggcgcacacgtggcgggcgggagggggtagacggtgtacggtgtaccctcgggggaggcgcggagtggggcccacgtgtcggtgtggaggggtgggtgtggatcgggtgagaagaggtggaggggtagtacgtactacctgaaaaagggtgggggccactgtgcaagttgggtgacgcggggtgcacctgacgacgtagtagtagcaaggactgcaggaggtgggaggtggtggtcttttttctgatctcggctcggctcggctcccctctatttcaattttcaaggcacgtgtcggctacggcgatggtcggcttgagccgtgagcccgagctgcggtgtttgtcccgccgcggcctggtcggcttcggctctcggctcctcgcgaggtggcgcgcgagccgcgccacgcgtcgtcgatgggtcgacacgtgtcgcgcgccgcgtccgggggtgtttgccgttccgacgaaaccccacgccccaaaagcgaaagcgagccgaccccgaaaaggaggattttttttttccttcctctctctcttctcctcctcctcccttcccatctccgccgcggagaggcgcaggcgagggcgcgcgttccccgcaatggcggccacctagtccctcaaggaatcctcgtaagtcgcatcttcctctctctctctctctctctctctctctctctctctctctctctcgccgcggcgggcggcagcaatggcggattactcgctcggtcagttcttggctcaccaccgttggtgttcccctgtttcttggttcacgccaggcgcttcttcttcttcttctcggatgcgagagcttgctgtgattgctggctagctagcttgccggaatggagggcttctcgagggacttgctgtgcggcatcggcaagggaggagacgggccccgcggcgaggtgaggccgcgcgtggacatggaggctgaggaggtggagctcaacctcgggctgtcgctcggcggccggttcgggctggacaggagaggggagaagctcgccaggtcgtcgtcggtcgcggccatcttggcggcgccgacggagccgtcggcgccgccgtccgggctcttcaggacgagctcgctgccgaccgtggccgccgcggaggcggcgaaaaagcagggtgtggatgaattgaactgtcgccgcccgagcggcggcgcggaggcggagcccgcggcggcgaggctgccggcgagcgggagcccgtcatcgggctcgtcggacggcgaagggcgcaggcttgaaggtgcgtcatcgcttctctccatgggggcgtgtgctatctatctatctttagcttttatgatttcatacctaaccgatgttaattgcgattctttggtaatatatgctgctaattatgcaaattagacacgaattgtttgggtgaattcaaggtgaaatgcacattgggaaatgtgaaattgccctgccatatgtcatttacctgacgtcctggtggtaaataaagtttggattaagatgcttgggcgttggtctttggcaaagctaatgagatcttccatcactggtgcttcctcgttaacaccgaggactgtaatttcgatttacagcttaaattatccaacagtgaaattcgtctgttttacccctcttgaaaaaaaaaatttctgtttacaactgttgcttccatcatctaaaaatgtggttgctatcagtatatagtttttaggatcgtgctgctggcttggcaagtcagtttcaggatatctgttcttgtcaagtagccctttaagtcacatgacacgcgcaaaaagaatcttaatgggtattcttccttgttctgtaactttctaatttcacctgcagtagactttcttcagtactccttttataggaacgcctacaatctttttaacccaaagggtgaggatgggaattaagtaaatatggataactgctagaatggataactttgtagtgaactgaattcatagatcttattcaactaagcaatcagattcagcaagctttttttttttatccgtgaagattattaccacagttcagtgactagtggcaggacacgtggacgtggtgcagtgtttacagtgatgaacaaatgacgataagcactcgagattaaggaaaaatcatcttttatgtttctagattaaggaagactaattatgctttgcctttgctcaattcatagatactcttcctcacatgaaagaaacttannnnnnnnnnnnnnnnnnnnagcagaattagtttgagcctgggtagcatgcatggtagaaattgaagaagtctttcatacaactaagatctgaaatagtaattagatacagagtggttactggttaccaagtttcttctaatacatagtttctcttattacttaataatcgcactacttcaacagcagaaagaaacgtgtcctatgtgtggattcaagtgttaattggttgcatagcattttatttccaagggaggtgtgaacaccattttgttaacgtcaagaacatatttttgataatttgaaaattttaaaaatggtagttaaagtaaaatatatgaatttcaactctcaaatagaaactagctttttgggggaggcataatttttttatggtgaactaatcacacctcacttcttagtcaataatgattttgatccttgtaatgcaatctatgtatgtattcctctcattaatgacagcaagcaagagctttacatagacattgagttacgtctttggatggatgttggtaccctttgttagtggtagcctaacctaatgcggtgtttattttgaagcttccagaaataatacaagatgttctattagcatattagcaacaaaggacatcagcagatttgtttttgtgttactccgaataacaggtagcaaattcatggtggaaatgtacatggagctcgcaaacattggctaattatggagcaattcaagttgggttcagcgacggttgatgttaattacattttgtttcattatctaatatttaacaacaataatagcaggtgcaacagcacaatgtacatatgtaggtgttgaatcaaggttgatgctacctgggtagctaactaggctttagacgccaagcctcacaggcagctaatagcccgttagttgtgttgtatttttcaaattaccatataggtgtgatgatgtaagaatggagctttactcgcacattgtgcacactacattttaatgctgccatatatgatgagatgaaacaaaaataacattagaagacattcctaaattttccaattctagtgcgatttggtactagagtttgcatgttgcatgccctccccttccaacttgtcgctaacttctggttctgacattgcattagggctgtggacagtaagtaatctgaacctgcccagcatgagctcctagatgcatgtgaaattggtgagctgcaggataggcaactatctcctgcggtctgggaggattcagatattactttactactggtctggtttaagggaaaacataccatttttcctaagaaaagtgaattaggaaggattggtcgacaatagtaaagtccatagttggcgtcaatggatgtaatttcattgtcgcgcaaaagatgaagaccccttgactgtaacaacctagtggacttgcgttcaaaacagacgagttcgaaaggtcggtagagacagctcctatcaacggacaactgtgaaaaacaaaagatggtggaatgcagctattcatggaattggaccttactcttgcttatacaccaagtgaagtagtgctaggaatgtttctagaatctagaatcgtattagtaaagccttatgctcacattgcttttgaagtgtcttgttcttcccgttctaacctatcgtttagccagacatgccgatatattgttctgggcctattttgtcattgatgttgggccaattgtggtccgaactccaaacgccaaataaatttgatcggagggagtacattgcgtagctacgatattacatatttccaaaagaaaacaaaacatgcaaagggagtacgataagaatgttaccgaacaaatttagtttaacccatttctttcgggcagtttatctcatattctgaaacttacagttttctgtttaatttagaatatggcagattccggaacagtttaactaaccatgttttctctttcgtagtgaatatgacagacactctcatgagaacaagttcactccctgccggcatcgaggatgaatggaggaagcgaaaggaggctcagagtctgaagcgactcgaagtgaagaggaagagaattgagaggaggaactctctcacttccaacatttccaaagaggctgttgggcagatattagaggagatgaatgcaggagctgagaaagtagaaagttgcgatgatgttgctacaggcaataagaagacgggaggaaatgtgaaccatagcagtgatagaaaccgctgcactggacttcctccagtccaccgtgccacgtatactcaacaacgtggcagtctgtccggaataccaacaaagcatattccagctatgaaaggtaaaccgcttacgttttgtcgttttgcatttgttttgtcgttttgcattatagatacgtgaaaatattttcttgtcaatctagcttcaagcatgattgtttgatatgatattgcactattttgtagtttcatgttttgttctttatgcttgtcacaacttttgcccctccattatgttcatgtagatctctcatgtctgagggcttttagatgctcaatttatttatattgctctcatttgtgcgagtttcaagtcaaatgtcttgaatgtgaactgggcatggatggttggtgccagatactgttatgttgttagccgctgtgcgcaatgttttttttcctaaatggcagatcgactaaaataaattatgttgtaacaaatgcctaatttagtggcctggattgcatggccctgcctccggtcaaaggatggaaactacttccagacttgaaagtatggagggtccacacaaaacatgtatgacaaggatcaataggttatgttattagatgaaaatatcagcaattggtcatccttccttacttccttacttcctttcatgaggtttgcttatgtttctcattaaggcctgtttgtctgtccttccaggatctgctgatgccgaagagcacaacgttccatcggccgctactgagcaccgaaatggagcagccatagcaacaccgccattttcggcactggcggtgagggcagtagctcttgcttccaggggagagcagctgcgtgctacaggaagagttgcggcaagagccaagagcatgggagatgtggagaggatcatgatgcaggagatgccatgcgtgtgcaccaaggggctccccaatggcaagagggttgaaggcttcctgtacaagtacaggaaaggcgaggaggtgaggattgtctgtgtttgccatggcagcttcctgacccctgctgagtttgtgaagcacgccggaggtggagatgtcgcgaacccgcttcggcatatcgtcgtcaaccctatcccgccatccttatactgaacctctctgtcagctcactgctgctcttgcaagtgttactatagcttcagtcagcccttcaccttagcttcagaattcagttcagagtagaatctgattgtgagacttgtcttaatgttacaagtgtttattatgctaaggagacagcgggagatttgctcctgctgacataaaaagtggttaacatggctccattgatcattgttaaatggttcctgcagctgcttttgttcatgcaggttgtgacaaattcatcctagtgcaagttactctggcaacaaagatctcctggactcgtagtatgttcaagctactacttgcaaatttcccagccagtcagcagcatgacccatggagatgtcaaaatcctgataccgaataaccacggaaaccaccgacaaaaaccaatgaatttcagacagatctttaaaaaaaattgaaagtatgatcaacccaaatgctacaaagaatgattgtaaaacactagatacggctagtgcagacaaatgctacaaagtatgatcaacccaaaggagtgcacaacagagactaatctgtaagtgcaactgtgcaagcatctgtggaagtctggcatacatgggaacaatgtatataggaaattaacatcaaccagttactgattccaattatcaatttcacaatctgtccaggcaaccatcacatttgaagataaaacggctgtataacagcatcacattctggttgcctcaaaaacaagttaagcatgcatctacctataatacaaaaggctaatactagctagcacctaattgcagtggagaaaccataatttataaagctattacacctcaaaagctttcatggacaggcacttcaaaagcttcaccgaaacactgcatctaagctttcatggactcttcaagcttcaccgataattttgcatctagcaacctgtcagcttggctatctcctcgagcatgtacttggcttcagctgcgtggtctaccggagcttcactcctcacagtgatcctctgcctcttctcattcatgtactcattctgagttacgctgacgcggaacaggtgaggaacccaagtagcttccttcagcttgagaaggtaactgtcatcaccctcctgaaacaattgagaccaacaatcttaggcacagcttaaatagcaatcttaggcatgtagaaaactaaagcctagaatctgcacaaagttgaactgaagcctagaattcgcacaagcttgaactacagcctggaattcgcacaaagttaaactaaagcctagaatttacacgaaggtgaatcaaagttactgtgggattggcaaaattacctccttcctaatccgatcaagctcatctgcactgcagccaacaatcctctctgcctgatcattgaacagagaaagccaggcctcaccagtagggtcggagaccttgatgaccatgatgtacctgaagaaaggaaccagtgtagcattagctttggctttgtatcatctcaaattcaagcatgcacggtgtaattcagcccaaagttttacctcagtgagcactcagcatcattcttctggcacccttcacaccagtatcctgatccaattgcctcagtcaccttcttgttgcaggtcttgcaagctcggtaccacatggtttggtcaggcttgataaggctaatataggcattcagactgaagaacacaggctgcaaaacataacaagtaaatttaggacaatcacaactagaaagtgctaataaactaaacatcaagaacaattccattttctttcaaagattccaagattttaccttatcctgacccaagttggggtcacttgtgatgtgagacagaaaaactctatcactgtacatggatctcgcgccaccaacccttgatgcgcccatatctgaaccaattgatgccattgaagtacccttgccttcagagtcatacctgtttgccaaaataacgtcaaggaccaaagtagatagtttgaaagataataaaaggagtgtttgagattaggacaataccaagctctgagctgttctgcctcaggcaagtcaggattcactacaattgtacttctccccacagttgacagagacaaacctgtcgacattatagtagtaatgctgttagcacataatcgccaattcagatcctaccacatgcaggaaggtaacacaaacataccttggaagtcagatacttttaggctctttatcgcaatgataggcgcagagtctaccatgtccaagagctcctgaccagtagttgtggcaagatcattccaaagagatatggttacagttttgctcctgccatcagattaaatgtaagttatcagcacataaaacataaagagcattcacatcatcaaaagaaaggagttaacaagccaaatgatgcttacgagtcatccgctacaacgatgtcacgctttggaatcgtctcgttgtcaatcttcctcctaacactaagagtaggagatacgctctgaacaaccccaataacatctgcaagtagggtaaaactagtcagaacactacattcacaaagtaggaacaagaacacatcactgaactgaaagcactattgccttacctactagctccctgccaccaacatatggccctagctgatcaatcttgacaaagttgtactgaatctgtgggataaaagtttcgccctcagcttcctcaacaacagcattctcattcagggtcatctcgtagtcattatggacagtcttgaactgcttgttggcgactctgagagatcctttggagatgtagtacaccttccccagctcaaacatcggatagaacttcttggcagcctcgttgaacatggttgcctggatctgggtgccctgtacacagatccaacaaaattaactcatcaatcaacatacaagaattcagaattgctcatgaactgcaattacatcctacggaataaacatttcacggtaggttgcacttacatccacatcagtgagctccacattgaagacgcagccttcaccacgagcattcttgtacgtcctcaggttgcccttgcttgtgacacgcaccttgatgatccagttgccctggtaggggttcagggagatcaaaggatgaactcttctcgtcatggccaaccgcgccgcaggagcagcactgcaaacaggaaggcatcaagaatcggcaggttagtctcaccaacaattctgcatcagaaacaactgaacaagagagatggggatctcgcaagaatcgcttacttgccgcgctgctcgttcacgatctgggacgcggacttcacctcctgcttgggcttcagcacaaccggaggaagtggcggcgcgttcgtgggcttggagagaaccacggattcctccttgggactcaacagaatcgccggcttctcctcttgcttttcggcctcgcacttgatctcggaatccagcgccttgaacacgacctcgagcttcgtgataatcaagaccctgtgacgcatatgaacaaaaccagagattcagatttcagaagacaaagaaacgcgagtggtctgaagaatcagacaggtggagcgcgcggatctgtacttttcctgcttttcgccgatggtgttgcaggtgtagtcgaggacgcggatgacgccgagattctggatgttgccggagcgcacctccggagcgagctgggtgagaagcatcgtctttatcttgtccttgccatcgctcgccaagaaactgcaacgcaacagagagatcgtgaggaactcgtcgctgaggaagaacaagaacccacccagatctgggcgagtttttccgtggcgcggaatcgcaagaacgctcatcaaagaggaatcgcacacaagaaacactcacgtgaagcgggtgccgatgggcttgaggtcgacgacctggaggacgatctccggcaccggcacgccggtggccgcgtccggcgacgcgttctccaggacgaacgccaccgcccccggcgtcactgacggtgccgcgtcggaatccatccccgagccgagttgaaggcttcacgcgggaagattcagctgcggcggcggcggcgatggggaggaaatggtttggagttgaggagaatgggagtgggagaggattggatccgcgcgcctttataacgccgtggtttggcgaggcgaggcgagcgcgcgggcgggaagggggaggagatggcgtttcggtgggatttttgccgcggggtttcgcgttctcctcttcttccccgcgcgcgaacggccgcgtctggtttttctttttttggctcggtttttgagctgtggcgggagaaattttggagggttttcgcgccggtggcggaggcggagtgcgagccagagagatgggccgggccgctttatcatcacgttcgcctgaacgaggtagtgggccgagactaatacggcccaattagtgagatgggggagctgcctcctcggccaggttgggttttgaggcccataagcgtgctttccatgggggcccactattcagcgtgaaggaacgacactacggcggaatcccccctaccgccggtccgccgccgctcgccgtagcctgcctccggccggcgtcgtagttgcgtttcacggccgttatttcagtctcagatcaaattggattgataagccaagcatcccaaattctcaatgtcacaatgtacaaattggcttacggcacagcagcagtaagcaacctgagcttcggcgagatcctcacgaggccagggtggtggtggggcagttgtcgacgccgcaggcgaggatgtcgcggtagtcgcgggagacggtgaagctgtcgtgcacgctgccgtcgcggctccggacgtactcgaacagcagcgccgtgtggttgaaggccgtcagcttggcgaacccgtagtcccggtcctggacgtggctccaccgcgcccgtacgccggcgtagtccgccaggctcgccccgccgccgcccaccaccacgtgcgtcgtcgccgtgaacgcgccgctgtagtggctcgccgccttcgccacgcacacattctgaatgcacacatttcacacacagtaaaacacaagcagaaaatgagagccacagccataaattcacaagaaatacacatactttacactttagctgttctcacgttctatacttctaaaatagttgtccctgtgtgattcaaattttatctcaaaatagtaggattcaattttatttcaaaatagttatcacttcatattactccctccgtcccaaatataacaacttttagcactcagaatttgctccaaaatataataatttcttaactataattctcttcctaaccaatcacaactatccactatctacttttcccacctacctctttctgaaccaatcacaatatctttctatttaattttacctactttcttatattctgggacggagggagtaccctatcaattaccttccattcaaatatctcgttattataccctcaacaagggcggatccaggaacaaaaaaaattagggggggctcaattatgcagtttctttaacctctagccatttaaggacctttagtttatcatttatggtgaaaaaatcgaaggagtgctccgggaggtatccatgggtatagagttccccctgcacccacgttggatccgcccctccctcaactacctaaccatacaccattcaattcaaatttctctttattctatctccaatctccaactactctctcacacctaaacatacaccattcaatgacgggcactataatcttctctttaaatcataatctacactaaacaacctagaatagtaactgtatgggaacggaagagtaacagtgctcatatacctcgtagactgggcaggttctctcgtagccatggacatggccgtacatggcgatgtcgaccttgtacttctgccagagcggctggaggctctccctgcccatgggctcctcggttgtgccctcctcgacgtagaagctagctgatgagtagccgagaacacggtgggcgaggaagatgagccacggctgtttctgccggtcgacggaggagaagcagtgctcgatgaacttgtactgctcggtgcctggcctccagtcgagctcggtgttggctatgcagaaacggaacatgccgtagtctatcgagtacctgcaaggatgatctcagggtttaacaggtgcaggactgcaggttattggggccataatcttttgtagtagctttttgttcagaattttgatggaccgtactaagaaagatgagattatgcagagttggttgtgttcagtaagagagatcaatgaattttagctattagtacagcctaaaaaaacatgatagcttgttatttgttaatgttgatctgtgtatataagaaaagcatgtttacgcatgatcgtctagtgaaccagaatgtctcgataagtggtcacatgtatgagtggtacgccttaaaatatccaggtttcgtatagtatttcacaaaattcaggggaaaaaatgtcctaccagaattgctcacggttctctgctggcacgtagaacatattctgagctggtacaccgcattcaccacctgaatccaaattcccatagaaggaacctgatccaggccaatctctttcatggttgccgctgcaagcacaaaacaatatcatcagaaacattgtttgaaatttccaccttgtctttggtttgtttctgtcgtcaagtcggagtaccttccaaccatgtaaggcacactggatgcaatgggttcaacttgtgcggtaaattgatcccattgtgacagataaccattggcatagcagatgtccccaatatgtattaccatatcaatattcttcaaatctttaattagctggtaggtcgtgttcagtgaaccaggctcgaagtcattgaactcatttgaaccatcggcctcagcctgtgcaaggagttcaaatgccaattaaggccagaggagaaaagcgaatttgtagcaaataatctctcttgttttagcatgagtagcaggtacttaagtatcttattctttgttagtttgactcgagatgatagaactcataaagagtacaaccttttctaacttgcataattgtcattaccaatttactactactaactaaagataaagacacactttggtggccttctgctaattgttccctatctaatcttttttatataattgagagattttatttaaagcacaagttgtactacatctcccatattaactttgaatagctatggagttccatatcgattcagtgatcagttacctaataatttattgcacttttgggagataaacgtggaaaaacaggcacattgtaagtggtatcatattcacaccttccccatatctccaaaaatgactacacgctgcaaagagtcttcccctggataaggaggtgcttggaagctatactcatgtccccaaataatagagccatctgatagccgatgcccaattctgtatgtatacctgaaatacaaactcacttgtaagacttgttggcacttgcatttgtacaaatgaatagttacaggaccacagagggcacagatgcagacaaagcaaggttgtgtaacactcatttacttgaaattaggccacagatccttgaggaaacttgtatgtatgaaaccaggatcgcgccatccaactgtcctagcaggaggacctgtggtaaaatcatcataaagcatgacaatgttatcatcttattaggttcgtcaaaagttacatgtcaatggttatttgatctacaactgctctgccattataccattattctaagatgtgtttcttttttagttgtcacttgtcagcactaatgggggattattactctgagcaagtaaaaacataatgaaaatttactcaccgcacatagtgctgcgactgaacgtaagggtgcctgcaggagaaaggctttggatttgcccttgtaggccccatttgacaaatggtgtagcctcattggtgccatatccacttgtccaagtcactgtcatctagaatcacttaacatcagtcattattctgtaaacatggtatgatctgatttgcagaagcactttggtgcccatttgtttcataagcaacgcagacaagcaaacactatttcggaagaaaaaaatatcacttaaatggaacaatctgagatgtcttacattcctgtttttgttgctttgacattcgagctcataaacatattccattaaaaaaataggttacttgcattgaaaagtgctaaaggaccataaacgaaattttatttctgtccgcaatgatattttcctttgcagatcacaggctaggatgctcaattgagactcacttcattacttatggaatacttaacaagatgatacttacttcattccaggattttccttgcgctaggcgtgggtacacaggggcctttgggttcgtgaaggttactctctttgagtgtgcaatgagctttggctgtgaggttatataagacatggcataggcaagttagaccatataatagttcagtcacattgtattttaactagaaaagacaaaatattcaagaaataccaccatggtaactgaatcgttcaacaataagttttcacactaaataaatgaggagaattttggcacatacatttgagaggcctccagaaaacaatgcaaatgaaaaatcctccctctgattgattagctgaagcttcatggatccctttcctgtcttctcatagtcaagattcttgtagtttgcaaatataaactgccaaaaaattgtgcctccttcagcatatgttattggcaagttttctgaagtctcatctacagttcacatggaataaggctaactggatgtaacactaacctttatgggagctgtacatagaagtggtggttcaacccattggctctctgatggacaagtagaatcactggtaaattgccaaaaaggcaaaatataaataagatctcaacttctttcttgctgtcttaattaagcattcaattcaggcatccagcatcaggatgattggattgcaagtacctgaaattagcaggagagaacaccccaatccaatcatccttcgatggcttggggttgttataggtaagagtcacccattctctgtcctgtccctgcaacagataaggtagccaataatttgaatacagtgggtctatggaagttcaaaaaaaaaatcatgattgattctcctataaatcctaatgctgcaaaatgcaaatatatgcctcgaccgactaaattaaggcactattaactgggatcagaactctcgagctctggtaagtggtaatggctgactacatcgaactatataggtccgtacaagagcaaaaaacagcagcgagtgctgaattgacgagctagtagatacagtaggttgctgagaaagctgtagtacctcgaggccgaggaggagcggcgaggcgtcgacggaggcacccggctggatcgcgaaggtggtccggtggatgccgatcctcgacagcggctgctccccgcctcttcctgccgccgcgaccgcgccggcgaggctgagcgccaccagcgcgtgcagcaccgccgccgccgccgccgccatcacggcctctcgctcgctttgctccccccaaacgcagcaagagattggtacagcgaggaggaagatgattaacgcagagctggcacggaggaaagagtggcgtctaagccaaaacacaagtggctcgaagaaagaaagagaacgcaggagaaaatggcgttaatctctgcaagatttatcagattagtgatgggacgtgttgggcatgtgtaatctaatcgactaatcgttgtgttcggagctggatccgcagatgctttggtttaaccgtggaatatccttgtggcaattctggtggttatgactagggacttcagatgcaacacttgcaggctgcaagagattaattaatgcacataattgcgaagtcaaaatgggatcttatttatgtatcaacacatggttttgttgcattgatcttacaagtcaaggtcaccaaactaacaaaaccagcaacatacagcatccaagagaagctagcaaaaattggcttaagcatcatcagcactctgaatgtcgtgcagacaagtgcccttgccctgcctgatcacactagcttctacaggattatatgtcaaaagaaaaatgaccatcacgtcgacatttgaaccaccccaaaagaaaaggaactggatattgtacatagctcacactgagaacattgagcgatgaactgttagcgtaatggcattgagctgatgcatcaggtcaggcaacattctctacctgcactcaacttgcattggagtacagaacaaactaatttttcacacagcccaaaacggtttctgcccagaaatggaagttgggttccctccaagcacgctattcgtctcatcgatgttgtcctcttcatcgtcatctccataatccat

SEQ ID NO: 20883 - DNA, 4323 bp, Oryza sativa
ttcctgcagccctgcaatgaactggacacagagctgctgttgtattttttttttgaacaattcacaaccctgttgtattatccatgtagcgttgacctgtagtttaggggttcataatgaatgcacgtgcttaggccgttcaaagcctcacatcataacactcacaagctgaaaaaaatagggggcaaaatcacacaaagctgaacaaaatgggggcaaaattgcaataaccaccaagggtatatatgtccttttctctacaactaacaccgttagttgtggctgttaggaatgggggtacatggctgcttcagattcaaaaagtgggggtaaaagtgcaaatcctaaaaagtgggggtaaaacagcaattggctttgaaagtgggggcacggatgcaattgcccctaataataatggtattacaattgtattgcaatggtgcccttttccagtgtactacagctgctcccttcgggctgataatatttgtcgttttagacaagggtggagtcaaactttagaatctttaattatggatcatttttaaaatattcatctttcaaatatggtaattgtatgcatagagtagtcttaaaaaatactttaataaaatcatatatttttttaacagttttatacatatcataatgaaaaataatggtcaaagtgttatcaacccagagagagtaattaacaatagtaagttctgcactagagatggtaaaaattacaaaaacaaaatactaatatttattgatgggggtatatatgcgcgtatgaacatgtgtgtatacatatttgataaaacgcaaggggaagcacgggaacatactatatatagtactccctccgtttcaggttgtaagatgttttgactttggttaaagtcaaactgtttcaagtttgactaagtttatagacaaatatagtaatatttatataataaatttgtgtcatcaaatcaataattgaatatattttcataataaatttgtcttgtgttgaaaatgttactatttttctataatttttgttaaatttaaagcaatttgactttgaccaaattcaaaacgtcttataacctaaaacgaatggagtatcatgataaagtggagaactttggggatttggaaagagtttttttctattatcttgaaaaatgttattacacacaattttataattcatagtatctcatataattagaaaaaggatgggtatacgcatgtgttttttagggccattgaaatatggagcaatgaatgcctagtgagatatgatatgcgatgacaaacagacaagaaagtagcgtggaactttgttgctcccttccacaaaccactaggcaggcatcgctagctgcacagtactactgtggttctatatatttcaattttcaaccagtatcactataattgtactatccagtgcaccaagttcagctacagtacaaaatgcatcaggaaatgcgcaaaacaaaattatatctagaattgaaaaaaaatacgagttaaatctatcgatatacggatcctaaaattaacataggacttgtttagttccaaactttttcttcaaacttccaacttttccatcacatcaaaactttactacacacaaacttttaatttttccatcacatcgttccaatttcaacctaactttcaattttagtgtgaactaaacacaccatagtggagtactttgcaaaacagacctaaggatgcaacctagtagaaaatagcaccatcggtctcttttatttcaggtacatttgggcctcgaggagtatttgggtgcagctggaaatgggctagatggggcacaacaattgctccgtggatcaattggaaattaattaaatttcaaatggtggaataaaaatttcaaaataataatattattaattaaagtaaaaccaaactagagatgcaattgataatgcagtggtaagttggcatgtggtttcaaccctgagctctcgtgttcaattctcaacacgttcgcaatttcttctttaaaatgtttggagccttggagggatagatctccctccaaatctctctttttttttaagaaacaaaaacaaatcaacagtgatctgggtaacctttcagttttgttctcaatcatgttgttgtcgatctcaaacttccatactccagtacgtagaatcgtagaatatatatcttttttggctcaccataacgttttgttctttgcactacgagaggcatcaggatattcccccaaccaattcaaacagtgtattgtgcagaagatactacgtatcagattgcgtacctttgtatggtcctccttgatgtgtccaaaaccatatgctacgtatcagatttctgtgagaactttccagttcagctaattgggagaagaatattaaatcagagtcaatcaagacaaccagaccatcagcaaatgatgcaaataaaagataaaaagatcaacctgcatctcttcataaaaggggtgttttttttgttttgttttttttttgtgtgcaaaggctactgttctcgatgcctcctctccacgttgaccctcctcaatataaagtgaataagcatctggacgcttttctgaagccccaccttaatatccaacttaattttaaccgaggcatccacctctatgatctttaattttgaaccaccagattgttacttttgttctttgtctggacctcccactggataaggtattgaaaaggaaagtagtcatagaattgaccaaattttaaaatgctttcaataggttcgacagaaataactgacaaaacataaaataagaaatgtggccttattctgccatgacagagaccaacatatgcttatttttcaaagaaatatgaaaaacagtttgcctgtctccagaatccacatttccattattcattagtgtccgaccattaactccataaacatggagtatttccaagttattgaacgtgaaacaaaaggaacgaagaatatactcccttctgattcaagtgaaagttttaataagaactcaggaatgtccagaaaattaccagacaatttgtatcctttttcgtcgttcaaaaaatttgtatccttgagctggctggcacctttcatgtcttcagcatcagctaattgtgcatttgagctccttctcatcttggctgcctgcacaaatttgtgtaactggtacaatatatgtgagaatgaatatacaggtagaaccatagatgtagcatagttgttgcagtgacctaagtcgtagcactccaaaaacctgagttcaaatctctataggagcaattttcagattatattatttgagaggtaagttccatattaataggctaagttactaatttaaaaatatgccatatatccaacagtaaaaaatactcttctctaaggaaaaaagttagaaccgtagaaaaccaagaattagttgtacctgctgtacaataatttctctgcgccaacatgtctaaatcaacttttggaaattgctcggtaaattcagtctgttgaggaaaggaaaatgatttcaattttcatgtaatttgtgcagattttgcacagtatactatgttgacatatagcacactgcagattagtaactcacacgttcgtgtgcaaactacaactcaatgatctactacccacttgattttgtaaatgccaaaatttcgtaattatggaagatataattgtcaaacacttgcaaaactgaagaaatagattcacttcatgcacacagattgactaaccaaacaccccaatgcaacgaaatgcaaacacaaatcaccacggacgaggaaaaaaattttgagagcatcacacgaatttatatatagtataacaataatgcaatctggatatgctacctcaggtcatcagttcgtattgaaccactccatcccaacccatccgaattgaatggatattgggatgggttcatcgctagatttgaatgaattcggacgatgaaatgatgctccccagttgctggacattattcacgcagggcagcacgccggtttgagtatggcgtcggcccgggaccagcagcgtaggcgccagtggcggcgacgccgtggagacgcctaggtttcgtactacgcctcgagatccattgaacgctctgggctctggggcgccgcggttggaatctcgaaggaatatgttcagtttttgtcccttatctcgacgtcgagtttaaatcacgtcattgaactataacgtgtttaaacttataataccggagtatttgaaatctcaaaacaatattttgtccgatttcaattgacgtggtatgtttactatggt

SEQ ID NO: 20884 - DNA, 907 bp, Oryza sativa
tggagagaatggactcctcgagctcggcgatggtgtgcgtgagcctctcgatgtccagcacctgctgcctgttgctcttctccagcagcttgttctcctcctgcagtcacaaagaccaaaaaatcaaaaatcagttcaggctgacgaaaattaatctagctgatgtgtcagtgatggatttgcatgtgtgctagctcacatggtagatctccatctgtttcttgagctcgatgttctggttctggacgtcctcgacgatcagcgccctctcgagcgcgctacgcaggatgttccctgcctccaccagcgccgcctccttcagcttcaggtgccgctccaacgccttcttgtcatcctggagcaatgcaatctgacagccgagacgagcagccacaatgtcatcatacagaactgaagttaaactgaattgtcctggtaactgatcgtcaggcagctgctttagtgcagtttcaggtgttacctcgtgcctgtatgctttgatgtcagactccaggggcgcgatgatggcgtcgaacgggacgacctcctcgtccttctgcgacgagtggatccgcctgagcgtcgcctcggcggcgaattgcgcagacagcgcttctttcctctcgttgcttagcctcttcacgtccaggttctgttgcaccgagagaaaagctcgttagtatcgtagaaccgtagaattggtcacctccctccgtataatattatgaattgttcctaatcaaacctatttaaatttgatcgagtttacagaaaaacttagcaatatctacaacagtaaattagtttttattaaaactaacatctaatatattttaataataagcttgttttgtgccggaaatgttgctatatttttctataaatttgattaaaacttaaaaagttt

SEQ ID NO: 20885 - DNA, 1241 bp, Oryza sativa
atctgcatacaatctccgcttttgacccgagagtacttgatggaaagctctcatagtcctctttgcaacgcatccagcctcatcgccaaattccatcctagtcatctgcagatgaagaaacaatgtgctacgtcacctgtcatgggcctttgggcttgtaactttgtttgagacccggcccaagtggggcccgcgtggggtgcatcccaaccaggggagcatgaccttaggcacccccaggtcctccttccctctcttgggccgaatccggcccatttccctccccctctctctcctctccctgcggcccactcggcctctccccgcgcgcgcgccactgacgggcgggcccgcccgccaccctcgctgacgggtggggcccacccatcatccccttcctcccgccgctccgcccgcgcctagcgccgccgccgccgccaaatccgccacgctccgccgctcccgttcaaaattgaatggggaaatatttcccccgattccctctccctttccccacattttcctctctctctctctctctatttcagatggaaaccccccctaatcccgccggcgccattaatggcggccggatctcccgcaccggtttccttcccgccggccgccctctctcactcccaaccctttataaaccctccccgcacctccctcgtttgtttccaccactcgccgacgacctccggccggcccactccgctcgccgggaccgtctcccacctcggcgtcgtctcctccggcttcgccgtgccgtcgccgaccccgtccaccacctcgccgagctcgccgaccgccggagcgccgtcgtccccatccacccgagccgctccaccgcctttctccgctccggccgcctcctttgccgtcgccgtcgacccggggtgagccgtggaccgccgcctctttccccctacccttcccctctcttggccgccgcaccgccgtgcctatggacgctgccggcgaccataggggcgcgggcgccgtctcccgccggccgcgccgatgtggccgcctccgggcgcaccgtgtggccgccgcgtggggcccggccgtcaccgcccgtgccctcgggtgcggctgacgcgtggggcccatggcgccggccggtgtgagcccgggtgcgcccggtccaccgtggaccatgaggctgccgcgtgggccccactcccgtggacccggtccgcgcgccccctcccctcggctgatgcaataaattcttt

SEQ ID NO: 20886 - DNA, 700 bp, Oryza sativa
gtgtcagctagacttcccgtctgcttgttcttcgaaaccccaacttatcatttgtattcaattcctatttgcaattcagattgcttttatcttttttgcttgtttttttgatttgcttgtaggaataaggttgatctgcaccggcaagatcaataacccacagagaggtgtatcgatcgcaaaggcacaacacaatgtctcgtacggttgtaatcgggtcatcaatgtttctcccaaatcgtatttatcatcaactcaccgaaagatcgggccaacaacagccttgggtgtctcgagtggagctcagggttcatcaagtggtatcagagctttcgttgctcggtatgtttttatctacatattaccagaaaatagccacaaaaaaatattgcatccattacctagccatctttgtgccactgcattgttcttttcagtttttgctttgttagttttctgttgcattgtcgcgtcaagttgctggacttagcgtagtacgtttaggctttcgagttctgtcatgtctattaccactgtcgtcgtcgtcgccctgtctttgttgtcgtcgggacctatgaaaacaaaatcatctttccgccagggttctatttttctagttttcaaaagtttatgtcggttagttttagagttgttgagttgcacctagggtttgtagatcctgccgtgtgttgggctgcag

SEQ ID NO: 20887 - DNA, 1115 bp, Oryza sativa
ccctatcctggaggatcctcctcacagcagcagcagcagcagcaacctcgccccgcgccccgacctccatacgtggtgcgcgtcccacagccgcagcagcagcagaatcagcaagggacccgtgcaccccgccctcctgcaccggccgtgcagcctggtcaaggccgcagggacgctcaaggtcaacaacgtctgtgcttcaactgcttcgagcccggacactttgcggataaatgcccgaagccaggcgccagcaaggccaagcgcctccccgccccaacaacggtggtaaggatgtcactgggggttgtgtgaaccacgtgactgccgaggatgtgctgacaactccagacgtcatcgttggtacgttcctcattcattccatccctgctaccattttgttcgactctggagcttcccactcgtttatatctgtgccattcgtggggagaaatcagctgggggtagaaaggcttaggaaccctctactcatcaccacccctggagtggttatgacaacgaagtattatagcccggccgttcctatagaaatccagggaattcctttccctcggatctgattcttctggacaccaagaacttggatgtgatccttgggatgaattggttggctcaattccaaggagtagtggattgcgcaaggcgcactgtcactctgtaccgggggcccgatcaaccagttgttttctttgcactccaactcccgccggcacttcagtacttcatcaactaggattatccgtaatctccatcgtcagtgagttcggtgatgtgtttccggaagagctacccggtatgccgcccaagcgggagattgagttccggatagatcttgctccaggagccactcctttatacaagcgaccctaccgtatggcagcaaatgaattggccgaagtcaagaaacagttggaagagttgaaagaaaatgggtatatacggccgagcacttccccctggagtgctcccgtgatttttgtggagaagaaagacaagacaaagaggatgtgcgttgactacagagctctcaacgaggtcactatcaaaaacatgtaccccctttcccagatcgatgatctgttcgatcagcttaa

SEQ ID NO: 20888 - DNA, 729 bp, Oryza sativa
tcctgcagccccgataaatccacccttaccatttaattaggcacatattcttccatcaatcaagatcgaattgatctgccatggcatcaaacaagcaaattgatctcgagtcccagaagccggcgacgtcatctccggcggccagcgtttcatcggcagcagctgccaccgcgccgccagcttctagctcggctgtacccgtttcagttggcataaccaaccgccacaacgtgcagccagagacggagcctctgctgctgctggcgggcggcgacggcgatggcggctctgacgacgagacaacgcggctggagcggaccatcacgcgggcgttccggagcacggcggagctcgccaagcacctgcccacgggcgcggtgctcgtcttcgaggtgctgtccccggtgttcaccaacggcggcaagtgccaggacgttaaccgcgtcatgacggcgtggctggtggggctctgcgccgcggcgtgcttcttcctctgcttcacggacagcttccacgacgggaaagggacggtgcggtacgtggtggccacgcgcgccggcctgtgggtcatcgacggcaccgcgccgccgccgccggacgtggacgcgacctaccgcctcaagttcatcgacttcttccacgccgtgctgtccctgatcgtcttcctgtccgtcgccatgttcgatcacaacgtcggcgcctgcttctacccggtgatgtcctacgaca

SEQ ID NO: 20889 - DNA, 687 bp, Oryza sativa
cccgttgagtagagtgacgggaaaagagaaaaacactctaacaaacgagttgcaaaagagaggcaggatccttagatggttgagggaagtataatatcggtaagtcagaatgagtgaacatattttcaaaaaaaaaaaatcgaagtaaaaaagacaacatattccacaaaagggattcaaatattgcatcttaaatcttaatctcatagttcttcgattaaatttctcactaatcttgataatagttcttggtgctcaactgagtgaaatgagaaccatacaaagctaaaccttctgtatttaaactaataaagaactatattaccaccaaagaatattcacaagaaattagagaaataaaagttgcaaaactcatctatgtttgggggcgagtttggtaatcattcaaatagtcttatgtattgagaagaatatttcaataactattaatgtacagatgggctatacctgtgaaatgaatcgacgaactccatgctttgggcatcaatcattacaactgggaattcaagaatttcaaccttaccttccaaatcaaggaccaaaaagtaatccaatttctgagatttcactttatctgcagctgaataattcactggaaggtctgttggcagattgtgattgaatttctcaagatgcaaagtatcattcaactgaagaagtataaat

SEQ ID NO: 20890 - DNA, 609 bp, Oryza sativa
gtggatgctcttgtccaccaggcgctggaaatcaggatagtccctggagaccagatgcacagacagttcagggtccattcctgccaggaatttctgttgcttttcctcatcttcacgaacatcctctggagcgtaccgggccaagttattgaactcatgcaaatactccatcacagagcggttgccttgcttcaactcccgaaattccctcttcttaagggccatgactccggcgggcacatgggtcctccggaaagcggcggtgaagcgggcccaggtgataggctatccttccggctgcgtagcctggaagtggtcccaccatagagatgcgggcccctgcagttggtgggtggcgaagatgactttctcctcatcattgcactggacggtgtctaactttttcccaacggcatgcaaccaatccaaggcatcaacagggttgttgaagctagagaaggtaggcgggcggatgcggaggaactcggcaagcttagaatgctgcatgggtggtggtgggggcggagcattgtgttgcggcggattctggatgtggtggaggaaagcagccatcacgttgccctgctgggcgaggatttggtgaggatg

SEQ ID NO: 20891 - DNA, 2724 bp, Oryza sativa
tccgggagtgacacttacccactagacatgtggaagtacggtagtgctttgcaacagaggcccaaagaccggtccttatgtggccgaggtgctactatcaaaaccatgcaccccgagcccagcctaaaaccattttgagggttttgaatagagggggaggtgtgtgtgtccaattccacaataattcaaccattccatagtgtccaagtgatatgaatattcccaaagtctagagttacaaaaccacctaatgttgtctaattgatcagcgaagcatctacctaaattcatactagtggaaccatgaatagagtactcactagttggggtttgtttattctagggtgaacaagataataataacaataacaataataataaggtcataacaagggtaaataggcatggctaaataaaacagtgataacgcgggaatttaaataaagcgataatgcattaatttaaatcaaaataatttcataaactgggattcaatatgttcaaagatgatgtgacttgccttgctcgctttcccaaacgtcggcttcaacctccacgtagagcggatcttcgaagctgcagcgtctacacgaccaacggaaaggaaaaatgcttttactctaataaactccatataacaagcaggaacaaagtacaaaaatgggttcttgacttcttaaggaaaacttagagacttgaacggtccaattccgagttcaaatggccaagttatggccatttgaagtttatatgctctttaagtgaataattgtgaatttcttcatttaaattttaatttaaaaaagatttattgcgtcagccaaggggagggggggtgcggaccgggtccacgggagtggggcccacgcggcagcctcacggtccacggtggaccgggcgcacccgggctcacaccggccggcgccgtaggccccacgcatcagccgcacccgagggcacgggcggctaacggccgggccccacgcgacggccacacggcgcgcccggaggcggccacgtcggcgcggccggcgggaggcggcgcctgcgcccctatggtcgccggcggcggccataggcacagcggagcggcggccaagagaggggaagggaagggggaaagaggcggtggtccacgtctcaccccgggtcgacggcgacggcaaaggaggcgtccggagcggaggaaggcggtggcgcggctcgggtggacggggactatggcgcttcggcggtcggcgagctcggcgaggtggtggacagggtcagcgacggcacggcgaagcttgaggagacgacgccgaggcgggaggcggtcccggcgagcggagagggccagccggaggtcgtcggtgacggaggagagagaggacgacggcgcgagctcgattctggcggggaaacggtgcggcaagtggcagaaacgggcgagatgtcacgcccggaatttctatccaaaattctaaacgcttacatgtgtgttaaaccctcgtctaggaatgagccgaggcacacaataacaaattgatagtagagtacaaataaacagctatttaatattcgcaaataataatttattacagaggtggatagttcctctcaaagaataacattctacgcagcggaaaaaaaaaacaaactacgcaacagctatggcgactccactccacaagcaacttaacccggaccaagcctagtcctctagattatcaccttcactgaagtactcctcctctgataaatgaatattgcaagaatgagcatatgacatactcaacaagccacacagcaaatatgcaagtgcacaggataacaaaggatggcataatatagctcatttgcataaatagcatttaataaatatttaagagaatagtaaaacagttgattaattaatcagtattaaataaacaccatacaacacacccgtgttgcataggcccaacctcatctgaacaaccaaccccggttgtacaaatcaaacctccataacaggaatataccattccaaaccaggagtcaaattaattagcacaattaccattaatgaataatgtgagactaattacgaaaaacattgctcaactcacccataaccgcgggcacggctattcgaatagttttactctgatctaagatgtaccactgtacccacaagacacaatcccacaatcccacaacatgtcaccatgcgcctagtaccaccacggtacctcggaaaggaactgtgacagtacccctcgcacaatacaactcaccacagtgcaccatacctggatcataatcaccccctctacaaccagaggcatggactccccagcgacccccacggatgtcacgtcccaaaacaaccttaaaatatatccttcaaattatgcctagaataattaaaatctgagtgaaagcctccaaaaaattaaaatgtgcaaagataaaagtcaaataaggcttggaggatttttgtatatttcctaaaagcctaaaatgtgtaaataaattttagtggaattttcagagtacaaataataattattaagaaataaacaaagttgaaaaggttttataaaaagaaaaaccctaaaaacctcctcccctctcatgggccgaatccggcccatctccctccccctctctctcctctccccacggcccattcggcctctccccgcgtgcgcgccactgacgggcgagcccacccgccaccctcgctgacgggtggggccc

SEQ ID NO: 20892 - DNA, 1767 bp, Oryza sativa
ctgcagcccccctggccgcgagcactccctctccagcctcctcatcgccctccccgccagcgccgcgcatgccggctgcctcagcctcacctggcagtagcagaatggcacgtcgcatgctgccgtcgtaccgttcgctcccacctgcgacgttggcggcagcggcggcgacgcacccaccggagcagagcgcgctccgccacgccgacgcactcctccgcgtcatcgggaagcaccggcaagtccaccgcaccgcaagccgcagaacatcaacgtcgccgtcgccgtcgacagccagtggctcaatggcgggcaggtcctggcgctggacgagcggtggtacgagatcggcgggtcgttccgcgtcgagtccaagccggcgtcgcgcgtgatgctgtacgtcatccaggtgcgcaagcgcgatgtggtggtgaaggtgaaggcggccgacgcgtggaggtgcggctgcggctgatgtcgaacagcttcccgctctgctctgaacacggcatctgcgtgcgcggccactgcatcttctgtgaggtggacaacgcagtgcagcagtgggtgaaggcgcttcccgccgacgagctcttcgccgccgtgagcagccgcatcaacgtcctgctcacccggtacaaggcaagttccggcactacgatgtcaacaacgagatgctgcacggctccttctaccaagacaagctcggcaaggacgcgcgtgccgccatgttcaacacggcgagcgagcttgacccagacgcactgctctacgcgccgcgccggtcgttgtaaaggatcgtcgggacgaagaggacaagaaattagaggggctgacatccttggcctacatagggcaatctggcttttttcgattgtttctctctccgtttccactaaaaataataaaataatatgtccggtgtctaatagctaattaccactttttgcaatgttctacagccgattcatgtttttgtggtgtctcacggctaattacacgtttttttaagtgtcctgtaaccaattttgccaaaatataataatttgtccaccaattctcttcccactccatctacctaactcttttttatccaatcacaaatttttctcatttaattatatctattttcaaaaaccgagttaagctcgtaaaattttatattctgataccgagttgatggtagtagttcgtttagaatgatggcagagactgcttgcgacatgcgtgccagattggcagggagtagctatatttatggcgtcatattttttatcaaaaaatagtcggcatgtatttacattgtaagtccctaaattacatatataattttagtgtatttacaatgtaagccccaaaattacatatgtaagaactaaaattacatatgtaaatcccaaaattacatactaattacatatgtaagtggtatataagagaggtgtaactactatagttacataggaattacacatgtaactatagtacaattatactgtaattatatctgtaactgcagtgtaattaaaaacagacttgacggtgagctccctatcttcgcttctccttttcttgtccttttgcatgccatctgtgcatggatcttgttttttactccgtaatgattagagatttgagatagtatcagcaatagtagtagttacgatggcattagagtctcgacatgcacgaatctctgaactaattgcccagtgaaaaaattgactgtaaacgggaaagaaatatggcgtcatatgtatagcaatt

SEQ ID NO: 20893 - DNA, 919 bp, Oryza sativa
ccgactctggctcagatgaaattttctggccctttctggatcccatcagcaccttaggctctgcaacaagatgttcctgctcaatagagaagctccatctgcggccatccctgtcgatggagaaactagctctccttgagtccttcaagctcgagaagcttgaccgacgtgcttctgtctcggctgagaagctgtgccgccgcccaaccctgtcactgcccgatgaggccctactactgctacctacccgtctgcggctgctcaaccgtcgcagtttcctgtcctccttcagtgctgtcgatggggagcagcaattgcttgacctcctgcccttcatctcttgctcctctttctcaggtcctggaacagaaacttcttcctgagcttccgccacagtctccaccatctccagcaacggcaattggatatccctccctgtagcttctcctgacaaagctacctccaaaactgagtccttccgaacaattggtgcttcctctggctcaatcttctcttcatcctctctgcagtcaccgtactcgctcgcttcttcaccaagatctccgcattcagaggtctccactgcttccgtctccagtggatctacttgtcctgcttcacaaccatcatgtagggaaccatcacactcacggcatccagcttctttagtggaaaccgctgaatcacgagcttgctctttgcattccttatctgtgtcagcaccatcttcgtcttcctcatcctcttcctcctcttcgtcgtcgtcgttttcgttttcatccttgacattgtcaacctgactgacatttgccgctgcaggggagccccagaagcgagtggctaatgcagccatacgaacagggtccgacctgcagcgcatcagcagcagcgcgtttcgcggcgggatgcagacgctgac

SEQ ID NO: 20894 - DNA, 2028 bp, Oryza sativa
aaggtagacgagatcaagaagatcgtttcccctgaattgattcaaccggaaacggaaaggcacggccgaatttggaaagggcgacggcgcgtctcggttagggttcgaccgcggcgatggcgcgaggtagacgacgggcctgacaggcggctccacctgtcagcgggcgaacgcgcgcgcgcgggggcggctcgcatgcgggccggcttgggccgagggagagagagagagaggtttgggccgattttcggcccaaagccaaaagagaaatttttaaaaactttttcaatttaaatttttcatgaaatgcaattccatttattaaaaatacttccttggctcaaataaatcccagaaaaatttaggaactatagaatcaagcaaagtatttaataaaattttatctagccaaattttatattggaatttattatttaaaattacgtcttctcttgtaggcttttaagaatcaattctaataattccaattaaacaacaatttatatatatgggtttcttagggtgtgacaccaccacacatgaagacaaacgaaaaacagcggaagactagggcgacgaccacaggcgcttgacggcaggcacgagatagacaccaaagccttcatcatccaggaactcctcttctaggtttgggaaaaactgagcaagactgaatacaaccaccgtacttaacaagacacacccacgagtgcagaataaatgcaaaggagtacaatggagttataatatcgggggtaggggttgcataacacatcattacaagacacttaactgctcaaagctactttaagaatacgatcctagagctatacaatattattactcaaggccgtgaacccacacgtcaaattaaaaatgcatattttaaatcattgttagaaattattttaaaagcctacaagttaaactctaataatctaggaaaattttcaacataaaattgagctagataaaattttattaaatactttgcttgttcctctattttctagatttttctgggaattatttgagcaaggaagtatttttaataaatgaaacaacatttcacgaattatttaattgaaaaggtattaaaaatcctccctaagtcgttgggccgatttcggcccaactcccctttttccctgcgcggccaagccggcccaagtcggcccaagccgccgccgcccctcctctcacgcgggtcaccgacatgtggggcccacatgtcgggcccttctcctacctccggccggccggccaccctagcccgagccgcccccttctcccttcaaatccgcctcaaatccggccccctcgagtccgattgattgaggggttttgatcccgtcatcctcctctatcttcactcccaaaaatcggagcaaaccgttgagttttctaaccaaatcgaattccttttcgaatttatccccaaaaccgaatttcgattttcttggatcgatttcttgcggtgggagtccgatctcttcaatccaaggctataaataggaccccctagttgtcctctttcgtttgccccctttcccgagctctctagtgcgccgtagagccgccgccgccggcggccaaccaccagccgcgccgcgccgtcgccctagccttcgccgctgcctcctctcaccgccgtcgggtgcgcgtgattgagggaaagcccggccgccccttcgccgttgtcaccgaccgccgtagagccgccgccgccgccgcgcctctcgtcgccggccgtcgtcggtcgccgttcgtcgttttggtgagcaccattgggttcgtgtcgttgccctctacgtgtaggtgtcctccaaaaccccagccgaccctcctagcgccggcgaggtcgccatccgagccaagccgccattgatgacgtcaagctgacgtcatcatcccctctttttcagttttttttaatagatgaaatagattaaaacttcggaaaatcataactaattaactgtagctccgattcaagtggttcaagttgctaaatttttctaaaattga

SEQ ID NO: 20895 - DNA, 681 bp, Oryza sativa
ctgcagcccgatctcgagagatcgaattgttgacgacgatgatggttctgatctggttaggttggatctccccctcatctgaagtcgttgagtagctcattgtcggagaatccatctcttaaacccatctcgtcgaaaccttgaagcaccaaaaggtcccctacctggcgcgccactgtcgacgtttgatgtcgcgattccggtatttgcatagtatggggatcgttggtactaggatatacgcgagactgaggtaaaagagacggagacgaggatttttatacaggttcgggcccctgaattgtcaggtaatagccctacatcctgttggccgaagctggtattgctcttattcaccataatcacaccagtacaatatttggggtagcatatctaactgttgtcgacatggcggtctgtagttctgactcgtagtcgacaacagggtagtcttcctcctcgaatccgtgcccggcgagatcagagataacgctttcgtctctcctgacagtatctggagacactataggggactagccgtgcttatccctaaagtcgatatccggcgtcttatcttggcgtatgttggcttgtatgttgatcttctgtcttctatggtgggtgttgattgaggtggtcgtgtcccttctcctcctaaggggccttgtatttatacacata

SEQ ID NO: 20896 - DNA, 6533 bp, Oryza sativa
catgtaaacattggccagcatcagctattcaacttatcagctactcattcaattcctcacattattcagctcctccatgaattcagcaaatgagtcaacctgtctcaatcttattctgttgagcccgtccttttactatgcacatatctcatatgccagatcctcattttcccccttcatttgaactgtatatatggcaccaaggaaggcctctttcagtcatttgtcttgaggtcagctacttgtcagtcacgaggtgagattgaaacaccccatatgttgtgtaatgaaagtattttgtctatttcatatgttgtgtaatgaaagtagtagccagatacaattcgaatcggagcgaatttgaaaaacccttctcggcccaagcctaaatgccttttgagagagtttaagatacaagagctgattggtagtcagcttctgaaaatttgaataaactaggttttctaccttatttagatttttgaaaaattggattctacaactacaacttttcagaatcttaacgaaaagttagattgttcagggaagattctgattctgagaaaatctaccgctgccaaaagtttctccaaccaggtcctaagtcgactaaataaccttatgccctgtttggactggcgaaaaaaaaaagaattcttgataatttgatcatgtttccatagcacgagtcacatatatacaattttctttttgtcaaaggcatatgtacaatttgataatgttggtgtcagtatcggattacgtacacgtcagcgatcctgtggcaccaaataaaaaggtagcttgaaaactatattcagttgagctcacaccgtttgtttgatatatctgggtgtactaaaccaaaggaaaatcagcaccaatcagccatcactaaatagtgccagaaagcgaccacccaattaacacgacgacaatacccccacagcggataagatctgtaacgcgtgtcctccacgctgacgtggaccgggggtatatgcacgtcacatgttccaacgtggatagttgctccttactctcttttgagtaataaactgcgtctacggtatataaacttagtatgtgggtgtaatctagtgaaaaacttaaaaatgagtatatagatgtaaaaacttggctagtgcgtgcattttggttaaaagatcaaaatattccacaccataccttttatgccatcttgataaagatctacatgtattatatgtattgcttttaattggttagttgtaataataaataatctatcgatttgaaaccaaaagatatatgattatcaaaagtaagtgcatgcaaataacataatttttgagcaatttgactaatcaacatattaattgtctcaggttatgaacatggcgaaacacgaaattgaatccatgagccaacaatctagtagttatgcttataatatcaggattaatgaaagacatatatcagtgttttttttttgactaaaatgcacgtgattgttaagttcatgtaccggtttacttatttcttgcactaaatcgcacccacttacggtgggcgcaatttactcttctctttttattcctttatttattttgtgaattgggtaaaataaaaaaacacccttaatgggctgggcccaactggactgtagtgggctaaggcacggcacgtgtacaatagcaacggtgcagcacgatatgtccgaagcatgagcacggcacaaacatggctcaaacaaacacctatagcttccctcttttgtttttaccgttatgttcatacgttgcaacgggtaaaaaccatataattagagatgtgttaggagggtgattgagaaacattggatctggtagttacgtaatcagagtggacacgccgcgtgcaattggaggggatggaagaagatgattcgctttttttttccttcccccgttcattttctttcattataaccattttctttaataaaaaagattaacataggctcatcaaagtcttgggtcatgtttgggcttcttgatcgacatgtgggccggtacaacatgacccgtttcgctagccgtgcttaacaagtcataccctaatgggtgctgtcctgttgcatattctatccgttctataaaaaaatgtcttagttcaaatctactctcttcatttcaaaataagccaagatcgtaccggtatatctagattcattgtgctacgatgcattacatctggtagtcattgatgtatagaaattaaagaaaacaaccatacaatgcgtgtaaccatacaaaagcttcaggcccagtagtgtatatgataggtgcatatgatatggtagtgtatcggtacgagattggtttattttgggatacaggagtagaagtttattttttatggcacaagtctcgttcacatttgttttcatatatttccaaaataaaaaatgtcttggaagctcgttatcgaacataacggagcgaataccaccaatagcaaaattctcacatatgagaatgaaaaaaaaacaatatttttggcgacttaaattgctgtgctatatacgcgatgagaaaaggtgacttggtcgcatgaatgaaacttataaaaagaaaaaaaaacataacgatgtgtttttcacacatatttataagcgcctgcgtttcactgtgtttttttaattaaaaagtaaaaataaaataaaaagcatatcgatttcaggactccccccccccccccccccaccaattccctccccttccccgtttcatctgctgcggccggactccctccacgaatcctcctccgccgccgtcgccgccgccgccgccgcaaggtacggtgtatgctgggtgccctctcctccgctctcctcctacggatctgctcgcttccgccttctctctgctcgttctgggaggacgtgtgatctgatggatgtttatggatggttgggagccgagggcgatctgttcttgccatgttagatctctgacgcgtggtgcgtagcgacgtgttatgttagatcccgagccttttttttttgttttttttggtctgagatttatgggggcggtgatcttccttccgcctcgttcatgaacggtttggatctctgatctgttcgttcttgttgttactacttgaattcctgatccgcgttactgcgtgcgtatcgtatccccgcgataattcagctcttcttctttgtctctgtgatctcttgcatatggtgctacaactacaagtgaagcatcgcataaggctcatttgtagatttgttcatgtctctgttgcctgttgatagtgtcatccaagtggtgttcgtttctaatgaagatgaagatgaagatgaagttgagttttaattatgacaaacttaaaagttggatttgtttgatattacaaagcaacttatatgtacgtacgaaacgtgttgtttagtagtttgaaagacgtgatgatggggattgaggtaaaatagaaacgaaaaccacctaagtctcacagtgtcgattcaattagaagatgcagtttagctagtctattagaaaactgtttattggtctcatgtcctttggggactgagtagattctacttcttatattcagccttttgccattgttatcctttcctatctgtcgtctgcaatttgtgcttccatcatatgatgggtgcctgtacttctgaatttcttgttgaacttattgatgcaacatgtttgattattgaactttgcattgtgtgtataccactagtgctgtcattctaatctttgaagcctgtattgcccttgcagagagctaaaacaagatgccggctaatggcgatggccctgccagagggagcgcagcagctgccgcaagcttgcgcaggcgcagaaccactggcggtgccggtgccggtgctagaggtggcaccagcacaatgcttcagttctacactgaagaggctgctgggtgcaagatgtcccccaatgctgttctgatcatgagcatcgggtttttcgcggtcgttgcccttctccatgttttcggcaagctataccgtacctcctccaactaggttgacaatgctattatccatgactagcagattcagtcaacagaggatttcgtttgtagagttccttcaatgcatagcaaattgctattcgattatgaaaagttttctgttatcatcatagaatgtcacatacctttcagtggagatgtttatggttgaattcttaaatgcgtcatttgttgatcattaatttgctgttgtggttattctcgcgaatgtttgtttctgcaatgaagtatgtcctgattatctgacatcctagattgattttggctatcttcagtctgatccttttgtatctcgccctttacattaagcaatggagcattgtgcaacagtacagtacatccatggcaatttcactattagggattttctccagtagaaaacaatgaatcccatacatacggatttgggttcacctgcagtcagtcattatgttataatgtattggctgcctatgcatgtgcatctgaaatgctcaaagctgtagctggcagtgtaatatggattcagaaatgctcttagttgaactggcttagtctccctgtccctaagccctcattaagtcattattcagacattgacagcaaagcaacactgttacttggcatcaaatctggcagaaagtattacaactccgtctagttatcctgtcaaaaacactatcgtattcccggttgggtatttgctgctgtgcttgttctgaagaatctgcagttgatcacgtacctggatacatatgagtcgccaatgaagctgcaaagcaaaaataactaaactcatgtgcaacataactatagttgggtatctttatgtcaccaattttattgtgaaagctctctatcataacattgttaattactccaatatagatgaggacatgaaacaaaatgcactgcactacatgtgaaatgttactggtaacaggaatgcacatctagtgcagcttaaatcgtcgacgagctcaacaaagcaatgtatcgagctaggcagctaactggatttgatatctggactcaagcattatgattgtttgggtgcccaaaaaaaagttatttgctacacaaaattgttagtacatcacttgggttgctgttgctattcaggtcatggaatgaagaatagtcatggtcttttcagacagagaatcgtatcaaccgataataaaacctcccctaaaaaagataaaatcgagagaggtccatgaagattaggcatttctgtatttctccaccttccatttcctcttgaataaattgccttctcttttgtgagtgtactctccctccaatagcttttatatgacgtttaggaacaaaaaaaaagtgagtgatttagtgcaatttttcttgtctgaaactccaaataattttgaccggagggagtacaagattgttacgacgcagccatccgttgggaaaaaaacgttctgaagatagttgaatgcaaagttcaaagtcatcatttataacgttcttctggtaaccatcttccaacagagagatttttttttctagtaatgcaatgatcaacatgataaatagtcggggtattgcccatgccacaaacctgacaacgatctggaattctaccaagatgcatttttctgccttcaaaacatttgtttctaacctttaggaatcatccagctgtggaggtatataagtagttaaatcaccctcgaaatatttagtcttaacaatttgtggccataataatccttgttcacattctaatttccaccaacacttgcaaagcaaattgatatttgaaagtctaaaggatttgatacgcggaccatcttaatgcttgggtttgcaaacaccttttcccatttcactgaaaatgccatattttctttagggtgaccaccctctcaaagaaaagccagaagcttagtcaattaaagatttataagcaaaaggatcattaacatgtgttacattggaatgctagtcaagcatgaatgaattaattgaagttattcttcctccaacagaaacatcacttcaataagataaatctagccttttggcaatttttccgacttgagaattccgaatcacaaactttcaccctggagaattcagcaggcactcccaactaacccaaacacaccatcaactcaagaaaaattattttaagcccagataattactttacatataacaatttttcatatttcttctttctaccacatcaccatccttttgccagatgacactgtcatctgcatccggtaaaatagccactcctcagatgaggaactgaaccacgcgctagattgtttaacttgttaagtctaatcagttctcaaaaattcaaaccagaaacaaacatggtttcatttctcaaatagcaatcacccactatcgaagtaatgtatagggatgaaaacggatcggaaacggatggaaactagctttatcatattcgttttcatattttttttcggaatcggactcggaaggggcgcaggaat

SEQ ID NO: 20897 - DNA, 4885 bp, Oryza sativa
aatcgaaaactcggatacggaaatgaaatcgaatattatcgaatatagatacggagcgaatacgagacggaacgaatacggtagcgaatatttaccgatatataaaaagcccctcaaattgagtttcttgataaaggaagagatatcacttattattttagttaaacatcgctaacaattatatcatcaattttgtagacggtctcacaaccgtatgtgaaaaatcgatttttattgttgttcctctaagagatccatatgcaaatatgattatcattttctattctcaagaccttttactatatgtataacttacttgccattgtataaattggagatgttatttattttacttcacatcctcgaaacttgcaatatttgttttatgctttaaatgctttcaaatacaaatgttataaactacaaagtggtagatcccgttgagctctacaactttgatatggaacacatctccatcagatatcgtttgaattgtaaatctgagattttgtaaaaattaatatggtatattataatgaatatttagacccttaaataacctcaaataataaaatagtcaatatgaaagttgtagatctcatcgagctctacaatgttgatataaagtttgtcttcatctgattccgtatgaaaaagttatgtatatatacatgttttttctaaaatttactcaatgtctgcggatatccgaaaaaaattccagatagtttccgaccgttttccgattccgacggatagtacccatactgtattcgttttcgtttccgagaaaaaaaatccgaattcgtttccgaatccgagaattttcggatagttccgaccgaaactatccgaatccgaaaaaaggtccggacggacggaactatccgaaccagtttcatccctagtaatgtagagtattcatctctatttgtgggattcagatatagtagaattggttctcggaatcgccaatacgactaggaaatgagaaactacatacactttgttactgatcacactgatctagctcctaaaaaaaatcttaacacctcatagttaatgtacgcctgaaaaaaattgcactgcaaacaacaaatggattaactgaaattgccacacaaatgccaacaaaggtatatcaaccggctggtcacaacttcacaagtacaaaagaaaccatcggcaccatcacatcacatcacatctagcttaattagttcaaagcagtacttgcaatttgacagaggcttaaaattagtactaagtgtcatcctcataaaggtagtagttagccatggattagtcaagcattgaatgcacatgagacatgaattaaggtagcactgaccaggcgatcatgaccgacatcctgcagaacccaagattgaatccacacctgcttctcaacgcatgcctaggcctgatgtccacctgtctcgtcacaatctcttcgctgccaatctctgcagcctccacaccaaggatcaggcttcccttctcctccaccaccacgacgcgccgctgcagcacgacgagtgggccactgtcgtcatcgtcattgaccaccgccaccttgccgtcaccggagtcgagcagcaccacgtcttcatcgatgccagcggtgcgagcggtgagacgggccctgaaatcggttgagccttcgatgacacgaactgcgatggtggcctccacggcgaatatcaggtgtgcgaagacgaactccattgtggagtgctccgtcgactcgacggatctccgggcgaagccagtgttgttcatgtgagctacgccgtcgtagaagaaggcgttgtagcttagcaccttatcgtcctcttcagattcagacaacggcaagccactattgttgtgggtgatcaccttgaggtcaacctcgaacatgacagggttgatcagcacgacggcacggctagggccagtgagcgtcagagatgaatcctgtatatatacatgcataaacacacataaatatatatgcacagtaagcaatatacagatcatgtctggattctgatcttacacattgatcttcagttcaaaaaatataagcaacaactgtgatccaggatgcaaaccccgaatttcagaccgataaaaccatactaactattacctccattttaaaaaggatgccagactgataaaactaaatactccatgcgtttacaaatataaatactttggacttagacacggtttccaatgtgctactttgacctgtatctataaaaataaattattccaaataaaaagagtcttatgataatttgtttaacgataaacctagcaacatctttcttacgtgatccatcattatgttctctttaacaatttggcagtcaaaactaaaaaggtttggcttgttctaaaagtgcttatatttatgatcaaagagaggagtaagctagtactagtataaatcatgggaaagataaatacgttgaatgtgatgcttgcctgtggcgaggtgagggtctggcagtcgtccctgtcgcggcggaagaggacgttcctcttgtgatccagcgagtcacggacagcaacgatgccgtagacacgcagtggccactcaaggttccccatgacctctgtcaccttgactgaaaatatttgtagcacgtccattggccacgaggatatcggcagcacaggtccatcagtgtgctgcatgggccggattgcagctgtaggcatatagatatagcactagttgaatcattattgaatacatggaatggaatttcagtgttctaaaagtccactgtgattttgtgtttgaatgtgcactaggcagctgtcctgtctggttatattgatataattctactttctttttggaaaaaagaaggcttgttaattgcttggaaagcgctagacaggtttgttataagagtttagccctatggaccaccttgcgtctagcaccttctcgaaccatgtggaatttcatagtgaaattctgtcgtgcgacctcattcctcctgacacatccagtgcagaccaggactgtttgtgtacgctcagattaacttacagcagagtggtcaatggtggtgtttgaatctcctgaagatgaatattaaatttttcacgcaaaacgaggtggtaataacgtgtgattaattgagttttaattatttcaaacttgaaaaatgtattaatctgatattttagaacaacttttatatagaaagttttcgcacgaaacgcaccgtttagcagtttgaaaagcgtgtcacgaatatctaaaacttaatccacttttttaagtggaaacgaacggagccatttgcctaataaaatttagagtgaattacgctttgggccacattttattacctaagtttcactttgaaccacccttaaacatatattttcactttggaccagatgactttgccattattgcgatttggaccaccatgaacgatttttttttcagtacaatcagcgaccttaaacacatcagctttagtacacggccgaactcctctatgtatagctcatatgtttgccgaaagggaagttagacatgatgagaaaaagttgtttatggtagtccaaaccgcaacaatggtaaatttacccggtccaaattaaaaagataggtttaagggtggtccaaattgaaacttaggtaataaaaggtggaccaaagtacaatttactttaaaatttatcttactagtatgcccaaaaaagaagggaaaaaaaactagtttgcacatgagcaaattgatggccatatatcgaaatcttgtccttaagattaagatgacgcctgtaaagaaattgtttgggcttcttgtccttaagattgtccttaagattaagatgatgagatgtgattggtgcgcaatgaattgtccttaagattaagatgatgagatgtgattggtgcgcaatgaagaagaagaagtgggggttactcactctcgtcctcaaaggaggatccgtcgtttttgccgtagttggtggcccaggtggtacggtaggagtcgaggaaattggagtcgtcgttgtagtagtcgttgtcctcgtcctcgtcttcttggcaggtggtggtggtgttgcggccgccctcctcgcgcgacctcttcgcgtctccgccggcggggatctcctcgtcggggccagcgatctggccgtggccggtcccgttccgacccgaatccacctccatcccctgtcgctcgcctcgccgccaagatcgatcgctagggttttttcttttttctttttctttccccggataagaaagctagggcttttgctcggctcgatgggaagtgtcggggaaatatagggatgatgaagaagcacgtcactggtgagatgggaagggaagtgggccgggccggagacaaatgagcctcaaatgaagcccacttggccatgggggcggttaccgattggaataagttcaccggaggtcctcaacttaacagcgagattttttgaaatcccttaaccacaaaaccataaatgtgtacccctaatctcacacaaaccgtgcactcagggtcctatggcagtatatatgggtggttttgcggacgtggcatcctagtcagtaaaaaaattaagaaaagtacgtggggcccacatatcagccgttatctcctcttttcttctccttctcttctcttttctctcttctctcttctcttcttcggtgaaggaaccggtggcgggtggagcggcgatcggcgagcgcgatgtgggtggcgggtggcgggcggagcgacggtgggtgagcgcgggagcgaagcacgcgatggtcgagcgcggcgacgggtgccaagagcgcgggagcggagcggcggtggcagcggttggcgagtgccgggcgaagcagtttggg

SEQ ID NO: 20898 - DNA, 5047 bp, Oryza sativa
ccctaccaaacccctaaccccgacccccacagcgccgcgccgccattcccccatcctttcttccccaaccatcccagcgagtcgacacctggtgcccttgtgtcctcttggcacgcgacgcgaccgaggtcttcgtgctagctactaccactcgctaccgacgaggaggacagcgatggcactggcggtggatcccctcgcggtgcgatcgctaccccaccccacccctcctcctcctcctcctcctcaacctcttcctccccaatcattcaacggcatttgattcttcgtgaggcgagcgaggagttaagagtacaagcggtcaattgtgtcgggacgggaccagatcaggctagttgggcaagcatccggacgacacgcgccgaaattactgcggttagggtacgaaatcaatgcggttgaggcggtgattaggttagttaagtttggtataattagaaccgcgaggccccaggtggatacggcagattttttttttttgtttttggtgtgtgtgcgcttttagatccacttatgattggtggggtattgaatactgttgctgcgatcgggcggcacgaaagctacgctttagaaagggaagttttgtggatgcattcgttgcggataattagttatatatgactaatttgtctggtactagcagtctataaattgttgtgagatcagattcgtccatattctacctattggcatgacagatcccaaaaatcactcacctgactacatggctagtggatttattggacatatataatagcggcaagttggttggacgacctaaacacgtttaggagatagagtttttaagagaggataatatcattcactgtatttaaatgctttgttcattgtcggggccccttcattgtcactatcaacactaccaaattttgacatattttaatgttaccaaaatttttggtagtataacaatgataatgatatgaatagctttttgtctttttcgtattttgatatagttaaaagtggtaacaaaatagacaagccctaattttaacttgcatgtgttgtctgcaagttcttgttttcttttgcaaataatattgttgcttgtggattggttgtcgctaggccgcctcatgcaccaaatgcgtctattataatattctatgatactgatgtgtgagatgaggttgtacatatttaagtatatactccctttggtcacaataaattgtgttttggacatcatatggctttaagatgcgattttcgacgctaatttattttgctaaatattaaaaaaactgataggttataatattatgaaaggaaatttcaaggccaatatcactttgatggcttctttaatttagtaatatatcacgacatggttaaccaagaggcatttcccattttgccctatgtgaaactcatatgaaactttgttagtaaaggcagttagaactcataaattgttctttcaaacaagaaaaagaaaacatgcccccacataggggcattttttgtcatttaagtggaaagttgaatagataggtgtatgtgccatgttcaatagtgagaggtaaatgaaaaactagacaaattctttttggctctttatagtgttatacgagtacacatttgaaaagagaagcttccatttttgctacttccatttttcaagtatagtagctggccgtttccatactttctaacaaagtgattatcagttactatcactattaatgatattgatttttataccacaatattcactgtttctgtttatgaatgcaaaaacctttgcaaataaaccaaataaaatgtatcaagatgtttggaacttacatatttaaaaagcttggttaccatttgggtctgtgtacattattgaacacaattttatccagttgtatttagcacaactttttgatatggctgcttggcacataggtacacattgtcaagtctgctgtctattacttgtgtttgtcagtgacctactatacttatgaacttgagtgcatattgcattttccaacctaatttttatattagaagttcttcagattttattccatacaacttggtacatgaaccaaagatatttctatgtatgatgtgagaaatcctcttgttttggtgctttgagtactcatttcaatacaatatacttattgtgtatttatcctttttgcatatttatataggatttgtcgatagcttcagtcatgattctttaggttatcaaagggtcacttatgttatattccaaatatatgtgataattctctgaacttgcatagagcaatgttatattgttatggacagtgctatacatgcatgagaccatctaagaatacactactcaattcttattactatagatctaacgtattgtatacaaaaattatttacatctatttttaataaaaatgaatttccagtttttattaatcttaactaggctttgtttctttgagatcccagcttgaatatatatttgttgtggatacataaatccatccatttgtgcactttataatttccattaattgtaaattatgttaggagaacatttgcaaaaatgcctctctggtacaattttcgagaatgtatagtaaaacataccaattaattataggaaatataaatatcttgcaacctgtgtttaagattaacaatgtacgtactagctggtacccatatagcataggtgataccatttctctttgtcaagaagtcttgctgttatttcttggacttgttttgcattatttgagtaaagaaaaatagacatttcagcaggatctagctcaagactgctcaaatgaagcacgagcaggccacataaccaaatatgaatattttgtattagtattttgtactagtgtatagctacttcagggcgccttcacgatgtcgctgcttgtctctggttgcgtcctagagagtcggtgcctcctccgcaagcgcaatcaccattagggcatgttcaatggtagagacgagtatgatctcttaaacaataaaagattatttagagaccgtgtctttacaatagttgggacgacaaagactcaatcattaactcaaaaaatattccttttgttaatattctttccatttttttacccttatgtaactatatttctatattttagtgattaagagtcgttgttatgcataacaacgatgttttgtctctcctctttctatttcttccatgtcaacaagtattcctaattagcaacgctaagagaccactattgacaaaccattgtgtatgcctttactagataggacagacaagtgggagcataggatggcatggaatacactttatgaaaatgcagagatgctactggtgtgatcattgaagtcagtgacagtgtgcggatgatagattggcatttttggatgtctatatatatatatatatatatatatatataagttcacctagaaatgtgctttagacttgtgttttgcagaagtattatgaggtttttgtttgtcagttgggaactatattgcaagtaaagctgtgtatacacattagtagcaaattggcaatatgtgatgtgtggatattttgttttgattataaatcaaacctgcttgagcagctgtgttttttttgttctgcaaattgaactaaattggtgacaggaaagcacacatcctaggtcttgtttaatctggtatgggttgcttctttctcttatgtgactttgtctaatgctgttcaggacatatatactaggtcaagtttatgaatttccatataatgtttcaacttccagcttaattgtccttattggtaggcattttcggtagtatggaatgcatgttttaattaacttgaagtattctggtttgatgatctgatggcaacttggtttgtgaaaaacatacttttgcttttatacctgaaaaacaatcttttgccgtcatgctattattgtctttgcatcttattactttgagttatttaaatatgtggaatagctaatgacaatcattcatgatattgcagggccttcatcacatagatatcgatgttactgatccaactcagggaggatacacgacggcgcttaattccattcgagaacgggatcaagaacgtgctgggcagaatacttttcatggagtagcgatcacttcactgaacaaacaatggcgtcgcatcaacctcgttcatcaggacaggcctaccgtttcactgctgatagatgaatcgaatggatatctggttggatttcgcagaggagatggaacctggatgcattttaacgaccaagagctgccaaatgtgcctggcacagagcagagggtgccaggcataccaatccaattaagctcctcgtatatgaatttgattaaggataatgaaaggtttataataaaattcttcttattttaatgaaaaagttactacctaaggattcttacatgcaaagttcttataagtttcttcttttcaggccttacttttcagtggggagacagagtttacgccactcttactttgtgctgctcaattatgatgcggaggtggacttgaggagtgcaatgatgaagagacaaaggaaggcgttgacacagttgataatccttttctgtgaggcggcacggataaggccagttctggagttcatttctgaggccatgtcaaccgaggacaccacaccactggacgagacactctggacatggatcaagaactggtccaccctgtcccgtttcgcactccactgcagaagatgtgagcgtgatgctactccacttgaccccaacgaaatcaagcacgtctccccctacggcatcaccagcagggagcaagttctggaggtgctactcctcatcctgtcccgacctttgtcccaaccttgatcgtatggtggtcagctggtgatatgtacatattttttttcctagaaacttactagtcagacgaccaacctggtgataagtttgtcgacagcaccatcttgagatgtttacctttgtgagttctgtgaagccctggtttagcacctcaagtggagaatcc

SEQ ID NO: 20899 - DNA, 2944 bp, Oryza sativa
catgaattgggccaaaattcacaagtctacgaagtgaagcaacggaggaggccactagccgaaatgtgggctggttgggtcagccctggatccctttgttgtatatcaatcgtcaacattgcaatctggaacaatatgatcacagcatacacatgtcttttcatccatcagcaattgtgacctccatatcagtctgctgtatatcaatgatgttgtgaccttggcttatcttctgccaacaggaaacaaatcctctaccgtaccaccctctagcatacggatccgcatatccatctgtcctataatataagaagttttagggttggatacggttattaagaaagtatatactcctttcgttccaaaatataataagttttagagtttgacacgattacttaaaaaaagtaggtagaagtgaatgatggaaaattgtgattggatgagtagtgaatgtaggtgagaaaaatgaatggtggggggttgtaattggttgagaagagaatgttggttgataagttgttatattttgggataaatcctaagggctaaacgttgttatattttgggacggagggagtacgtcaggttaaatgcatcagaagagactcaggattactgatgcactgtaaatatcaggttaagtgcatcagtaatatgacattcttttttttttttgagaaacatagtacaaacgtgcgcacactcacccctatgaacgcacacacgcacaccctacccctatgagcacctccgaaagactgggccggcagtaatatgacattctgatcaactgatttgagagtttacagtgctgatcgatgtatgcacactgcagatgcttcttttcaactccctgatgatttttgagcgaaagaagtgtgatgataatggatgtgatcgatgtggggaaaatgtggtgttcttgatgatactgaagctgatccattgacttgtgatgacgaatccttaatttatttttgatttgcgggtgcatggcttgtgatgatgccactctgcatttgttgcagtaataaggaacaaatgttgaaatggtcgtggcttcgtttctgaatgttgtagggttattagaaatctggaacaatattcaggggaattgttgctacacaagttactgcatacggagtacgagttaacccgttagcactactacaactaaaagcaacgatcagatgattcgtatgacaacgccgatagtattaccactgaatgaatactaacaagatacaaaaacgagcatgtgtgcataaagaatctaaccatttaaattaagctcacatcgtgtcaactcaaatttttgttactcgaaattcaaatagtaacatcaaacttcatggaaatttggtattcatctgtttcatatgataagatgctttaaaattttcaatttaaaaacatagtaacactatcaacataaaataaacgtactattaaaatattttcaatgttgaatttagtgaaactaatctgacgttataaatgttgttaacttttttataaagtcaaagcgtattatagtatgaaatggttaaaataacatacaactgagtactacttgagaagttattgattttaaagttttcaattttttttatcaaatactatcactgtagacatcaatatttataaccaaattgaacggttgtcaaatgagaaacactcaagaatcttccggctagctccacaaggtagtggactagaaaatctgagttcgaagactcacctcttctaatttttgatattaggccattcttttatattcgcgttttttaacggccgttaaaaaggataaaataatcccttgctttcttattatagggctgtaattcgtaaaaagtctgtgcataaacagcaaagtaggcccagccaaagcccaaagcccttgagggcccaccactgcaccctaaattgccatcccaaccgccgccgccgaaccccatgcaccctctccccccactcccctcgccgccgccgccgccgacgccgccgccgtcgccgtcgaatcgaaaccaccgccatcccgcatcccgcgtcggagcagcgcggggtgggcccagatctgacccagccacacccatccctgtgtcgccgcgcgtctccgtcatgcggcggggaggcggcggcggcggcggaggaggaggaggaggaggaggaggaggaggtggtcgtggaggtaggggaggccacgcccgccgggacgcgcggccgcgtgatgacaggggcagggacggcccccgtgacgatagggttaggcacggcgaccgccgcccccacgactaccgcccccgccgcaccccgtcgccgggccgcgaccaccgcatccgccgcaccccgtcgccgtatcgtgaccgccgccgcatcccggactaccacccgcgccgcaccccgtcgccgcaccgcgaccgtgaccgtgaccgccacgcggcgggacgcccgaggggccgaggcgacgacgaccgggaccgcgacccgccccgcgggaggtcgccgccgccgtatcgcggcgatgatcgcgggaggtatgacgggccgccagactacatgctccctgaccacccgtcatccctgcgtcctgcgaggaaggacggtgagttcttcggggaacccggcatgacactccgggtttgttcgacggagatgggaaggaccagctcgctgtatctggacaggaggtcgccgccgctgccaccacggccgccacctccaccagtgcgagtggcgtcgccaccgctgtacaccttagtgccacctgcagagactggattcctgacagggggatccgcgatgaaggccggcgagaactttggcacgggaagtagcaggtcgctgcttgacggcggtggcgagtttcagtaccgtgaccgtttggatgacccgtatgttgagaggagtagagaaagagagatcgacaggctctatgctg

SEQ ID NO: 20900 - DNA, 6953 bp, Oryza sativa
attcctgcagccccaagatgaaaggattgaccaccaagtgaggctgccacttaggatggcagaagatgaggataccttccaaggcatgcatgatgggatggagcgtgatgtgcagcactcttaccgtggagatgcactaacacgtcatcgcaggacaaggaattctgatgtgcgctactcacgttctcctgaatctgagcgtattaaacttggaagacacccagttcaacatgggtattcttcatttgatgatacccatgagtttagtgaccaagaagtttctcctgtggtttctagaggaagaccccggaaggctatgtatcgtgatcatgtgacagaacactaccaaactgatgatagccctctaggacgggagtattatgatgatgatgtggattcatatgacctatcacctcagagaatggcagagccttatgatatggttgatgaccaagacaaatatgatgcaagatatgatttaccaaacaatcgtaatgttttctcaaggattactttgcgagatgacaacaatgatgggtgggctgatgaagatcaggaaaacaatcatcaatcgaactcaataacctatgggcattcacaaaacaagcctatatctcagaggctgtccagacccactggccactcacaatttgggggatttcccatgcatggaagaggaagaggaaaaagtgcaaaaaagagattaagatctgctcttcctcaattccatgttggatctacacaagggggagatggatttgttaggccaaataaacgtttcaagctgacagaagttaatcatgatgaccctgaaatgagccatgaggatgccccagaggacgaggacatttctatgcagaaagatcctcctgaaggctcagaagaattcactaagcaagttcaccaggcctttcttaagtacacaaagctattaaatgagagcccgaccgtgcagaagagatatcgtgaggcagcaaaaggatctttgtcttgctgtgtatgtggcaggtttgtatttcttcatctgtgctaacattctaccacctaaacagttcctcctatgactggaatggaggactccttgaaaactctataactttatcgtaccttggacctagatgttgcctagtcatgtttatcatacctggccctcgatcttgtagtttaggttacaatagctaaatcatattatgaattttatggtacttgacttccacatggttctacgagaaactttaggtgccctccacacagcgcatagaagttaaccttctagtttaattataggtcaagttatttcttgtatatggtactgttagggtgaaatcggacgatagggtagtatgtggcgggatgattttgaggaaatttcatgtagagttactgccaagattgtctgttcatggttcaatcaagagtcaggcaataaactaccgcatgttggcattttttatcagcttcaggcactgagagatagatgccaaagattttgatcagtgcagcaatggtctgttatatgagttgaccatttgacaatcttccctaatgccacagccaatagtgatgtacattctgtggactaatgcattgcaaggatttatcaggacaagatgacatgaagagtgtacaagtgaaatatggttctgttgactgattgttgcttttggttgctagtatctgggtctggggcagccaagtttgtatcctgttgaggtcaggagcatacaaaccaaattgctgttatgattctttggattaccataatcaaacacatggaaggcacaaaaacttgtgtttccttaatcaggcagaattgttatgtcttttttcaagggcattcaacgcttgccaagtcgttaaggctgatggataacatgtgttagtttgcgaactaagacacaaaccaatagcatcggctcttgcagtattacagcatgtcacttttttatattctggctagagagtagagactgtaggttgaaccaattgctgcatttgatgttgggtatttcgggtacacagtacatgctgcatattttgttatcttctattttgctctttccatcctggtgagtaatttatgcttgaaaattcacttttgcatttgcattagtcaattcctactgtttacaatatgagcattagtatagcgctgataagcttcatatggattgggatttcatttcatatctgtagcctttggtaggtatcagaaattgccattatttatgccttgacatcttcctagtcctaattaaattggaatctctatattgaatattactttttattgaagtaccaattactacagaagtttttgccagttaagtgacttaatgtttattttttttaacttttagctttgtttcaactttgttttattactcttctggttgctaagcatacaacaaaccttaaacacttggtttatttttcttgttcaaatcagatatcgttgatctttgctttcttggagtttgttatgtgtcatccttttttggtttattttaagctttagacttctattaaaatttattgcatgaagcaacagtttgtttttgctgggtgcatgaatcaacagtactgcatttcatttcttgagatagctgaaggtaaagtatcttcaattctgtatagttttccacctttaccatcttagttgcaacaatttgtttggctgatgtttttgctgttcctaaccatttattttgtttagggatactaaatatttggaatatttgcattgctatttcttatatactcttttcttttccactatgttttcgtctgctgcacagaagccacagccatgttctgcataaacccttctgaattcattacaatttgtcatacattatactgcactcaaaagcataatggataccatatttcttgtgtcgtagaattctgatttcattgaacatttacattggatgtctaacctgaagaactgctttgtttatttgttttcttttttgttcacttctttcgcataacagtgtcccaaggaagtttccggacatcgatgccttgatatcacatgcttatgatacatgcaaaatgggtttgaagacaaaacatttggggtttcacaaggcactctgtgttatgatgggatggaattggcatgttgctcctgacactaccaaaacctatcattccatgccagatgaggaagtaaatgccatgaaggatgatctcatgttgtggccaccagttgtcataatacataacagctccattgcaaccaaggcaaaggctaccgatgcaaagattgtgtcgaaagaagaaattgaaggtgtgctgacaggttagtaattcatttagtcccaatataatttacattctatcagtcccccttttatttgtttgtccctggagatattcaacctaaggatcgtggctatctagctcgaacaaaccatttttttggtcgcacgcttccttgaactagtatgcatcttcatttatggctataatctgttagaattttttataagatcagctgatacagtgtgaaatcatgtaactgcttttcccttctagatataatctgttagtacttttggataagaggaatgcttggtgttgtatatctgcagtttctggcacaaaatataatgttgagttttgaaaatgccctcatgcgttattcttagtgtcccttaagttgatattttcttctgtatccagaaattggggttgcatgtgacaaggcaaagattagccatggcagaccagccaatcagagcgtgttcctagtgaagtttcttccaacgatatctggatttcaggaggcgatgagaatccacgagcatttcaccgtcaaaagccacgggaaggaagagttccagcatatcaaaggtggcaaaggtaagaaggatgctcctgttgatgaactcgaggagttgctatatgcgcatattgcagtcgccgaagacttgggctacctggatgaggaaacaaagaagagatgcctggtcaggagcaagaatgacattgaggctaaagcagatgctacactgaacttggattcgtgaagtaacagcaacaaattaatctaggctaggtttactgcggctagttgaacagatcaagttatcctactttttgcttaaattgtatcgctgctcgaccacgtggctgcaaccttggaatccattatactgctacggttgaaccttaatgcaatttatccaagcccttgagcttttatattctagttttctgtcatttaatcgttttctttctcctgcaccttcaaattggagttgtgatattttccagatgatgcgtgatcaaatgaatgccacatgcacacatgattcttatgttaagtctccgtgatatcatttttgtttggaagtgttgggatggaaaatgatggaatgaaaatggttgattactggccagagatgtgctctcactgaaagagcatctgaaggccacaaagttgtgaaacttgtgcctcattactgttgctaatatgtactaagagtttaagaccatcttttaacactgttgggcatcagaacagagtgcggttaataggggtgttacactgttactgtattggtaatctaagattgcagcatgaaaatgcttcctgccaatttccatgcctgaaaattgacatctatcatggcatagaaatttgctaagctggaactggattgttatggtagtacttctattttgtctgtccccagctgtgtcagtaccagaataatctgtgccttgaatgtgcagaaacaaccaaccccttttgctatttctacgcaatacgaatttctgttgctgctacaataacactgttctgtaatagttgccattctcgtgtgctgctgccattgatgagattaagtggagaagagtagtacagtagatggcatcaaccaagcaaccaaagctttgaattgttgtttgcaccggtgcactgcagtgccagccactgacaggcttttcgagcaacggttgcctcttggcccgagaggactaggcacgggtattcatggcaaacgtcttcttttttccttctcttcttccccttcaaagctagggtgggtgccactttctttgtacacattcactagttcaagatcgataagtataatattgtactactccctctgtcccaaaaaaaaaagacaaaccctggtttccatgtccaatgtttgaccgtccgtcttatttaaaaaaattatgaaaaaaattaaaaagataagtcacgcataaagtattcatcatgttttatcatctaacaacaatgaaaatactaattataaaaaaatttcatataagacggacagtcaaacgttggcacgcaaaccgcgggtttgcctttttttttgggacggagggagtatgtagtagggttatcgtcaatgtcaagtagtacttcgtgattaataaataatattaatccctgttcgaatgtttatgagccgatgaagattatccatggcatgtttcctaagcttataaataatgtgatttttttgttacaactttttgcttctataccaaatatatatctataaccggatgagacaaattattgtactacgaatctggactagggcttgttcagattcatttctatctaaatttatagtactagattttttttaaagataatagtactataatgtttcatcaaattctagattactatattttaggacggagcgaataactttataacaattactccctttgttctttttatatgacgttggttagttcacgttatatattcagggatggaggtagtaattcattcgttggtacccttaaatattatcacaaaatcaggtaatccgtcatccgttcataagtttaaaaagtagttcagtgcatatgtagttatgtatgtataacatgttttacttcttggcttccatagttcagttggagaatgtataaagccttcccatccagcaactttttcccccttaaaacttttgtataaaaaacacgaatattaaggaatgacataatatcaaataattagaaggggcgaagcttcgaacccacgtcgtctagcccaccaccttgtgaagctagccagaaaacccttgtttggcaacttgagggaaggggattgggagtttacacgagggaattgatggtgagattaagatgtgaatttgatttttcatcccagtctcttgtttggtagaggtggtggaaattgacagggagtttagttagagattaggtcattaatgaaaacggatggctgagatttgtttaggcgaagtaaaggaggaattccctcccaattaccacccccacccgggtattgaaaaggagggagttcattcctcaattccccatccccatcccaccaaaatttccatgtctcccaaccaaacaaaacagttaatagcctcatccctctaaactctcaatccctcctaagccgtaggtgtttctgaaaaaaaaaagaacttttgtatcacatcaagctagttcggggaacccatgagaattgcaactactctggctattaacccttttcaattagtacatattcttaattcaggttgcgagactcgttgcctaaagagccgaaaaatgaataaataaaactggaaccagattcttaccaattgcaaatttgcaatatgagaatttctagttcccggagaaaagcccagatgaactcccaaatcataggccatccacgtggcattctaattaaaatgctgtatacttcacaatcgccatggatggtgattgcagcatcttaatttgatttttgctatgatgacactattaattaaggaagatggttagcagtagcagagagcttaattagtgctccctccactccccggtaaggcgacaataggatcgattttgacagtctgaaggccaaacaccacacgggtcacccgtagaccgttgaaagtcgcatcatccaagtccaacacaagtctccaaaaata

SEQ ID NO: 20901 - DNA, 3826 bp, Oryza sativa
ggatgctgctctgtgcccaatcttcagatcattttatttcaggatactatacagtttctattattaaaacaaaaaatggaattagttgtagctttaggatttgtatcggagtaatggtgtatttaaagagtcccatcttgagatgctatatatatggtgtgtaattacaagtttgccatgtttgaaaaacaaagggatggatataacttggtttgtcaaggcctgacatttattgcatcatgggataagtaggtgggcagtttattaaagaggaaataaacaagaaaaaaataatttctcattatagaaaaataactcaggattcttggctctttttaccagtttcgatcatttcgattatgacaactccattgatcacaccataattgttactaggtgattacgtgttgacgaattgactccaacagattggaaacatgaatatgcatttctatagtggtattacaaaagcagatagggacagacatgcttaaatattagccattgaaatgtgtctatccaaagatacactcgattaacatcgtttcaaagacaataaacttaaatatataaaaaatgccttctatatattaatactccatatatgatactaccaaaatgttctttaactttactccatatctctaaaggttttttttaaaaaaagtagttacacgaaactcgttcgatggtgctaaccacaatagctatttcacgaagctagcgcttgctattatagttgctgccagcttaaccatgcgtgcagagccatatactctctccatccttaaatgtttaacgttgttgacttttttaaacatgtttgaccgttcgtcttatttaaaaaatttaagtaattattaattctttttctatcatttgattcattgttaaatatacttttatgtatacatatagatttatatatttcataaaagtttttgaataaaacgaatggtcaaacatgtataaaaaagtcagcgtcaaacatttagggaatgagggagtatatcatcaatttatcaccaatctgaatttattttccacctatactataccttttatcaatcatcatccttcaacaaaaagggttgaaatctttttcaattctcaaattttttttccaaatttgtgaacgcgttgccacttgctactaattttggcaacacaaaaaatccatattacaagctttgctactcgaatattataataacagtagccacttgccccacacctctgccggcggttacacgcggtctcctctccttaaccccgtcttctcttctcctccacacgggagctcgccgccgcggcgagccaccgcgacctcccctccccctccccttccccttccccttcccggcgcgcgcatcgcatgttcccgcgacagcttcgtgcgccgagctgaggcgatgtcggtggcgctgtacgcgcgtgggggtggctgcggcgcgaaggcggccgcagcgcggcgctcggggcgcggcggtggtgggcggaggcgcgccgcggtcgtgctgctgctcgcgctggcgtacgtggcggggctgctcgtgttcgtgcttgcgggaggcggtggtgttggagttggagggcgcgtggaggtggggcgagaggtgggggtgatgacggtggcctcgctccggaggcggcgcgccgcggcggcggcggcgccgcagcccgggtcggtgtaccgcagccacctcgtgttcgagcggctctggccggacatccgcgacgacgccagctccgcctccgccgccgcctcgtcgctctcctccacttcttggcgtcgcagcatggtgagcgagcagagcagcccaactagttcttgcgattcttgattgtttcttgcctttgattttgggttctcgcgattcttgattgtttcttgtgagaaacatttctttcttgtcttttgatttttgtgttcttgcttctttgtgcgttgtaacacgatggaataatgaatcagaagataatttcgggaccatttcgtttattttgctccgattcatcacgggaaagatgcgcaatccgttcttgtttcgtgagatgtgcacttcttgatgctattcttcagaaaagagaagaaacaagttcagttcttgattcctttgtgccgttctttgtttctttccccttttctggttacagacgatggattttagtgagctcacatgccttgcgcattatgattttactgtacggacgcttcattctgctttgcttgctcatgattagatgtagtacttttgtacttttgggtgacagcattatgcttgatgagcatttagtccatgattttaattcgaccggtgaatatgtgctttcatagttagtgcaaaaccattcttaggatgctccaaaattgggtcactaaaccatcctacttttgttcttcgtaagaaccaacttttacatttcagaaagattcctggttctatccattatcatgtagtactaatatatggaaatatttgtttgcatttgtatcgtgcagttgatgacatcgcactatcagaatcctggggagctatggatgccttgtgtcaacaggaagctgattcgaccaggttccactttgttgaaaactacctttttctaggtcttgtgccccataatcataagcactgaaaagggagaattttactaacaatgtcgtgttacgcatcggttctttgcagagttgccaccttcaaatggttatctcatgatcgaagcgaatggtggtctgaatcaacagcgtctttcggtgagttctaggatcatcttttatgtttattaaaaaaaaagtactcatatatgatcatgcctctgagtagataactagatatgcgattatcagtatcttatttaaaagtctagtgccatatgcacctttttaagcaccactaaatctagttgggtagtcacattattgccacaaggtgtcactcaactgagatggcatcttcagcaactttgtgttgaagaagtgggattgtcactagacttgggtttgtcctggaaaaatgatttcattgagactcagaaccttctaaatgtttctggctttggatgctccaaacaagctgcttaatatctgttggctagaacctgtccaaacacgcctggggtagctatcttggcggtcctgtaggacatctatgatttatccagtgtgttatacatagttttcttttttcagcaggttatatactatttgatttattgttcctaacatatttcttttcatccaaaaagtttgacaacaatgatgtgttctctaccattaactcttagctgtgatacagatgatctgacacttctgaacttcttggaatctttcacatatgctaagtaattattaacacatattttccaatgcagatctgtgatgcagttgctgtggccagtttgcttaatgcaactcttgtgatcccagcatttcattttaatagtgtttggcgtgatcataggtaaatatctatttttttcatcgctttgtgtcttattatgaataatgcctgtctgtagctgttttcactttgaattgcaaccacatgtcaatccttgggaaattttcttgtgtgcacaaagttcataattgtttaaatataccaattttatttgacatcccaactcaagaagcgctcagtacttcttttcttttatattcctttcttccaacaagtttttgttttccagtgtaagattgaagcacatgttatttgacaagacaaatcacattcgaataacacttgatggaatgcaaatttgccatctgtctatagtggcatttgcaatttctcatatatgctattttactttccatttatgcagt

SEQ ID NO: 20902 - DNA, 2193 bp, Oryza sativa
tatgcaaaaggtgcttccgaaattgctggagttagggtatggtaaacactcaccacccatgatagagagaatttgattgaacattgtttcattttattttctattccattcagggctgtgcgaattgccccattctcaaatagactggcacaatcagttccatcaaatctccaggccttgagatgttttgttaactaccaagcgttgagatttgctgagccaataagagttctcgcagaggatatggttgaaaggatggtaaaacggagtactttgactggtgggaagtttgtatcagtacatcttcgcttcgaagaggttttgacattctctctcctgtaagttaccaattgcatgttttcattcatgcaactaaccttttgtgtaccactgtattgtttaggatatggtagctttttcatgctgtacatatgatggtggcttgaaggagaaaactgaaatggaaaatgctcgtgaaagaagctggagaggaaagtttcatcggcatggtcgagtgatcaatcctgaggcaaacagaagagatggaaaatgtcctcttactcctctagaggttaccttttcctttcccttcttcacttctcgtttattgcataatgttaaaaattgttgagtctaggtttggccttttagcagtttaggagaccatctcatgtgactgacacagttgcacatgtgcactgaagcttgcattgcacaccattatcttagactatttaatacgtgccgcatctcctttctattttttattcatactgaattatgtaagtgtgcttagttgttgaaacctcaggttattaccaccatgtgtaatttaattaccatcaagtgaaatgccttcttttaaagcactaaagataatgtgcaactgaatgcacttgtgcaggttggtatgatgctgcggggcatgggatttgacaataccacctccctctatgttgcttctggtaaaatatacaatgctgaaaaatacatgggaccgcttcgacagatgttcccttttttggcaccaaaggatactcttgctttgcctgaagagcttgctgagtttgaggtattgtttgccccccaggaactctgttttcttttcagaattttgattgtataggcactcatgaaactactcaccattttaacatttgggtttgttgtgtttaatactagaagcatttgtttaagtgaatgacatcaattggattatctccaattcaccaacctattgttctctgtattccacaggggcactcatctcgattagcggcattagattactcggtctgtcttccgagtgaggtctttgtgacaactcaaggtgggaacttccctcactttctgatggggcacaggcgctacctgtttggcgggaatgcaaggacaataaagccagacaaacggaagctggttttatctttcgatgatccgaatatcaggtcagttttgatcttccatttgcaccatcacaataataacccattaacctagcaggcaatatgttttgtgatcaatgaaagtagaaatgtcatggctgtcacaaatcttgcaaaatcagcttccattttgacattctgctagaaagactcttccacacaattaaaactgcttttagacaatatatctgttgaccgaagatggtcggtgtttcctttccaacaatgtatatttgagttgaccttagcctaacttcctcattgtcttgcaaactaaatacaacaccttcttagtcagactttcacacacacacgcacacacattattgaataatctcacttgcttaatagctttgcaatgtcataaaattggtttaggaccaaactgaaacacctcttttgtactactgcagatggaatcggttcaagcgccacatgcaggatatactacaccatagtgacatgaggggcactgcattgaggaaacccaatgattccatatacaccttcccaatgcctgaatgtatgtgccagcaagatgggatgatgtaggccttgtatgattcatgcacatacgtcgaggaggaggaaatatgcaattttgtacactctgtaatgatctgtaggtagccaccaccaccgtacagaagcaatctttggccgggaatttgttgatttctgtctgtagattgtagagagaggagaggtgaaaattggttctggttgtagatatgatgaaacacatgct

SEQ ID NO: 20903 - DNA, 8416 bp, Oryza sativa
attcctgcagcccagatttcgtcttgttttttcttgactttgttgctatattggcaagaattctctcacttttatctgtcaactccttaatggtctcgccttctggatgttgaagacgatagaaagggctgttggattatgaattataatgatcaaatgccccacattagttgaccatcttaaatctcagtcttccaaagagtaaaagcataatcgtagagtacagcaaatgcacgactaattgtattaagagatatacatatacacatacatcgatcgattgatacatgaaatcaattaataagtcagttggtagatgatcacagtcgtacattctgcacaaagaagaagaaaaaaacagatcattcagccaagaatttaaaggcactgatcgagaaagtgcgtgggaaaacaaggacgaacatgcgtgaaaaggagatgatcgatatgatgcaaagatggatggatactactccagtctagtagagagcaacctccatggacctaccacttggaggtccacatgcatggaggcaggagatgcagtagcaacgaacagcaatattgcaccaactgcacgcccttttgatctgccatgcactctcctaccagtggatcagtgcttaattcatctatccattcatttccaagaaaaaggaaaaaaaacaacctatttaatatcagtatgattcctaaattaattttccgtgtttaaggttccggagtcgaatagcacgatagacgtggggttcttcggagatacttcctgcattcggtgatatggtcatactaacatgtggaacctattacccatagactcacataatagacacccagagaattctgatcccacaatgtgacaatgatacatgggtgcatagattagattcactattgtgcaaagttgactacaaactaaggatacatttataattagattagttggctctacataagtgtagagtccaaatgttttgatatgtttattgaaatatatattatttaaaaattaactcacgtgctgataaaagtatattattatgcatgccacatagctcggaaattggcataattattatatctactcccttgtcccacaaaaaaccaacataggaggggattgacacatactaacacaacgaatctgaataactctgtccagattcgttatcttagaatgttagttcagattcgttgtactagaatatttgacatcccacctaggttgatttgtttttggtgcgaagggagtaagtcgtggaaaaattgcccaacttaactggtataagtcgtgcaagctaataatgcaactatttatagcttttctgcccacaacccacacatggtccatgacttatttgtaacacaagaatttatataaatctcacgtacgtgtgggctgatataattttcttgaagaagctttttcaaaatagtcctacgtatatgttatacgacatgacttcaatttcaactctttttgcatgcaatctttaaaggagcacatcgggttcaccaatgatggagacatgatgaaggaaggtgcaaactagcttttggaagttagagttttgcagttattttcaaagatggaatggaccttaagagcaggtacaatagtaggctattagccagctataaacatattttaatgagataaacaatgagagagaagagcagcgggctatagatttgtagccagctgcagcacggactccaagacgcaatgtgtgtatgacaggtgggaccatatattaatagtatagtaagctactattgtatgaattggctattagatcggctatagatgaattggagctagtagtgggctatactattgaacttgctctaaggaaaagacccctagtttgttttccttgcttttgagtgtttgtgtaagaagttgctttgaacttgtaagggttctgagtctaagtgcttgtttaatattggttgaggtaaaccttttgtaatggagtctatgtactattgtttcgttgttgactgtgtacacccactttggatatagaggtcgggttttaacctttttttttaaaaaaaacatatggttaactttgtagcgatttcagataatttcatcatctcgatgtgtgctcaaattctcatgatctggcagatatggtggtcatcttcattcttctatgacgaaggcgagcgatttggagccaggttgcaagacaaaccataccgtatttgggtctatatatgaagggtgatggcagatgctactaatattgttttggatactaccattggtgtctttgactacgactttatattagaagataagtttaactacatggttttattctttctagctatagaggagaccatgctctggggatgcttattattccttttgtcttcaaataattgtcattaaatattattcattcttaaactttgatcgtttgtttttctttcacgaaaatatataagaacgacttaaattacttcgtattaacaaagtgtgttgcatcataataataattctgtgtacatcacgagctaaccatttaaaatttattgatggtcaaatttcaaattatactgttaacatttgaaaccgaatgaagtacagttttgcttggtggtttgttgctggacatgtgctccttgttgtttggcttggtccgctagttcctaacatcatgacagtatttttaaagacaagtttacatgtattatttttatattttaaaactactataatttgacctcacgcccttgagttcattgaggatctatgctaccaccacaccatacaatttttacgatagttttattccagttacatataagttacatacgtcgtatacagtgtaattatactctagctatatacgagttacaatatacttacactatagttacatttgaaagttttataaccaaaaaacttgcgacggtttttttaggtagtcccttgtgacaatgtgatcagatggagtaccgcaaacataccacagccccccacaaatcacaactcttcaccgtcaccagtatatattgacgatttagtctctttcaaacatgaggattaggtaaggctgtacgagcacgtaaaacagaaaaaacattcacgtatgattaattgagttttaattattataaaattttaaaaatagatatatttgatattttagagtaacttctatgtaaaaaagaatttcgcacacaacgtaccttggccatttaaaaatgtgcaactatagaaaacggggccaacgtccgtctcgtcgctcaaacctacaagtaaaccgcaactatccatccatcccactgtcactctctctgtctccctcccccgacgacctaggcatgccacacccgctgccgccgccgccgccgacgacgacgacgatgccgctgccgctgccgccacctcccctcccgctcccctcgccgtcgtcgccatcatcatccaccaccatccctcgtcgccgccaccaccgccgcctcgcctcctcctcctcgacctcgtcttcctccaccgcctccatattctccacgtcgccgtcgccttcccgccgttgttcgtcgtcccgcgccgccgtgacgagcgacgtcaccacgaccgcctccgtcgtcgtcgtgcccttctcgtgggagctccacccgggcatccccaagaacggcctcgccgcctcgtcctcatccgccgccggcgagccggcgctcccgctcccgccgccgatccgcgcgtccccaccacctcgccggcggcgccagcaccaccgtcgccgccgctcggacggcgtcccggcgcgttccggcgccggcgaccccttcaccgcggccattgccgagtgcaccagggaggaggatagcgccgacgatttgcccggacgccgccgctccgacgccgccgccgccgccgcctcatccgagcatcggtggcggtggctcgccggcggcagcgggttcgtcggattcctcgacctctacggctgcaagagcgccatggccgtcgccgacgccgccatcttggctcgccgccggccagtcgtggcacgttccaagccaagccgagccacccggagagataagtaattatatttgatcaaaattttaattactactaagccgtgtgtatatatgataattaactaagattagattaggatggatttgatcatttctatatctctctcaaaaaagagggaggattatattgcttattctctgatgctattaagcaataatcttgtgtaattttgtttcattttgatcatcaccttatatgtattattaattagtgcatgctagtatgatcaatttgttgtggcatgtgctgcattatgtattcttctatgcctactatattgctgttggtgacagtggttaggctctgtttcttaattaaactagcacctaattatacttatcttaatcaaggtcactacatatatatatacacaaaggggagctggcaattaatatacaatgtagttgtagaaaacaacatagtgatgatgtccctacctagctaattaacacttaggtgctacatgcatgtcacctcataactcaacaaattgatgtgaaagtatacactatagatgttcaaaaaaaaaaagaatacaatatagcaccatgtatgtaagtgtgtatatgtatgcaccatttggcacacaatgttcctgtcaagtgctacacaatcatgaatactttgtaactaagctgttggtgccactggattaatttcatgatgatgctccctggccttgtatatagttagtagtcagttgtttttaagtcttaatggcaggttatgttcatggcatcttcctccttgaaagcactgtggatgtatataaaaaaaggtgacaagtggtcaaaagacagcttgattgaatcctgcagaaagtggtttcatgtgtttatgcatgtgagcatcatcttcttggcacatggtcgaccattatatttcttcatatatgcatgccactagatctatttatatatggaagagtgaactgtcacaaccagaagccgtagtactgtcctagctatcttgcagactgattaattagaagagtgttggtacgaatgaaatttaaaaaattcaggattttgtcgatatatcgtattgcttcttctattattgacgttaaaatacagtgaatatatcaactttgagccttcgaaaaattaggagtggatatagaccttagacaatgtgggccatgactcgtagtctaggatggaagctaggctcattgaggactttgattttttttttcatcatataaatttatgttgagtcaaaacatccatgaggaagctcaggtcttggcctctttctgaatccgcccctggataggatcctaaccatagtgaagccagctgaaaatatcaccgtagtcatctctattactttaacatggtaaactttgaattaaaataatgttttacattcgttcgggttggctgaccttaggtgatgcagtggtgcacccagtccagcgaatttatattttagatttgccactaatgtattccaattttaggagtatatatatatgcccatatgtatttcacatttaaggctaactcatggagtcgtaaggaaatatccttttgttttctaaaatagggcgattcgatgatctatcccagctctaacgactccaagattttttttttttggagacacgcataattaactaacttttgaaagaacgtgacatcgtagctgtagcaactcttacgcattagttggagaccaaattaagaggcgaagaggggatcattaatttctgaactgaactggaactacaaagctgatcaatatagggtcagttacaaaagtgctattttagataagctaaattttgctagaggaaatcgtgacttcacagttttagctataagacactacaataagtaacttttggcgaagtcactatgtaaaacgtgaaaaattagctcatagacactacatccatagaaatattcatttctacttgaataggactctactaggaaaacgattttcactaagcaggcgggcatgattttcaacacaacatgtccgcctgcaataagggagatggaaggcgagattgttgtctacctatgaaaatacatcttcccaagcgaacaacttaagattcccctacgaagatatatctttgcaggcggaggcttaagacgtccgtttggggaaatagtgcattatcccaggcggacatctccacaggtggcaccttaagacgtctgcgtaggaaaatatacttctttcttcctgagccctgtgcagttaacccgaagtttctctctccaaaaacaagaaaaatagggggaggttttgaactcaaaatcttcgacggatttttctacagtgcttagatctatgcattccctctcttgttacaatttttttatttttgtagtccttaattttgatggatctatacatgcaaaaaagttaaagcagcatgtgtaatttttttttgctttttatgcctttttatgcattgattatgatggatctatgtatacatcaaggtgccatattgtcctctcatcccttatggttaaatgtgatgtttttattagccaaaatatgtattatgcccacttttccaattccctagatctagataggagagattaaataaatatgtattttgcccattttccatcccctagaggtacatagtagaaaacatatgtattttgtttacgttacttttatagatcacaattctacagttattaatatttctctttcccatagcgagccaagttaagtattttataaataggtatttttatgcaatttaaatttgttaatataattataatgaaatattctcagagatatgggtaggcaatggatgtatcatacgccaagatatatgccatcatatacaaatgaagtatcaaaatttactgatattattaaggcgcgtgcagcagcaacaacacaacggagatacattgttcatatgataactgtaaaaatgaaaaagtaagagagaaataccactactacttacctatttgtaactatgccattgcaatgcctctaaaattgtatccatgccattttatatgcagcagacgtgttttttaattatttctctaccgtatttttagatgaatcaaaatacccaatcagcatgtaaaacccatccgtcagttttccatctcttttttccttttcctcccctccactctcatgcatggggggccatgaattatgtggcacaatggcgacccacgttgaaagggcgagcggcagggacgggcaatggttgtgcatgggcagcgagagggcgaggtgatggtggcgtgccatggctgtgtgagggcgaggtgtcgttgagaggatgaggcggccatggcatctcctttccccgtcgtcgacaagctttttcgacagatccggttccttctcgtccatggcgcctacgaggccgctgaggagcagctcggcgacgcctatgaagtcggcaaggagcagattgggctcattgacaggatgggaaaaatctgcttagggagattaggcttgccgatggcttcatgctcacgaggtcaccgtcactactaaaaaacccattttcacaggcggccaaaaagcattttcacaagcggatagttgctccgcctacatgtaatcgactgtgaaaatcaatcattttcgcaggcggggcctgcgaaatcaattttttaacaaaaaaaaaaacctcacaaaagtcgttccaccaaatagcagcagaatggattagaagatttttcttagattcactaacaacagccagcatcacaatgaaaaacagcagcagaatggtttagagaggatttttcttagattcatcaacaaatgcagctagcatcatgaattcacaatcaccaacagcagcataatggttcagggaggatttttctcagattcatcatcaacaacaactagcatcacaatctttcatcaacaacaacaactagcattctcagatctggttcgtatgcgtgctcaccagccggcgagcatgcttgcagcagcaacagcctcgcaccgctgctgtcacggaactcatccctgttgtcgtcgcggttgtcgtcattgtcgatgaggccctccgtcgtcacggtcgtcgttgaagtcaccaaggcccctcccttgttgtcgtcgtcgtcgtcgccgccattgcagagcccggcccctcgccgccgccgccccgcgcgtcgtcgtcgccgcccggcgccccgccggtcacgcacctcgccgtcgccgccctcccccggccggatctgggagggcagccgccgccgccgcgcgttgcgtcgtcgtcgccgctccgccggccatgcgcctcgccgccgccgccctcccccggcctccctccggccggatctgggaggggaggggagggtagccgcc

SEQ ID NO: 20904 - DNA, 4282 bp, Oryza sativa
gtaacggcgcggaatagacaaaaccctaacggcgatggcatttttgggacaaaatcgtttgtatgatggtatttcttggaactcatacttgtcaatggcatttctgggatttggacgtttcaatggcatttcatggattatctctttagttaaaaggtttgaaattttgacttgaaagttttcaaatctcgagttgaaagttttcaaatctaagtcgaaagtttttaaatttgggttgaaagtttttaaaatttgtcttacaaatttaaatttcgagttgaaaatttacaaagtttgagttgaaaattttcaaaatttgccttcaaagtttaaatcttgagccaaaagttttcaaatttaacttgaaagtccaaatttcaagttgaaaattttaaaattttgagtttagagtttcaaatttttagttgaaagttttaaattttatgtatcgcttttaatatttcgatagaaagttttaaattttatgtgaaagtttgtttcacatattgatttatttcaatctgttagtaaaacaaatctccaaaaaaaaaataaaaatcttcccttagttactgtcattatcctaaactaactcggttagctagctttctcaggaaaaaaaaatctatggagatgaggggtatttttacatacagaccacttaagagatccgcatgcgaaaatgccccttaagaggcccgcatgcgctcctctgaaggaaggagccgtatgtgaaaatggatggttgattttgcaaacgcgacacgttacggtctgtctgcaacctataaggatcctcatatagagaaattgtttttaagtaatatatcttattactagatcagatattcatttctatcttgctcagtttgttttatattataagtcgatttgacttttcctatagttaaacttgatcaggtttaactaagtttataaaaaaatttagcaaaacccaaaataccaatttatttttattaaatctaacattgaatattttgataatatatttattttgttattttatgttgataatgcaactattttttttctataaatttagttaaacaaaaacattggttagaaaaaaaagttaaaacgtcttctaatatgaaacggagggagttctatctaacgctataacggagcgagtaacaacaatacatgcgcgtacgggggtcggaacagaacacacacgaccgtgttgatcgatcggatcggacggcgtgtgacgtactacgtgtgatgcgacccgacccgaccggcagtggccaccaacccccactaacgacccaagcccatttcaccgtaggttggcaaacctggaagtcctcgacaatgggattgtttagatcccctcttagaatttttcatttttttcatatcaaatatataagaaaaaaactaattatacagattacgtgtaaattatgagacaaatcttttaagtctaattgctccatgatctcacaatgtgatgtcagagtaaatatttgctaatgacggattaattagacttaataaattcgtctcgcggtttataggcgaaatttgtaatttgttttgttttcagtctacgtttaatactttaaatgtgtgtttgtatatttgatatgacacgctaaaactttttaccccgggatctaaacacaacctcagtcattctattgacttggggtagaccctgccatagtcttctattttgttttcatacaggaacggcaccatcttctaaaggttgaagacatcgtgcaagaacggcaccatctttctagaggttgaagacgtgtgagctagacccaaggctccacctgtgggttgggccaaagagaggtgcccgagtggcgggaggtagcagattgggctggggctgaaaaagaagggatgagcttccagcccaaaactaagaaagtagtataacatatactccctccgtcctaaaaaaaaaagacaaactctggtttttcgtgtccaactttgactgtccgtcttatatgaaatttttttataattcgtattttcattgttgttagatgataaaacatgattaatattttatgcgtgacttgtctttttaattttttttcatatttttttcaaataagacggacggtgaaacgttggacaaagaaaccagggtttgtctttttttggacggagggagtattgattaaaaacatattacccgttgtaacacacgggtattttttttctagtcaatatctaaaataaaacaacgtaaaaatgattttgcattagatttctatggtctctcatgaaaatgggacaactatactaatttctcaacatcttcgtggattataaaatccaaatgtcgtcgctcgctaccacatcatgaacacaataatgtcgaaattatgcagtatgtgcttgataacaaggaaaaacctagtatcgaatatttaaagagaaaatataagcgtgttatatatgaaacaaacacatgaactcgggttggcaaacctcaaaggtcctcaacttttttcctttttttttgagaacacaaagtcctctcaactatatgtatgcttttcaattacgtactccacgagacatccgaagatgtgatgcgccgaaaatgcgctcacgagtacacatgtagaaaagcaactccttctagatgctatacacacagaaacactagggacctgatttaagcaagcgtctgacaactatagtttctcataaaatctctagaagcttctcactagaagcttctcaaacaattcagattttcattcagattttaaaaagttgtagttatagaattaaaaaataaactaaaatctacaagctatatttcctaatttatatagtactcctatctcgtcagctgctttttagaattttagggcccctttgaatcaaaggattttatgtaggaatttaatatgattcaaatcctataagaattttttctgtgtgatcatttgattcaaaggattgaagctttccaaatcctatgaaattcttatggaatggttaattgcatatggattttggaggaatcttagcaagagctacaacctcttgaaaaatttcttttgagtttatttctcttatctgattcctatgtttttcctgcggtccaatcaaacggcaatttctgtgttttgcaatcatctgttttacacttgcattcctatccgaatcctatatttttttttcttatttctctatttttctaatcctacgattcaaagaggcccttagctttcccaaacgagacctcctcgtcctcgtctgcttctcagaattatttccaccgcatttccaaggctcctcgtccatgtcctcgtcttctttcttccacaccaaacgaactcgtcaactcatggtggaagcaacaagtggaggcatcggaccaaacatttcatccaacgcaaccaccacaacacgccatgcatcccatcaaaccggaaacagatcctctgacgtgaacttccctcgctaacatggtcaccgacaagtgggcccacgagcgatggggcctacatgtcagtcatgaagtcagggagggatcccaatccctccaaacctacataaatacatacctgataccaccaaccttcctcgccgcgccattgccaaccaataatctaacagttaattagccatggccgccatgctcatctcgcgacgcagcatccagctcgtcctcgtcgtcgccgccgtggtcgccatcgccggagctgtccatgctgccgcgggggagacgacggcgacgacgacgcacatcaaggtgtactggcacgacgtggtgagcgggccgagcccgacggcggtgcaggtggcgagggcagcgacgaccaactcgtcggcgagcttcttcggcgccgtggtggtgatcgacgacccgctgacgtcgggccccgacctgaacgcctcgtcgccggtgggccgcgcccagggcacctacgtcagcgccggcaaggacacggtggcgctgctcatgaacatgaacttcgtcttccagtccggcaggtacaacggcagcaccgtcgccatcatgggccgcaacgaggtcttcgccgccgtccgcgagatggccgtcgtcggcggcaccggcgtcttccggtgggcccgcggctacgcccaggcccggacccacaccctcgacatgaagaccggcgacgccaccgttgagtacaacctctacatcaaccactgaactagtcatctttctcatgagtttttttttaccttttcagaaattatggatttagttaggagttaatttttacttagcaccaaataattg

SEQ ID NO: 20905 - DNA, 7125 bp, Oryza sativa
tatggataaaaaggctggttgatgttcaacaaagactagcaattcctcatatgttgcttgctactataagaactagggtagctttggaccgtctgattataactcaatgcttggatgagatcttttgagtaatcaactgtcaataatcagaagaaattttagttgcagactgacaggggcaagtcttttaagccgttgtgtgtacttgtgtacgttttgggtctcattggacacaaaccaaccccaaccacagcttcaatgcgaatagtatagtccacctacgattagtatattctacctgaatcttccttgctcatgcttcaagtaatccatcttgtcacattacttggcaattttgacaggattctacatgactcatatgcagggccacaggaaagtaatttaggccctgcttagttcgtgaaaagaaaatttttggcgtcacattaaatgtttgatcggatgtcgaaaggggttttcaaacacgaatgaaaaaactaactttataactcgcctgaaaaccacgagacgaatcttttgagactagataagccgtcgttagcacatgtaggttactgtagcacttatagctaatcatggactaagtaggctcaaaaggttcatcttgcgatttccatacaaactgtgcaattaatttttatctatatttaatgctccatgtatgtatctaaaaatttgatgtaacattttaggaaaaaaaattgggaactacaccaggccttagtaaactgcatgcagaaaaggatcaggtgctgttttcagtgagaagtttgcatcatccaaaagatgatactactaaaaaactaccgaagttgcagcctttcaacattcatgatcatgtaaaccatgttggtatctgatccctctttgctagtagtgttatgctttgttccagcttctctagccattattcctactaggacaagtagaaggtattcaatggtccagcttccacatataaatgcatccaatccaagagacttcctttctagaagctaaaattattggagacatggagtaaacgaaaacagaagtagaagaatatggcaagagtctcccccaagtcaatagaatgactgaatgagtgatgccaattaagagaaatcctgtaccacaacaagtgcactgagaaagtaattaactttgactttggtctacgtaccactaccaagtaagtctctcgaagatattgccgtgaaatcgcaatattcagctattaagaccttgtagcttgaccagctagtaatgtagtagatgttttagttcaaacggtcgagaaattaggtacgtgattccgttaaaatccaagcaatgaaccattcttcgctgcacaataagtacaggcacaatgccaccaatagttctaaacctactaactctctttaattccgtgagagcagcaataacaacaatttagaggtaatgaaatgaaagtgacatggcggtactgatgcagtcaaatctattcagaagtaatcgtgcacccaaaataaaagtgctaagcttcaaacggttcagtcaatgcagaaatggtgtgctccaatcaggcattcattcagattataggaatttaagggtgagataaacagacatgtccataattcctacaaggtaaaattataaagtaagactatgagaattatagtttagccataaggccatatatgtttgtgcagtgatgttatatactccctttgtctcacatcatgcaacctacctgccttagggatacctcagcggttagactccaaaagatctttcagctcatcagcaattgcacgatagcagaacatgtattgtttctgaaaaacagatgtatcattagaacatccaaatggtcatacacaaaaaaaaacaaactgcacatctgcattgtacagagactctatttagtatcagatgttacataatcaaggattgatataaatttatcaatttcccttcattctgaaaataaagaaagtttttactgctatctcattaggtgtacattccatgatgtgctcagattacgctggacttgttgccttgtctgtgtattttcaaaggaagcaagtgatatgagccaaaagaaacattagcctacctcagtttggaccattccaactcgttgggttctcaaagttttgacagtttcatcaagatgatatgagcttttatcaccaaggagaagtctctcaattgtactatggatagttatgtaagcaccggttcttccaatgcccgcactgcagagatacaaaaacaatgttaaagagaataaaaagacgtgcacagagtagcattttatcaagatgaagtgaacctgcagtgtacaactataggatgctccatcggagtattttgtaaccattttcgaatttgtcttacagcatcagtattagttggaactccatgatcaggccaatcaggatattctatatggcgtacagaatgaaccctgcttgactacattatgaaaatcagtaaccagttataacttcaatccaaaatatcttctaaattaccagaagtactggtagtggctaatgcagaatatgtcatgattattgtgaatgagtgacagcaaagcaggatggaagaaaaataacttgaaagtacttgcgttgtacaaatgcagggttaggttggctgcatacgtagctcagccgaaccttcaaatagattaacagtttacatgggttaaatcagtctgtgctgggttcgaacaagctgggggagttcacagattagctggatgggttccacaggttatgtcggtttagtggtttgagaaaacaacaaatgcataactagattaccttctacggttgagatgactaagataggtgaaacctactaaagttcatgaacacaaacattatttgtctacgtcattttatgtatgacatatttttcctgtaagaagaacaaaaaaacaaagcatatataattacctcgttgcattgcaccatcacatcacgcaaccataactgatggctatctcttttggcatttgtaatcttaacattgtactttccatacgcttcacgttgcttgcgtaatggaagatattcatcacactgccacatacaacatcattaataagcaattatcaggaaatatagatgattcaaagtgcatcacataggacaaagaaaagcaatggattggagagctctgttcaagaaggatgtccttctgcatatgtgcagaatgaaggacctattaaaacagatagttttttattggttacaacctttgtaatattttaagtgctctttttgtatttattcgtttgtaaatacttttcttttaatgaaaatcacactgcgaggcaaagccctggcagtaattaaattcaaaaaaaagaagaaaagtaatggattttcatgtaaaattcagtatgtactgcatgcatatggctcttattacattatcattacctattattttagtaaacattagatatgtatgtcccactgtaaagttgcgactatagagataaatcatacattttcagcttacaaagatgccattgcaaagtgggaaaatgatgtgcaagcagctgttggcaggtactgttgccctcatgctattcccatggcagtcatcacttgccatctctggcaacgccatccagcagggggaccagatcaggccagaaggcacaaaggagaacccactggccagatcaagcataggaacattcagtcgaatccagaggggcagggaaggaggagaacagccaaatcctgaggaagtgggtgcactggaggtagggaggaggccaatgctaactggatttgttgagggggaggtggtacaggggtgcattgcagatttgcagccatgactccggcaacggggtaaatcaattttttttacccgctattttaaaaaagcataatcaagacaaccagcactaatggcgcattaaaatagtgattggcatcagttctaagtgggatccttactagcaataaccattgttcccttctctccttccaaggtgttaaggagtaccctttcactcaaaagcttaatacttgcaagagaggagtttatgacagatttatacaggtatatttggatcctgaactaagatctactttttattttttaaaaatgtttacattatatcctcaggagcaatacctattgttttctcccaaaggaattgcatttaatgatgctgtttaggttatatgattgattcaacctctcaagatatagttttatgatatgaaatcaacatcaggcatttttattactcttttaagacaaattcagctattcatactgttattctgcctgtggttcacatgtgtatgcaagactatgcatgtaagtataccagctaagcaggatctcacttgaatgtcaattcaatagaacatgctgaggagattgtttatgtaagcaagcaccttaagactgtcgaattgtgtgagcataacaataacaggacattgatattcatagaccatttcccagaaatcatcaaatgtcttggctagtggaccttgagtggaaataaattttgcaactctgttgtcctcagtgacctgcaattttcataaaccacatgtacagatgctcaattgtcccaggcactattcagaaagtgaaaaagaattgcagtatatatatatatatatacctttataaagcttgcattgatataatcattgcttgaagtctgactggtggttgatcgttttagccttaccctggtagtatcaactaaagacaagaaagggttcaacttttattaagttcacaaagtttcaaggagaccctgctggttgggcaccggtataatcaccataattacatatgcaggtgaaaaaaatctcacatggtacgacatcaatatagcggtttttctccctatttgcagcattacgagcttcattagaacttctcatcagctcgtgtctcgtgtcctgaagaaatgaccatgatatatggaatgctatcaaaatatagttattaacaggtgataagatatcctctgaggagaaaaaatcattcaataaaagtgaattgcaatcttgtgcaagaaaatttctcttagaaggaatattttttaatcagtgtgagtattaatagagtctgcccaaaaaaaaaaaccgtgagttataattgtaagtaattgctttattcacagctaatctagtagcagttatatttgaacaatatagattttcatatagttgtgattgaaatcatggaataccgaatttaagctttcttatgtgcaagtcacaaagaacacccagtccatcatatcttgcaccagttgatacggccaattggccacaataccatcttaagaaaatcaccgagatgttccttataattttatccaacaaaatttccaatgacagcttatagaattgactaatattgattccaacaacgagacattagtcgaacactggaagttctccaaacaagatgtattcacagatattattgagtctgtatctagtagatcaatgggagaaaacttttaagtttcttaaatccagaaatggcatcaaaggaccagataactttttatacatgtcaagttcaagactgacaggagtagtgatctatagcaacaacaaatgccaatcctacttttgttttactcattgatgtattatagcatagtgaacttggctgaggccactattttagctcagtttttctccttttttttcgtaattctttgctcttttccttttttttttcgagcttaccacttcatgtactgaaacttgtatcacatcacatcacatcccaatgcttcagttgaaagcaacccaatcaaagtgcttcacttcaaagcaaagcataactaaatacaccaacaaataaattatgtgaagatagggcataacccaaagtaatttggactgcacatctgtcactttgattacaattcttcatttcactcagaaaagccacttaatgctagtctgtcacagcctgtgtgtgtcagtaataatgatcagtaattttcaaacctacatgcaaaattatactcacttaacatacataacacaaaaggggatacagaacctatgaacaagcagaccaaattgcattgtaagatgcaaacagaaaatataggatcgctaaaacaggtattcaattacggaattagcctgaacaatctagtagttagccaaactagggaggaaacagcaacacattatcaatcaaacattcacatcacgacgacgaggaaatcggacgaacacagtacatacatacctggagtctcctgaactcgtcggacatggcttccggccggccacacatcccctcgaagtactcgagcgcctccctgcatagaccgacctgctcgggcgtcagcgccggcggaggcggctcgtcgaggggcgcctgggacgacgacgacgacgactgcgccgcgcggcgagggacaccggcgaagcgggcggcggccatcgccctgccgcgggagctcgtgccgttccccgtggccgccgcggtgggagcgtactggccggaggcgggaggagaggggctcgccggaatcgccgccgccgccgctgcggtggtggcggaagcgatggagacgaggggtattaagacacggtgattatgtagagagagaatatatccttttttttttaaggagagagaatatatcctagcaaccagcaaatgtcacggaaaattatagacatttacttctaatagtattaaacatatatgcaaagtctcatatacaaattttttatattttagcctaaaaagtttaaaaaatatgacaattttaagagtaaaaatttgttagaattttgtctttttaggttaaaatgtaataaatttgaagataagatttttaaatgtaggtgtaatactgttggacgtatgtgtctaattttttataacttttactagttggtatacacagagtgtgtatgagaaacttgtgtacataattatgggtgtgttcggacaccccttttcccaaccccccttccttattttccatgcgcacacttttcaaactgctaaacagtgcaatttttgcaaaaagtttctatacgaaagttgcttaaaaaatcaaattaatctatttttgaaaaaaatatatat

SEQ ID NO: 20906 - DNA, 1524 bp, Oryza sativa
ataacttgtaagttgaatatctgaaattcataaatactactagtaaactgaaattctgaaagaagaaatgaaaagcatagaaacacaaggaaatgagagtgaccttgatgttaggcctcaaatggttgaaccatctttctctgcattgctttcctactcttccaggcagcatcccccctatcagagaccacttcttcagtccaaattgttccactaatttcaccagcttcctatcaaaatttggaagaactcaatttactcatcactggcagagtacagttgtacagagagcaaaacttgtgatttctagttactgtggacagtaccattacaaagcatagtagtacttgacagaatcacagagaattcatccaacttacagttttaactttcaaattacagtgcacaaaaacattatcaagtatgctactacttgacagaatcacaaagagttcatccaccttacgatttcaaattacagtggacaagagcattacaaagttaacttggtatagaaaaaaacaaaaaagaaattcatctttcttttacctgtcttcttccactgtccagtggcctttgacagcatcagccttcttgatacctttccttgacgccttgtttcttgaaatcaacctgccattcatctcatacgcaccaaatgctccaacttgaacatctcttacaagatgagaaacctcagtcttggggttcaacagaaagatcgacgaagcattgtcgatgaaatccttcctacttcctcttctgaagaactcatgatcaagatcatgaagagttgcaaaaggaagcacagatccaccttcaagttcagacccatgaacagtgatgccttcagcttcaaatggatgatcaagatcagcatgatgatggagctcatcttgcagcagaaaggaatcaaatggaatgccatgagagattgctggttggggattgaagcagctgaaatccatggtgagattttcagaatctgaataggagatatcgagtaatgtctcctgaatctctgagaggagatatagcatttggtaataaaatctaagcaacaacttagtagtgcccttaaactggggtggccagagataaatggcaggttaatgcaagttaatggatctcatttactgtcattaaccgagaaaacctcatgcatgaggagggaattaaggctccaatgctccctgcgagtctccaagactgcaaacatgcttgctatacagtcgtgcacgtacatagcgtagacacacgttttcagaaatgcaaccaaaacattcacatagaaattaacttttcagtttataggccatggccaaaatttaaaatttaaatcttatgtttatagttcattttgatttttgtattatagtttttttttcaacattgacttttaagtcgttatgacacatataaaagttttacatataaactatttcctggacgctaatgatgtatgtgaaataataggacagcatatggattgagatagctaccatgcccccgttcgttctccat

SEQ ID NO: 20907 - DNA, 5933 bp, Oryza sativa
tattacgtacgttaattaatttccaaatatgttttaatattttgagtaattctcttttagtcctgtctaatacacatacacgcacgcgtaaatggttcttaatattcaaaataaaggaagaaaacataagagcatctcccttattttgaagtccctagctacaagttggggctgcccctatttcccaaggaaaaaaaaaacctccaactccagtagtagccagtagcccctatttcttagcctctattcatgtttctcttgtattttaaaatacacaatctatgtttacactatgtttaacaccacaataattcaaatataaatatttctaacacgtataatttaaccatacttcaattcaaaatttcaaagtatacaattcaaattcaacatcaaaattttcaaacatgtaaatatggtgcggacacaatgccatatactcatttttcaaacatgtaaaaaattttggagcaagagatgcaataaaattaaaatatactagtagcaaatgccaaatgctcatatactgtacactgctgccgcttcttttatgcatcagttcagtaaaaagaccttgttttccagtttttagaatattgagttattgatccaacctgtcactaactgatgcaattatcgatgagtaatgcacatcagcaatagaaggttgatttctgcaaattaatgattaaattacaagattcataaccatgaaaaggggcagaaggaagtggagcagcgatgtgcaaagtacatgatctggacgagcgacagtgtgggacgttgatcgccggagttgatgcgtgcaaggttgacgacggcttacgcgaaaaagaagaatggtggcgacggcacagccaaggcacgagagagacgagagaggtgcgcgctcgggattttccaccgatccaaaaaaaaaaaaaaggagagataggggttgggtctagagtccccaggattgagggctagggggagaaatttgggagccttcctattttggggcctttaataggggctctgctagaactttatttttctcccttcacctcaaaaactatttgggggcttaatttaggtgctctgctgaagatgctcggtattcaaaataagggctgcctaaccaacattcgatctaaaattcattcaaatgtaaccatggcacaattattacagctcagtggtgatggagacgtgtctacctgcacatcgcgtattcaaccccataccctgcacaagatcgattttcattttccaatccaacccgaattaaattaagcgtgtctaatgggaaaaaatagaaatatttatcccttgattttctatccacaaccctaacaaaaccgtccagaagaatatatattcatgcacacacacacccgatggtatgaatatagatgaggagcatggttaatttcaaagttgtactgtacggcaattctattttattattcatttctgaatgcatgcataaatattttaaaagcgatgtaatttctcagagaatattcagatattatttatttcgactggaggaagatcaatcaagcacactacatgcatatataagggcagagttttccgtagtgcaagttcattatatgggctgatcggaactgctagttgatgcagccgctatggttgtgactgtttttcagctgctagctgtcgctacagccattttttttgctcttgcagcctcagcagcgagcactgccgattacatccatagttgtgtctgattcgagctctagttaagatcttcgactcaaacaattagtacaactagacaggagtattaccttatttatttttttctaacttttcaacaaaatccatgtataacgtatactcccatttgcatactgtgcatatatcttatcgtatttatagtgacaattaatgttcctctacacattattttttctatattacatcaagtctaatttattattttttacatataccagggacaaaaatagtaacaagattacacataaggatggcacggcaaatacacgatattcaaatggcacaaagccaaatatcattgcatgcaggccggggcagatcgatatataccgtccaatgactctacccaatgaccatctgaactaataatagattcataataaaatttaaatggttttcaacgaaataaaatacaacttttacacaaaacactcgatataataagatttattaaagctctaaaactttttggacttgccattgatcgcatgcattgagacttttcaaaaggaaggtgacacgtactacgcgtagctacatggctttacctacctagctacttactcatcgatgatcagtcatcaccagctaccactgcaagacgtcgtggtgtggtcagcacttaaattttagcagccaagtcgtcaggtccatgaagcatgcaacattttagttcggtcttctagaaggtagacaaacatgtggttgttgttctagtgaccttttgtgatccttttcgactttagtagtaactgatttttttccagtctctgtcccaaaaccttttgcaacaaaaatggttattaactgacttggagagatttggattcatctgattaattaatttgtgcaattgctgcttattctttctttgttgttttttcaaaagttatttggccctttggaatggtcatgcatggaaaatttcttgtggaagatgatccacatatatcaatatatcatatccatatctatcagtacatatcaagaaaattacatgtagaggagtgttaattctatgatctcatcctacaacaagttgtataaccatcattcactgaagggtaagtagcatatggtcagccaccattgaatcatctcataatttatgcaaaccacttgggggagacacaactgcttaataaaacagttcctctatcaaatatttgtccattatttgaccacttcgctttgaaaaatatagaaattaatatattcatgtaaaaccgtcaaggatatataacactacttgatacatgtggtgagcaaaccccgccgggttgctaccggtgctactaaacttgaaaaagttatcggacattctataaggaatcctacatctatatatatgataaaatttcatatccaaagcaaattttatttcatatccaaatttgatatgatgcatagaacaagttataaaaataaaaataaaacatctatatatatatgaacttaggatttcaacttgggctatgaatagactggcttttttttttcatcatgtatttcaggtttggaattgagatcttgtgccatggcgtaattcaagcttcttacatattttgtcgatattatgaaaaagcctttacgacttctgtgaaacgcatgaatattacatgaatatatcgtagaaattagttcagttccttcatgtaggatcttcatgtaggatcgtaaagggcctttcccaccccaaaagctagaaatttagttcagttcctttatgtaggatcgtaaatggtctttcccaccccaaaagctagccacttatatcttaggtcatttgccattccacaaccaatgtgggactattcaacacttcaaaattcgcacaaaatttgtttgtccaaaggaggacgccttagaagagtatatcttttttttttttggcttagggcacccgtagcacccaagatatatattcttctgctacttgagaccaccatgcaacaagctagcacaacttgttagtgctgatgatcatcgaaaagtgggcatcttcttcgtgtgttcctcaagcactgatgtcaacgtttgacaatgatatactagtatgtagtatgtatgtatcttggtcagtagaacatgcatctacgtatttgtgtacgtatgcgtgacacagcaatcagccaatggcaagctcttctctcccaatcgaatatgccatgcatgagatctgcatcacctactcattatacagattaaatcaatacacatttcgtgttgtgttaacttaattaattggacaggattaaatacatttcactatgttaatttgattcggtattgagaatattcaattcggaaaacgcgagctcgagtaaggtaataatatattgtaatgagtgtgtaggtagatgacaattaattacagctgagtagataatactgtactcagtatatatagtgccaaatggaggatgggcattggtagatataccacctaattagctgcttaccaaacctaatattatgcttaattatttagttagaggataattagcagccactctaagtgtgcggtcatgtagtgatttatatgtgcatgttgggttttctagaagacctacctaccagactaggattgaacagcatctctccatttggcaaatctatatgccaattatttgagtaccttcttacccaatgatagctcaagagatatttttctatactagatatgaagattagcatgtgtcagatcaacatatgtttttatctgtttaattatggtttatacatatgataattataattaagtttgtcctattggatgagaagcacctttcgtgcaggctaagctagctcaacctaatacctgggcagtaggaatctgaatgtacttaatttggaaacaaaacaatacaacttaggctgtgaattaaagaaaagggtaaacgcagttgacgagagctacgatcaggaattatccagtctagtaattgtcttttcttcatatagacatagatatataattaagcaagcatatgcatattagtttggaagtatcttgattgcccaatttttttacaaaagaaatatatatgtactgccaaattaaacaacacattaagttcaagattttaattagtcctctcttgtacaacacaatctcgataattctcgatcacatttgtggagaagaacaaaatatatttcagttgaaaaaaatgatttggactaattaaagacaggttaatttggagttgaagtccggtcagctggcatggccgcacgctggaaattaaggctaggaaacacaaaaatggaaacgtacgtaggaaaatagaacacaagaatacacgtgtaaaacaaagaaatgaaaaattgaggaaaattgtacatagagtggtcaaaggatttggtctagcagcagctgccactacgtactagaaaaaacattttcgtagacgtggggtttttttttcccaagcaggtatggtcctcggagccaaatggccgtctacgataatgtaaacctcggtggagcttgccgtccacttgcgaagatcaattttttccaagcggaccacttaagaggttcacctgcgaaaataactttattttcgcaggcgggcctctcaaggcgtccgcgtagaaaaatatgattttcgcaagcggaaccttatgtggtctgcctgcaaaaatcatacctgcagaaaaaatatctaagttccatccttatcttctccttcacccatccttaacctctccatcactcatttcccctccccctcctctctctctctgtctcattccttcccggtagacggcgggtcgtgcgacatcctccctctcccggcgatggcaacggctcagtgacgaggaggtcgcgacaatgatgacaacgccttctggatccgctgccggctcgccccgggcacacggatccaccgccgaccggtcgcgggcgcacggatccgccaccggctagactcggggaggggaggggaggtggcggcgacaaggaggtgaggggaggggaggggatgtggcggctcgactcctccctctcctggcgacgggaacgactcagcgacgaggaggtctcgacgacaacgacgacacctcctggatccaccgccggctcgccacgggcgcgtggatccactgccagccagtcttagggaggggagggaaggtggcggcgacgaggaggtaaggggaggggaggggagggg

SEQ ID NO: 20908 - DNA, 651 bp, Oryza sativa
catgatatcgaagaaaactagtggaaaatacatctccaagtgacacagggtactgacaatatcggcctgcaacccatctaggtcttctggatctataatcttctgaccgattgcattgaagaaggcacaaagccgtggatcgtgtgacggacttgtggtggtagaatgcctctatagcaactggcaagatctgtgtgattagcacgtggtaatcgtgagacttcattccaaccagcttaagatcctccaatttaatgtacttacttattctcgtgcaatagcccgaaggaactttaatatctgccagacatgatagcattgcgatcttctcatccttcgacaatgtgtggcaagctggtgggaggtacactcttcccgtcttctcatctgtaacaggctgaagttcactgcgaatgttcatctcctgtagatcgagacgcacattcaacccatcctttgtcttgccaggcatattcaacaatagccccagcaagctatcgcacacattcttctctacgtgcatcagatcaatgcaatgacggacctcaagatcttcccaataaggtagccgccaaaatatggattttttcttccacatcctcttcttgtcctccttgctacgttttcttttctttccaaactcattagtaa

SEQ ID NO: 20909 - DNA, 10014 bp, Oryza sativa
tcctgcagcccaccatggcgggaggttaaagttcgcaatgagaactggccaagtgctgtgagaactactcatgtctctgaaaggattcatgccatctgtacacaaacatatcctcatgtttctggggtcggcagcaaagtctttgtgctttcgatcgatattcctccattgaatcgaatccgcagggtgtcttagcaaaccgtcattccttctctctgtggcatgccaacgtactaactttgcttcattggggttggcaaatattctcttgaaacgatcaatgattggtagataccacacaaccttcgccggaccaccccgctttaacttctttccctcgcctgcgctcttctttcgcttgtatcgagaagccttgcagacaggacaagcatctaagtccgcgtattgcttgtggtacaatatgcaatatgtcgtctcgggcaatgtgttctcctaagtaaggaagcatgtccttcagtattcccaaaagttctgtaaaactcgtctgaccatccactactagccttcaacttcattaggtctaatgttgctgataatttggtgtgctttggcttgcatcctgcgtatagaggagtctccgagtcactgaccaacctgctgaacttcatggaatctctctcattcatagctgggtcatcaacgtcacgtaacatgtcttgcagcatatcacggtccacatcaaccatttcaccgcccaatggagatgggacaaacatgtcatgctcttcttcatctccttcttcatgactgtctgcaccacttccgtctgcagctgcaccatcagtacccagatcttgctctccatgcatcacccaacatgtgtatctctccatgaatccccggcgtatcaagtgagcgtgtacttccttttcatcttcccacaaaatctctttcctgcaatcgctacatggacaacacatgtacttgtcgtttcttcttatcctatcctcctctgcggctttcataaaacttaatacgccatctctatactctttgtactgacacctcaagccagtcgtgtacatccaacttcgatccatcactgaacaatgaacaaaatattagttaacatctcataacataagtactactaaattaataggaaatgtttagtactcttttacttacttttatgattttcctgtttttgtttgcaaaaaaattacaaaaattcgcccccttaaacctcccaccaaaatagtgaagagtgggataaactacagacaacggactgctggagtatatatagtgtgcaaagtatatctcaatcgggccaaaaaaaaatgtcatctctaacgggcgcacactaatctctaacgggcataaatagaagcccgacacctataagagtcatcggtgacgggctataggaatatgcatcccgacgagtacatatacaatggcaaaaatttaggcccgattgagatgacttcgttctgacggcccacgttgtccaggcatgtgatgggccgtcacagatgagaggatctgtactagtgatataacaatatgtgtttctaataaatagttttttttcattgttttattcatgatcctacttgcttgagagagaaaggacagtggaaggtcgaactagagggacaatataggctcttgtcaataaattcaataaacccataattaattttgataatccatgcatgtcatatgatatatattccaaaggaaatctcgctttctttgggagagtcccttgaatccatgtgtcgacttacttccaaattagatttgtgacatagacctccaaacgaccacacaacgaaattaatttaataggaccaattcatgattaattctcatgtgcccaagcgtacctgctgccaatcattaagttgaaattcataaatttcttcctagctagtgctgtacatgcatatatgcacatgtagcgacagtaacatgcacgataatatgctatatttagttagcacaggagtgtactttatataaatttgtgctttgctaaaagttgatcaagatgactaattaatcaccagtgtgatgcacatattcgttctagacacatggttagggtagttcattacgtacagtttaaaaaatgtatctcccttattatcatgcaccacatcttaaggcctcgtaagtataaaccatattacaggtgattagtcatttcaaatgggtcggcattcttcatgaaccgttatagatcgatgatttgcatcatctacatgatgggtctatgttccaaaatcattatatagatcgctagtacaaaaatcatttttcaagacagccaaaaccggtttctacatgtagctagacggcccgcctgcacctaggtgtatgtgaaaattaatattgttccatgcgggcagcctaatcacatgaaaaacaggattttcgcatgcggtcacctataccgaccgcgtgaaaaaaaataattttggtggaaaaaaataaaaatcccaaaaaaacaccgaaaccctagcttgtcatcgtcgtcagaactgccactaacgtcgtcaccgccattgccaccgtcgtcatgcctgcttgctcccgcctcctaatcccaccgccgctattcctgaggatggaggctgtcaaatctgcatgccggtgttgctccagagggcaatgacggcggatccgctcgctggcgtcgctcccaccacgagctccctactgctgccgtcgtcaccgtcgcctacctgagtcatggctagtggtcacctggtaactggagccctgctccatgcctcgccgctcccttgctgcgtcctgctcatggggaaccgtcgagtttgctcgccgctccccatggctgtctcgcacccgggacagctggtgctcttgatgctgggctggatttggaggaagtgggagagaggggggggggaaatgagcggggagagaaagaggaggttgtggagaaatgagaggtgagagagagaaggtaggagataaggataaagacttgaaaaattttgaagatgctaagagaaaagagaggagggaggtcagacttttaagaagtccgtttgcgaagttgtacttccgtatgcggtcatttaagaggcctacctgggaaaataagactattttcctaagcaggtctcttaagtggccgcatgccttgaactgatcatgatggagcgatttttgcaggcgggagcagttatggtccacatgcaatctaaaggggatatcatccagaaaaaatcaattctgtagtagtggataaccataatttggttgtatcccagactctagggtacatggctcctcttgatagaagactcggtcgtcttctcagctcctatctttcacccccttatcctctccacctcaatcgagagagtggagaccacacaaaggtgcgatgacacgagggccaggtggttcatccgtccgatgatgcaaggctcgacataaggcccaacaagaagctcgggtcctccacgtagctcgcaatagtgtgagcctctcgacaacatgatgaggggacacaggatgctagagacaccagatccagttgccctaactctgggtaggtgaatctagtgcctcccctccaggcttttggcgacacatctttctcgctctacaaaggacgaccggtgcctccccctccacctcctaagcaccatcaccgccacccccctgtggagctcatgctccctctagatacgatcgcagtagcctcgaggggtgtcagatcttccccaagatcagggtcacctgatctaactacccatgacctcacgacgcctggatctagctaggtggctcaacggcttcccctctttgtgagtaatcctttgtgactgagacgggtatggtgataggcacaaggaggtggagtagcagcatgaagcagtgcgacgacgatgagaaccatctcccatccagatttatccacccaaccaaacacaccctaagttgttgttccctgtacctgagttggatgctcaatggctcagttttttttggaggtggaatgaaatagcgtggtagaaggcacttgaggggtcggtcgtggatgcactgtagccgtttcgcctctccgtggcaatggctacttggacgaggcgggtgacgattgacgacaaccatgacgagcactggtcccgtgcaagttatttaattattatatttgtttttactacattttggctgtgtttagatccaaagtttggatccaaacttcagtcattttccatcacatcaacctgtcatacacacacaacttttcagtcacatcatctttaatttcaaccaaaatccaaactttgcgctgaactaaacacaaccttcgatggttcaatagatatgaacagtcagagatgcgactagtcatcatcagtacgtgatcaattgactgcaacgggtgactgaaccgtcatgttcttgttggactgtaacttacacagatgaccatttctctagtggagtaattggtactagtatcttgcacttgagactgctctaatttcaagtacatattgtgtcgacattcatcttactaattaacatcccttgtggtctgcttccctgtatatcaccccatttttctcgaggtcaattctctgtcattccatgtatgcatatattgccgcagactcaggaggagccagtacacagggtacatgcatgcatgcatgatcattaaattgtaccttatgatatgtccatttcagatggacgtgcagtacttgactgtgttaggttcaacatgaacatttactgtgcatgcatgcagctattagtagcttaatttaattagtggcgggagctgatcaaatgtgtgatgtggaatgccgtcgatacattgccgttgtcggcaacatgccaattcatgcctgcctgcctgcaatgcatccagctaattagctaactggcagtgaagtgcatgaacttgctgactagctagcacaacttaggactatagcctaataaatttagaatggattttaagaacgatatattttagattggtttttagttatcatcttaattagcaacgatcatgaaaagagtttgcgatgaatgcgaccaagaaaatccggccctgtaaattaattataaaatcaaaatttagaatttaattaaaatcagcttcaaattattcttttttgtttgttctttagggtgatatcgatacaatttttaatgcatatatttgattgtttgtattcacatgaagcactaagaaacaacatggaaatatgtttcatgacgtacataataccatattttcactcataaaggttacatgccgacgacgtacgtcgttttgtatgaaaactatgaactaataactcaattgatggagtattccattatcgaaaaaaaaatcaattgatggacattaagaactgattcaatttgatagctttccatgcaccgaaacctaataaacacttaaatacattgtatgccgtcatcgtctcatatatagatggctcatttcgccttcgaattgagaagctagttgccaagaaattaattaacctgtgcgcagtggtgattttgctacgtgttacatggtgcggacactggtggagaaaccatctttcgtcggtcggccgatttccacaatagtcccggatgcaataaaaaccagggttaaagatgatctttagtcccggttcaaaagggtaacgggcatatttgatctttagtcctggttggtaacaccaaccgggactaaagatcatctttagtcccggttcgaatgctgttagggcatgttaggcccccccgggatctttagtcccggtccgggactaaagatcgtaactttagccctagttggtattaccaaccggggctaaagatcctggtgatctttagccccggttggtgctactaaccgggacaaaagtcccacccctatatatatgtcttcttcctcctccagctgcccgagcaagcttcaaaatttcttcaaaaaagaggggaggtcatgccaaaaattctattgaatttattttggtgattacatacaaatcggaggtgcctaaaaggtttgcaacttattcctccaatgttttttttgtcatactacatttgcacctatgtttttcacacttttttttgtctccaaaatttaattgtaagttgatgagagagaaaatgtgtgtggggaagaaagaatatatagaaatttagttcatttgctaaacaaggttttataaaatagttgagaaggaaaactctagtgaaagttaatcttaaataatagaaaacaaactaaaatgaaaattaaaagaagtaaaacacattaaaattagtttaaaactttaaaaatagtttttaagaattatttggtgtaatattttatgatttttgtatgaataaagatatcttataattattgtatgactgtcattattgtaagaataattatttgtgtacggttttttttgactcatgtagatggatcggcaatggatgtacgctgaccggcggtccaaagagtttattgacggcatgcagtattttttgagagtggccgaagcgaacaggcaaaggggttttatttgttgtccatgcaataagtgtaagaatcagaaggagtattctacatccaggattattcatttccacttgtttgagtcggggttcatgccaagctataattgttggacatcccacggagagcaaggtgttgaaatggaagaagatgaagtggaagacgacaatattccggactttgctcagtatgttggatttgaagaaaatcaaacgggcgaggaggaaatagctgctgatggtaacgacgttgcggatgatcttggtcagatgttgcaggacgccagggaggactgcgaaagtgaaaaggaggcccataaattggacaagatgttggaggatcacagaatttcgttgtatccaggctgcgagcaggggcacaaaaagttggataccattctggagttcttgcaatggaaggcaaaaattggggttagtgacaaggcatttggcgatttattgaaactcatcaagaaaattcttccggggggaaacaaattgcccgagacaacgtacgaggctaagaagatagtctgcccgttaggactggaagttcataagattcacgcatgtccgaacgattgtatcctatatcgcggtgaggagtatgagaacctagaagcatgccctgtttgcaaagcactacgatacaagattagacgagacgatccaggagaagttgacgggcagctaacaaagaagagaattcctgctaaggtgatgtggtatttccctataataccacggctaaggcctttgttcaggaacaaggggaatgctagaatgttgcgatggcacgctgaagagtgtcaacaggacgggatgctgagacaccccgccgatggtttgcagtggcgaaacatcgacagaaaatttaaagaatttggaaaggacgcacgaaacatacggtttggtttgagtacggatggcatgaatccttttggagagatgagcagcggccatagcacttggcctgttacgatgtgtatctacaacctcccccctggctatgcatgaagaggaagtacataatgatgccgattattattcaaggccccaagcaacctggtaacgacatcgatgtgtacctaagaccactggtcgaagatcttaaacagttgtggaagaaggaaggtgtccccgtgtgggacgaggacaaacaggaggagtttaacctacgagcgctgctgttcgtaaccatcaacgattggcctgcacttagcaacctatccggacagtccaacaaggggtacaaggcttgcactcactgtatggatgaaacagaaagtacgtatcttaagcactgtaggaaggttgtatacatgggtcatcgtcgattccttgcagcaaaccacccggtacggaagaaaggcaagcacttcgaacataaggccgaccaccgtacgaagcctaaacatcgcagcgggaaaacagtgtttgctatggttaaagatcttaaagtagtgttcggaaaggggcttggaagccagcctatagagagcgaagatggtcacgcggcgatgtggaaaaagaactctatattttgggagttaccatattgggaattcttggacgtacgctcatgactgtcacgtgttgatgacacaactgctaacagctgtaataaggggtatccttccagacaatgtccgggcaacaataacaaagctatgtgcattcatgaacgcaatttcgtagaaggtcatcgatccggatagattagaagcccttcagaatgaagtggtgcaatgtctcgtcagttttgagttgatatttccaccttcatttttcaatataatgacgcatctgctttgtcaccttgtgaaagagatctgtattctcgggcctgtgtacctacacaacatgtttcctttcgagaggtacatgggcgttctgaagaagtatgttcgtaaccatgctcgtccagaggcaagcatcgccaagggttatgaaacagaggaggtcatcgaattttgcgtagaatttatcgaaaaccttcgcccaatcggggtacctgaatcacgccatgaagggagactacggggaaagggaactctcggaaggaaagcaataatgacggtagacaacaatttattccgtaaagcccatttcactgttctgcaacactcttcattggtagctccttgcatcgaggagcacttggctctagttcgcgccaggaacatcggtaagtccgatgcatggattacacggcatcagattgatactttccccacgtggctacgacaacatctcatgggtaacgagtcgatcaaccaacaacttgccttcctggcgaggggaccgtctgggtcaatcgcgacattccagggatatgagatcaatgggtacacattctacacgagagcccaagacatgaagagcacgaaccaaaacagcgctgttcgtgtcgatgccatgggacacgatggaacaactgccacgtattacggtgccatcgaggatatatgggaacttgactatggtcctctcaaggttcctctgttccggtgccaatgggttaggttgactggtggaggcgtaatgattgatgacagtggtatgacaactgttgaccttaacaagattggatactcggacgaaccttttgtccttgccaatgatgtaacgcaagtctttttcgtgaaggacatgtctagcaaaggaaagaagggcagagggcctgacgagcctaagcgccaagtggttctcccaggcaaaagaaaaatcatcggagttgaggacaagactgacgaggattacgatcagttggatgggcaaccccctttcacggtgacgattgaccctagcatcctcctatcaaatgaagacaccccttactcatgcagcgatcacaaggagggaacaatagtgaggagaaagtacgtgcggtcaaccgtcaccgccaatgtaatgccgtaattattgtgtacacgatgtaaactattttggatgtattgattatccatataaatcaattgatgtatggcataatttactatcattcatatgctaattagagtttttcacaatttaatttactatctttcatatgctacttatatatgactattcgaatttttaaaaggtttaaatcatgcatgtggcatttacatatgttaattagactttttaacatttaatttaatataattcctacgctaagtatatatgaagattacaatttttattaattttaaatcatgcagtatgtacatacatatcttaattagagtttttaccaatttaataatatcattcatatgctaagtatatatgattattggaatttttattaattttaagtcatatatttgcttattacgatttatccacttaatttattacagacaaaaataatttttcgaagtaattgtcattaatctttgtactttaaataatgttaatgcattaacttctattttagaaacacatatgtaagcgaaaataatatgcagtgctataatcttt

SEQ ID NO: 20910 - DNA, 26302 bp, Oryza sativa
  unsure (1)..(26302): unsure at all n locations
gacgccgcgccacgcctacgccacgccacgcagccgctggcacgccacgccacctacttcgccgccgcgcgcgcaacgccaccgccgccacgccatgccgccatcttcgccgccgcgcaatgccgccgccgcatgcaacaccgcgctgccaccgccgttgccaagccgccaccgccgccgccgccgccgtcaccaccacgccgccatgccaagcgccggcccgatgccgtcacaccgccgttaacgaacacatgaacgagaacgaacacgtcaacgtacgttgccgcgagaacgtgaacgagaacgagaacgatcgaacgaacgagagcgacaacgagaacgatcgaacgaattaacgtgaacgagaatgacaacgaacgtgaacgagaacgaacgtgaatgagaacgagcgaacgaacgtgaatgtgaaatgcaatatatatatgttactttgcatttatcctaatacatattttttgtatcttgcagaaaagacgtgttgtcggagtcgtccctcaagctggagtggaagagctagccctagaaggaattcgtgcaggcaagtgacgtaataatataaatgattgttatatttgtaatgcaattaagaatattagacttgtaattatacttagcatataagattgtgtagtgttctaatattatttgagttttaatataagattattttattgcaaattagacttagtatgtaatttttgactacggaattggtgcgactcctagcaattgactattgtagtcttaattagacttagcatatacgcatgaaacacttagcatacatgactattttagtcttagcatgtaatattatttgagttttaatataagattattttatttgtaattagacttagtatataattattgactacggaattggtgcgactcctagcaatttacaattttagtcttaattagacttagcatatacgacagttacacttagtatacatgactctttcagtcttagcatgtaatattatttgagttttaatataagattactttatttgtaattagaattagtatgtaattattgagtacggaattggtgcgactcctagcaattgactattgtagtcttaattagacttagcatatacgcacggaacacttagcatacatgactattttagtcttagcatgtaatattatttgagttttaatataagattattttatttgtaattagacttagtatataattatttactagctagggttgtataatatacgtcacctagacttagcttatatcacgatttgtaattagacttagcacgtaaggttgtgtagggttctaatgtacgacatttacacttagcatacatgacttaaattgttaaaacataaatgtctcgtgacttaccagatgtttctagtatcaacagatggctgaccgcgatgaggaacagatattatacaatacaatcgcggagggaagcagccagtactggaatgaagaagaggggaacgaggatccaaaccagtacttgaacgaggaagggaacgtggagagggatgcggaggggaaccagcaggggcacgtggaaagggatgtggaggggaaccaggaggaggaggctagtggtagtcaaccctctgttggacagaagagggcacgcgggcaacgaggtgcagcgaagaagcttgagggtcggcacatcataacggaagtggaagaagatggacgtcctagtgccccggccgaagccacgaagaactatgtacgtcacagcggttgggttgtgcgggataacgtgcctgtcagtacggtgtactggcgaagaccannngcatgtggagatcatgagagctttgtcccagattggagaaagagatgctgtggaccacaatgctcgagacattcacccttcccgcgggtacagaggacaaagtgataaggtggactctgaagaaaatggcagaacagtttcagagcttcaagggagagctgtacaagaaatatatcctgaaggggcagacaccgaactttgacacattcccaaagctaaggggatcactgggacgagttcgttgcatataagacaggtgaacaagggtaggcgatgatggaaagaaacaaagaaaatgccgccaagaagaagtaccatcaccacttggggtcaggaggctatagcgtcgcgatgccgaagtgggaggagatggaggctagcttgattgagaggggtatcgaacaggcaaccgccaattggccggaacgatcgaagttctggtactatgctcacggtggaacgctcaacccagctgatggctcactggtcttcggtgatcagatacgagaggctgcacgacgactaacagatgcagtggaagcctcctctcagggcacgttccgaccggacagagatagggacgagctgacactcgccctgcagactccagagcattcaggacgaacacgagggaaaggggtgattccttggaagattggtttcaaggaggacatccacacgtacaggagtcggatgaggagtaagagagataccgaggcgaagattgcagatctagagttccgggtatcgagctacgaactcagcatgcaagaggagggggcaaggaaggttgatgaacgcatggccgcacatcggtcccatgatccccagccgaccattcctcctgcaatggtgagcccgttaggaaaccgtagcagctgcgcctcaacggggcaggtaagatcacagagcatggacgccatgcaaacacaggacgaatcgacctgtctcgttgatgacatcactcagcggacaccatgtgagctgcatattccttacaagaacttatcaataaaggtaagctcgtagtttatatattttagatttagccattccgctagttgctgcttatatatgttgattactaataaataatctctcacaacatgaaggtggcgtcgggcatggccatcctaacggacccttcaggtacttaccactgcaggccgattccagcaggatactcgaaggtcgaagttgagttggtcgaaggcgcgtacgaggacctcgagctggattaccctggaggagacggtgagacgcatctacgagacacaagccatgccattattctatggcgcaggcggtacatcatcctccctgggcgacaagcggcgtctcgtgcaccatctcctctggctccgccatctcctcctcaggatcctgcaccgtctcctcctcatgatctgccagcaccgactcctcctcaggatcctgcaccgactcctcctcgggcctctacacctactcctccgcaagctcctcttccggcaccttcaaagtcaagggcccccccagctccaccgcctgcccacacaagggaaaccaagaaggcgaaagttgacgccgccaagaacaaggacccggggtacgattgcacgcaagaggagcttgacgcttacgttgcatcagaagtcaagagacaattcaagcctcgaagtccagaaaagaagattcttatagaccccagtgtcaggaacttctttaggggtatgtctgcatctgtcaaggaggccatcaatctatcggactatgagcgaacgctgaagaaagcatcttctggaaagtccaaaccagtccctcagcttggagagcaaccaaaccaggagatcgagccgttggtgactggtaaagaaatgacgatagaacaatttattactgacaccggtctaactacggatcaattgctaggagtcgcaccaatcgaaaaggcggaagagaaatacatgtatgaactcggtaaaccgcttgtcaagcttgagctgctgcagtccctacccacacaaatgtacaagttccatcagctgtacatggagatgagcgccaccggtagagagatgatcggagcgaggatcagggacacggagttcttgcaaggagatgacattctctggatcaatttcaagggaatctatgaactataccagctggacgccctcgacgtctctattatgagttgctggattttgtaagtatatcgttcagttagatttcttactatacgtctcctttaattaattaggtccttgtatataagtagactatagaaaataatatactcccttttatcgttgtagaatggagattcaaagggcccgacggtggagggtttttgatactggattcatcgacactcggagagtaaacgtcgcaatgctcgaccaatatccacaagaaacaaaggacaatctcgtccatctcctgaaggcgcagcattacaagacgttcatactgttgccgtacaacacagagttagtttaattttactgtcttcctacataccaaatttcattcccgtacgaacttgctaagtgtttcatatgtaatgcatcccacgcacattacagattccactgggtgcttttactcttcgacctgtcggcctgcaccgtcaacgtatatgactcaatgaataaaaaagagtctacgtttgacaaggttttcgaacctatagacaggtaccgtcataagttcctctgttaattaagaaaatcttgttatgttaattgctactacaaatcatagctttaaactccatgtagggcttggtatcggttccgtcatttggtccacggcaaatggagagaaagacttaggcggaagttcaaatttcctgtgagtacacatgctctacatttatatttctccgattcaaatacatacaagtgtatattaattagatctctcgttgtttggcatttatttgtagtgcgcaaagcaaaagcagggaactaacttgtgcggctattacgtgtgtgagtattgccactgccttgcagaccaaatcaacaccacaagagagctcgatgtaagtacaaataaattcaaaattttattacgtaacgatttcttgtttaattactaatcaatttcatacattcatatagtttattcgcacgagggataacctgaccacacacaaggaatttatcgcggcggttcaagaacaactcatgggattcatcaacgaagaaatccttgatcccaagggtgaattctactacgacggaaacacaattcaccggtccttagcttctgagctagcagcgagtactactactacgtcgaaatcgtagctagctaggacatataatggattgtaattaatacatgactacatatgtttctatatgcatgtgtacacattttctataatgtaaatatattttggtcatatatatatatatatatatatacacacatatgcatttgcataacatatatattatgtataaatacatatatattatgcatgtacatatgtactgaactatttatacatatatatatatatatataatatatatatatgtatgcatatatatgtattgaaacatatatatgcatggtttatatatatatatatatatataaaccatgcagcaatagggccatgcaaaaaaaaagggtcagctcgatctttagtagatggctcagccggccacgtggttgagccatctttagtcccggttagtgttaccaaccgggactaaagatcgatctttagtcccggttatttcacccgggactaaagatagcgatctatagtcccggattggtactcccggtttggaaaccgggactaaagggggttacaaaccgggactacaaagggtttttccaccagtgggactcaggattttaaggtagtgtatttaaattttgaagtagtaaatttttcaatagcctatttttcaggcttgattgaatatggcctctttttcgtttatatatatatatatatatatatatatatatatatatatatatatatatatatatatatatatatatagacacacacacaatacaattagaaaatgtatgagccgttcagcaacacagttcctgcaagaagcattttaaccaaattatgcatctaggcgcgcgattgagcaaaaagatctttcaatttgtgaaaagattggctttgcttaattaacataaccagataatagagatgccaactaactctgcttgggtgaaacagggatgagatcagatgcattaatttgcagaagctggaatcggaagtggtgaaacagagatatctggagcaggacaagaattgctatagctctccagctgatactcctgatatagttgttgcagacttgaaggaaaaacaaaaaagcatgtggacacgtattattattggaagttttactcactccaaaatttgttacttcctccatcctaaaatataaagatttctaaagttaatacgggtacttaaaaaataggtgaaattaaatgtgtatgaatgttgtgattggtggatatcagaaaatatgtgtggaatttgaatggtggaagattgtttaaaaagaatataggtggagaagttgttatttttgtataaattttgagtactagatattgttatattttgagacggagggagtatattacttggtagaagtagatagatttctttaatttgtttctccattgattatcattaatatgtgtgtaggaatttcaaataaattaaacatgtgcaatactcttttaatttggcagtcatgcaaaaggaacaagagggaataatgctgactatagatatgcattgatcatcgctgaatgttcagctatctctacgtcttgttgatcatgaccgtttttgtctggtcaagcatccatgtgagtatacgatcgagcatatatacatgtgccattctaagcccatgcatgggcatatgcattattcagtactatcgtaccagagatcacctaacaaatgagctatagtaatgtacataatatatacatgaacatatatagcagagacagctcttcttttgatacctctctcgacaatttctgtagtacgtcctccctctctttcaggttattacaagatgactttagtcaaactcaaactatttcaagtttaaccaagtctataaaaaaatagtaatatttttgacctaagataaatttagtataaaaatatatttaattattaatttaataaaactaatttggtaatgtaaatattactatatttgtctctaaacttagtcaaatttaaagcagtttgattttaaccaaagttaaaacatcttataacctgaaacggatgaaaacggatgaagtagttttcattatggctataaatatatatatgcgttaattaagaaaacaatttcggtagtacgtagtcttacatgaccacgactaaaccaccatagatatatgcttccattttgacagaattgaaccaactgtcctgattcctgtatatatatgttaaccgaaccatttactgtgaacttaatttcggtgaaattaattatcggcatgtactactactaaagctaactaggccaaaacaaaattatttccattaatttcaaatcagatgacctgtcttatgtacatatttatgaaattcggcgtccataattatcatctcaggtatgccataggagatttgaccaaatcaatgcaaaattattgatgatcttgggtcaggaacaagtgcaatgcatatacatggccccctactgaggctcttgccgttagacaaccggccatgttcttcaatgtatgtgtcttgtgtggtatgtattggtggaccacacccatagaagctaaaccttatctgctttgctgcgataagcatactacaccaacaaatcctcctcggcagcgataatccagtgaataagctaaaaagaacggggtaaattgcatttttagaaagctgattttctttaaaacacgtgatgcatgcacactcacccatatgaatgcagacacacacggcagcaataatccaatgaataagataaaaagaatggggtaagttgcattttagaaagctaatcttattttttacaaacacagtataaacgcaagcgcccacgacgcatgcacactcacccatatgaatgtagacacgtaaatcctattcctatgagcgcctccgaaagattataccagtatattttgagattgacgaagtcaccatggatgcctcgctgtcgaggtgtacatcgtctatgactgaaagaataattagccataaatacgagtacccgtgtaaaatctagtatttgaacccgggtgaactggttccacaataagaaatctaaccagtttagctacgcttatgtcgcttagaaaactaatatgatgagtgggcttaagaatatgtagcagccacatcactgaaaaccacccacttaaccacaaccagctctatgctacatatagactcccttttcacctataatataataaattatactcttcaaatttatctcataatataagagtttttgtaattccaatacaatacttaacctacgagttttctggtttattgtacccatcacttttttactagtttatccttcctacccattactttcttactggtttatccttccacctacaagttttctactactttatttcaccaccataacctttactatgccccgtccttttgctttttttaacttttaaaataaaatataatcccttatattatagcaaggagggagtagatgattttaatagattagagaacacattaattatatatccaacactagagttgcagaaagaaaaataaaccacgtgagaaccatttgtgaaccaaatatagacattttcttgtatttaccagggaagtatatgtaaatatattgccaatgttttattaaagcatgcgcttaattttgtcacctagttagtagtatattgatatatgctcaattttttttttagagaaacacagcagggagcccctgctgtttgtattgtaataaaaaaagacagaatatttaaaagaagcagaacaatataaatatatggggtgaagataaagggagtgagaggagaaggggttacagggtgttctctcaatttcaaaaaatttcaacatagccttcagttacaattcgaaagccaatatttgatttactgtagtacatgatatgagtttatgaattagctaatcatgaaagtatcggagtacagtacacccaagatagtccatacaaattttatttgctgttcacacacaaagaatatttgaaataaaatgattacaaggtagctagagtactcataagtttctgttgtccttattaatcctaatcaacagagccacatggcttgtcctagccatgtaatatgacagccatcagccatgtgcctcccatcatctggtcttttgtcacctattgcaatgtgatcttgtgctgaattcttcatgatttagtttggatctgtttatggggttgatagatggtctcagctagctagttagttatgtatagtcagttatatgtctgtcactggatgggaagacattctatatataagaccagctggctaattagtgtgtactctaccatgtgtgcgttgccacgtgtcctcggcattcagaagttgcatgtgctggatagatatggtgggatatgcagagtcaactgaagaatgctagccattgtcatggttaaagttcagtaaattaaataaatccacaattcttttggcgccctaaaagttttgtagaaagctttaaaagttttgtagatagattcaattgtacatctggcctcctttgaaacgctacaaatttctcaaacttatgagaaataaaaattggtactgatgaacatcctactcccgcactccaaagcagtctacagatcactacttcaaataaacgagttttctatacaatgacctctttagattgcatatggatcataactggtcgcgtctgcaaaaatcatcctctatttttgtgtgcggtttcttaagaggaccgcacagaataatcgatttccgcgtgcggacctcttaagttcaccacacgcacaaatgagcctatttttgcaggcgaacctcttaagtaggccacacgcaaaaatacccctctctctcttttccctctcactcgcttcaaaattttcacctcctctctcttcctttccttttattttcactcctctctctctttctctcctctcttcgtgtgctctcctctcctctcctccgatcgagcgcggggggggagggtgggaggtggccggctcggtgccactgcctctggagcaggcatggcggcgggctcgagagcatctcagcagacggcatgcgcgcggtggcaggcgcgcgacggtggccgcatgtggaaggtgatggtgaccggtcccaacctggatccggtggagacggaggcccccgcccggatttggcggcgcgggccgtcctccgccaggattagcgtggatccggcggcagggacggccggcgcggcggtggcggctgacgggcaggctcgcgcgcgggctggcgcggtggccggcgtgctgtggggaggtgtggcggtgccggccaatccggcgacagcgacgacgagggcgtcggtgtcggcttctaaggttagggtttcgtattttttggatttaatttttttcggttttttaattttgcgtgcagggtgcgccacccgcacgccaaaatagtgattttcgctgaccttttgctgcatgcgggttgccatgccgcacgcaaaaacctctttcggaccgcacggtaaatggtttttagtactgcacggcacgaactatttcatttaaaaattttaaacatttttcctttttttagaaaattagaaaaaaaaaactttcaaatttcagctcccgggtaaattaatttgtgcgtgccaacatagcatggtaattgtaacattgattggtagactgagtgatctagctcaataatacatataaatatatattttctaacaaatgcacgatgtaaaataactatcattattctcgacaaaggttattacttgactaggcaaaatgattttgatataaatttcttgctctgagaattcgccttcctgtaagggctattagctagcgatatggttttgcagtaccatgtgcaaataactcagtgcgggaaacaacaatacttctgatccctccattttactagattagttgtcgttctagctttatcataaatcaaacatttctatattacgccgtcaaattttaaaattttatgtagtttaacattccgtcaattagatattatgaaattatttctgaaattaaactacataaatttctaaaaattgaagatcggagatacaaagatctgacatagaacaaatctagaacattgagtaatttagaacagacggagtatcttaagaaaatgtgtcaacccttctgtacatgcggagtaagggatcctctgattcaaaggattggtatagggttttttaggattcacaatcctacggattttttttcatatgtatgcctttgattcgtaggaaatgaaagaaaacattccttagggttatatcccttacatgaaaataaggaagaggtctgtcgttcgcgccgttttcatgtgtttggcggtaaactgtgtgcccctttgcgcttcttgtgggaaaaaaaacagagggagatggaatgagaacaccaggggtcacatattagtatccaacaaaccaacagtgatagagatataaagtagtgtgagccgactgccggcggcgcaaggcagcaaaaccgccaattagcggtcagtcatgcgccctcccgcctacacggcacagccatgcggcacgcgcggagaggggggagggggggttgcgttgaaggcaacacgtgtcagttttctctagtttcttcgttgttttttctgattattttttagtttttctcgttttttctttttgtttgtttttctaatatgtatacataaatatacaaagtttatatacatgactttttttaaaaaaaattgtacgtataaattttgtatatacgtgtatatatcttgtatacatcaaatgagtatatgcataaaaaaatatatactttacatatatatactttacctatatatatatatacacacacacactttataagtttatacatacatatatacgtatagagatgagagagaggagaggctagagggggtcgaactgacgcgcatcctcacgcggctagttgcccatcagctgcccccgcaaggtggaggcgaggcttgccggctcaaagcttgggtaccttttatcttttcatgtgtttttattcccgcaggatgaaagaatcaaactacttcaggttctgttctttttctatcctacgaattaaagagacctaaagtattatccctccataccaaaagttcaaaaatcttacccccaaaagaagccaaaagtaataaagttgtattaacataacaaaacccgtcctcgatcgatcgattgaacggatggtggcagacgtacgacaaaattccggcaagacgagcagccgatccactgcgatcgatcgatcgatcgcccattggtcccggccggtcggttcatcaactactactgttgccgctcgctctgtgcatatgccctaccatgttctcttcctccacgtaacggcgccatgtctctgctagcttagcttgcgttgcctccatgtggattcaaatcattcagtacgcccaacgacaatccggaatcctcacgtcgcatctcatctctcatctttctttttctagctagcaagcagtagtaccatgtcccattgttttctttcttttttttttgaatgctatttcgttccctctcttgccggcagtagcttccaaatggaattcgaattaaagccaatccgttaacgatggcagatgcgtaatatcgttcgtgacccaagggcaaacaatctccgtctccctctataaatagccgcttgcaacacatcgccatggctcccccacacctcactagctcgaccaagccgatcccctctctcgatcactctcaactaattctctcaacctcagctgatcatcggagatggttcaccgggcggcggcggacggcgcgcggcggcggctgcggcggcagctgtcaatgccgggatcagggaggccgcagcagcagacgaaggaggcgtcggcagcgctggtgcggctgccgtgcaacaaggggaaggcgtcgcggttcaagcggagctgcttcagcgaggaggacgacgccgcgtccgtcgcgtgcgtcgtctgcgcgccgtccctccctctcattaattagttaattagtcatcactctctctctctctctctatgatctagttgattaattaatcagtcagtgaatcacacttggaggctactgtactcgctagtttgatcctcgcagctggtaatcttgtagtggcattaattaatgtgcgtgtgtgtttgtgtatgtgttgcggtaattaaatggtgatatatataattcgtcctgtccgtcgaatcctcgcccttttctatatttgacgttggtcagtcatgcaaggagtattattttgtcttcactagttaactttctccgtgacaaaaaattctcaaccaagaaagggataagacttctctggtaagatttgttatactatgagaggtcacattcttttttagattgattttttttttgactgagagggtatataaaaatgtacatgatggtgttaacttgaagcaagaggcaaatatggttttccattcaaaggaatatcatcccaagctaagtgcaagctagccagcgcagtacactggcgagtgggccatcctacgccggaattgagccggagtttggttgcctggaccgagataggcaagaaacaggattgccctggtttaggactttggcccaattagaggagaaaatgaataagacaatttttttttgtggaattcgcaatattcgaaatctctatctctactgttataaaaattaaagatatttttaccggtactttggtacgtcatccgtgtatgagtcggtttttaagttcgttcgcttttgaaaatacatgtccatatttgagtcagtttttaaattcgttcgtttttgaaaatacagaaggagtcgtataagaaatctctttaaaaaaactcgtatgcttatttgtaacgatcagactcctaaccacagctcatgatttaaaaaaaatacatcaaagcgaattgccacaatgaatttcaccttagttaaaccatttaacaataataaaattaaaatagccttcacccgttgcaacgcacgtgcattttttctagtagaaataaaatatttgtgaaatgtgtcaggtttaaacttccatgaaaaattatatttgttttgcagaaaatagaaggaactcttcataaataatgttagcatttcacaaacttaaatttatactatgatacagtggagccgacctaggattttgaggttgcccttcgacaactagatcgcaaaaccgattcaaaatccatagccgtattttttttacaactgaaagtctaatacttggcatgtgcaaattgccaaagtagatcatcaaacttgtgcggattggttaattagagaagagaggatggagcccggccggccggcataagaagatggatttatttgcttctttggttgaataggcttttttttcatacacaaacgaatcacatactccctccgtcttaaaaaaacgaatctataactagatgtgacatattctagttcagtgaatctggacagagatatgttcagattcgtagtactagaatgagtcatatccagtagtagattggttttttatgggacggagggagtatcgcatatactaattttttttataaaaaaccttaggtatacaatgatacctttggatctaattgggcaagcccctatgttacacaacattcatcgttcgttctagcttcaatttgtcggacggctggaacctacgaaatcacatttatctatatactcctatgcatctagttagtgtagtttatcatttcgcctatcttttgtcatgcaatattattagattaattatttatttatcatagcttctatcatttttcttaaccgtgttaataaagtggctgacctggcactactggaaaatcatttttttgtgactgccccacagatttcgtgatggcgatgtaaacacagtcaccaagaagacatatcatgacaggcattagaacaccatcacgaaattgggtgtttcgtgactaggaagagcagccagtcaccgagttatagagttggtgacggtgcagtaatataaagccctcaccatactgtgtgatggacttaaatgggccaagctgctctgcctctgtctgaaattgtgaaccactaaaaacagagtgctcttctcgttccccatggctcttgccctagtgagctccacgcctccacctcgacgccgcaactctgctcgtcgattcgtcgccggtagtgatgccggcgaaggagcccgtacattctcacctcaccgttggtcttgcctcccttgctctcctctctgacgggcgtgccgccgctgctctcctcacggtgggtttcgccgccgtccccgtgtcttgtccgtgggtcgcgtcaccattgctcttctcgccgtgaggtgcgcgatcgctactctacactccagcgacctgccttctcctctatgctctcaatccttccaccagaaatagttccctctgttttttccatagggtgacacataggtgttcgatgaaatgccaatgcagcgatttttggttgaatttatgtctgaggcttttaaaccagtaatttgtcacaatgcttttattagatggatgcaaaaattctcagatttcattagatagtggtattaggataatttatgataaacaattatggatagtttactgaccttggtttttgtacactagctttttggttccttacaacagtgagatattttacaagctgcatttttcatgtgtttgcatcctctgaattggattttaattcatagtaaaatattaaggcaagttgtttaatgttcatctcaattataaacatttgtgttccctttcctgtatatgtagataatgcacaaatattgttctactacttgcaggtgtactgaaattatacttcatttttctcgtatacttgtcagtgttgtgtacttttgaaaaaatcagctaacttttagttaaaattccatattgtttgttagagttctaaattcttctaattttacactttataggatcctacagcgagtttactgcagatcaatgacatcacctgaagtatctgttgaacatccacaaggtaaaactgaagaatcatttgttcttttcattttacttgtcaccatgcaagtgttttctgaattattttctgttcttttcttgttacctgctatcatgcaagtgttgttgtcactgtctaactctatgcagatgtttaggaggagttggatagcttatagatgcagttaccattgtgcctacacagctactagatgtaatgcattgtgggaattagattaattctgaacttctgcagtccattcttaagttctatatagtttactgcctgtgcaacgcataatgtggttttaatgatttgttgctagtaaatagtggaacaggacatctttaatatgccttggaagtaatatcttttcgcttttccaaaaatactatggttaattacttgttgtgtcatatctttaatatgttttcctttcatttctaaagatggcttttaaatctaatgtagactgttctaatcagtctgaagaatgggacacagaggaagactgctgtttttgatgcatcagaactagaattttggtgagtcatttttatatttatcatactcatttatatgctaccattaattggtcataattgatttgatactagtcatcttatgccaaaatgaccagctttgtatttaagaaactagaacatactgaaggtacctaatggcttgcaagatttaaggaaattgtctctgtttcttaaagatgtcctgaaacttaacacatacaaatgtgctcccttgttatctgaagctacatggcatgcttgcgttctttgatctagaaattatttttcctagatatctgaagctacatggtatacatgtattcattttatcttagatgctgaaactctgcacagaaatgtgcttatccagttatctgacagctgcctggcgtgtgttctttttatcttggattcattattgaacctaaacatggcaaaaatattggagcatttgctaaaggtccaagaaaactattgtaattttgcatggctctaatgacttcattccagtacagtgttttaatcggtatgcatgataagagcaatttaccgatgattcatctacttgattacctcatgtgattaatctgattcaagctttttataggcttttttacggtgttgactagtgatttcatttgaatttggagctattcagtaataatattagctaataactaaattgtagcttgctgtaatcttcaagtgacattcattgaattttaaggcaacaatttcaagtccagtgatacagttcaactcaatttgatgattcactttgatgtactaatttgttttgaagaaactttcctaatatattatatcatatcttgtagataattgtagaattgttcttttatggaaagctcagaagacttccttttttcacgtggagcttgctttatgagtggccaccgaaggctgcttccctctattctatggcattatattgggcttgtcacttcaagaattgttggactgatacaagacttgtgtagaaatttgtagtgcataattaaatattgtttttctatgaattatgtaaggactcacgatgttcaatgctaatatatgcttttgtgagtttgaatttggacttgggtaaaataagtgattttgttgtattatatctgaactcactttgtagcatatgagattgatttacatgaattttcatattaattacgtgcacatcgcgtgtctcgtgacagccacccagtcacgaaaggtatttcctaatggcaaaagtctgtcaagaaattgatgttctgtgacagctaccaccttcacgaaaaagtattcccaacggttaatcaaaactgttagaaaaatggtcaaaacatgcaaattgggggaattgctttttcgtgactgcttgacagtcacttaacagcttgtgactgcttcccctcaccaaatattagatttcgtgactaatcaagcgtgactgacattttgtgacagtatgtggtaaccaaagatctttgtgacaggcttttgacttttcgtgagagtgaggggcagtcacgaaaaatccattctcttgtagtgtggtcataggattaatccatatgcatgtagtaattgagtgagaaaaaacaagaaaaacctgaaaattggtaaaagataaataaattattagacttctgcatcatgaatccataatactaactttaaaggtgcaagtgggttcaggggtcgatcaacgtgcacccttaaataacttaattagaaaataaaaaaaacctaaaaaagtagaaatttttcttatgcaatcagcagcatcaggaggcaggagcagtggtggtagtacctccaattcgatcaagttgttgtgttcttgtggttggattattcggtttttaaggggagttgtttctttttttctggtctgatgaagctgcgcggtcgctggtaatgataagctcaggtagctgcggaagaagaagaggggtcgctagattggccggaggttggttccgcggcggcgcagtcggccagactgggttggtgctcggtggggctagctctagatggccataaggcccgaagctcaacggccggcccacggtatggtattttggcccggtccaagcacgacacggcatgatcgggctggcacggcacgatgggccagcaggctaggcccgacacacaaagaatagggagcaaacatagacatattatatgccatggttcagagaataaggacgtgaaatagacttattttatatatatatatatatatatatatatatatgtcagcccaaagaggagagagaaaaaatagactattttagctatagatatgtcacaacccaacgaggagggaagaaaaatagacttatttaaaaaagacacgatgggccacccgtgctttcgggccggcacggcacggttcgactgctggtgggctgtgcctaggccaaaggtgcagcccatgggctggcacggcccggcacgaagtgccgactgggccgtgctggcccgatggccggtgggccgtgcctaggccgggctgtgccgggcgggccttacggccatctatagggctagcatgtgttcgttaggtgagacgttgtcaccggagcaacaaggaggcgccatagagggcctcgccactgacctggccgcagcgatgcgcccattctcgatgatcccacatcagtattgatcggtttcggttgtcgacgttggtgccgctgtcggacgcctagtcggctatccactagcatggcagcaccacgaagcgttccatgcattcggcggtgcctgtgcagcgttcaacggtggcagtggaggatggccaggggctctccctctcgatctcgccgtcactgcagtagctggagatggcgaagcaggcggaggggctacgagtccgatacggcgtgctctacatcaactagcaggagcaatagcaattagcaggaaaaaggcagcggcagcggtgtcggtgcagaagctccgaatggcattgcacggccaggagatcgctaggcggctgcgcgcggggaggagtcaccggccgcagcacgcacggggaggagctctttgatcgcgggctcctgctgcctggcatgcacgatagatggaaaagagtagggatggcagtttaacccgtttgtccgtttacccgtggataaaaatcctaatagagttgggtttgttctccatttagtacccatgggttttttattgggtcaaaacctatacctaacgggcatacgagcacgggcataggtagtcgctactcatgcctgcttcgctcgtttacccgcaaaaaccaactgacatgtggtcccttagtcaaattagtataaatgccaccatctagtattgatgaacttgtaatgcttgtattgttgaacttggtacaactgtaccctttctttaaattgtgataatgtctctctgcttgtggagatttgtggttgaaatgttgaactgtagtttgtgacgggtaaacgggcatgcccgtgggcacatggcgcctgtgggcaacgggcatgggtagtgttccttgctcgtcatatagtaacgggtatacccgcgggcatgaattacctcgcgggcatggatatgggtagtcactacccgtgcccgtcgtacccgactgccatccctagaaaagagagaggtgagtaaaaagagaaaaaaaaagattatgactaacaagtggggttgttatttttgttattttttcttactgatatgtgggtcccacgagcaccagttaggataaaactgctattcaaacaaccgagggactcgatttgctctgattttcaaatatagaagatgcgttagatctggtattgtggttgagggaagcaattcaagcagggacaagaggtgagggaggtctaacatacttatcctcacacaataacatggacatgggcctggcttcatcggatggcccacagagacgtggatccagttggtgttggtggtctgcatgcttgtcttgcctatgctggtgttggaggttgcacgcaagctgcttgcaagttgcgaaccatcatccaacaacttatatagtttaacatcatactaaatttctttagattcacatgaaaaatactttcgcaatatgtaattcacatcttatcaaactatacaaattcaagaaaatgatgttaatgtttaaccggcaaacccacatcgcaagtaatttatttgaaatggagggagcattagctcgtcttaatccaatattgtatctccaataattaaataccttaatgtagaagacgcatatgcatccatattaattatgaaccgcaccgctgtctatcttgttttgagtttgctccatctatccgttccaaaatataacaaaatataataatttttagcacattattcatagtattcaatcacatctcatatactttaatttcttcctattttaccccatctattccatatttgctgagagaaagacttttttttcttaatctcaatatttgctaaataatcttgtcatccttgtatttcaaaacagatttgagtattttggtaggagaaccctacaaattgtctatcattgacctaggaataattgttctatgtaccttgggggctagtttggttatgatctttggtgaaaaatctgcattgcatacatttagctcatcggtcatctccgccatatatatataccgatgtttcaacacgaggctacttaactttatcacaaaatattgtatttcatataaaattatattaacatcagggcatgtggtgccgtactatgctattcctattattttttttattgaaatatactattcctacagcatgtacaacggtaattagtgtgctagtccatagcatgtcagttgatgtggaggaaagaggatgggaggagtgagcaagaagtactcctggacaagtgatcttttgccggatcatgtaaaaatcacattagtctggtttcaaataggaaccagcactaaagatcagctttagtcctggttcaaaagcccaatggcactttatgatctttagtcacggttgtcccaatacaataactgtcaggctatgtcaggtccctaacgatctttagtccttgttgatatcaccaaccgggactaaatatctctctcccatgtccttatcctttctctcccacgcctccctcgatctcccacatgtcctacacgtccttatcctctcttgcctctatctctctctctctcacctcgcctctctctaactctctctctctctcgctctctcgagaagtggcagcggcggccgagcggcagaagcggcggtctcgccctcccctatgctagatccggcgggaggggaggcagcgggatgggaggctgtgcggcggtggagcgacaacggctcaacgacgtcagcacggccgtgcggtagacggaggaagaagttcagtctttttttaatttttcgagattttgtgatgtattttttttgagaatttgtgatgtgaatatgtaaacttgtgatgtatttgatctgtggtgtgaatctgtgatgttatctgtgaatctatgatatgaggatgtagggagcaactcgatttggggaaatcaatatgcaagcagtaaaaacaatgaacaaaagaaaaaaccgggactaaagaccacttgctgagcagtgaagggtcgcgtcggctgaagaaaacatatgctagaaaaaattgagatggaggaggaacaaataaagttaaaataatgaaaagttagaataattgctactagttaaatattgttttaaacattatttaacagttgtactagatttggatgggctcgcataaccaccttccaacggctgtccaactaatcccatttttccccctgtgttatgtcctcaaaagcaaaacttatagaggggggcaaaattattaatagcaatacatatttcacctatcctctactccacatgaatataataccccctcccccccccctctcaactactgtaccattgcatatccctcttcatctcttctagcattcctctttctcccaacttctactagaccctcttcatctattataggatgaaattgaacatgatctgcaatatcggtatatgtttgattcctgtatgattagaaatgagcagtatcaggagaacataaactcagcttagcatgacttctcgatggatcatctgagctccgagaaggcccaaatgagcacaaggtcagagcgacgtctgtttaactcgcaccctggtcctcaaattcttttggtagctccatggtacggcagtttatctgggaggacagtgggaagctaaaagctcataggccggttgaacgttgcagacagtacggtcttttcatgaggtagaaatggaaataattaattatttaccactattacaagtggtgataaaagatttgtcacgggacctacaagtcatagacatcaagtgataaatttaattaccacatctttaatgtggtaaaaagttaaatgtccctacaacaacaaatgggtcttagaaaaaaaatcacagcctggtcttgtactcctgtccaacagtgcaggctatagactggaaattaacatcagattgggggtgccttatccactgactttggctgtgtgcctcctagcagagaccagagatataaaccattttcattatctaagaagtgattagtaactatgcgtccttattatatattgaggtgtggttgcccgaacggtcgcgccaaattctatacttcctccgttttataatgtaagtcattctagcaatgttcatattataaatgtttagatttattaacatctatataaacgtgaacaatactaaaatgacttacattatgaaacggagggagtactactcagttcgatctgcatgttgcaatgtggccaaatgccgtatgtaacattcagttgaattaggcatctctccaaagtagttaagaacattcagaacgtaaagataattatgttatgaatgtaatccagattcgaatctgtaacatgaatgatatagttgttattgggttgtgagaaatgctataagagtagctagatttagacacacacatgcatgccagacatcgattatccacagcagttgacatttttggtagtcattataatttcattaagaaaatgtaatatgttctgataaatcaaattaagaggattgatcaaggaaagaaaaaaacaggagatggacagcatggtaacatcaatcacgtggtgacgccgtggtgaagccagatagtggtttctgataacggagcaatcaaacaaaacaattgctaaatcgaagttacccattttcatgtgattttgtcacagcattgaataaccgaactgaacaccacactaattaattacgtgcctatactactccctccatctatttttgatagtcatatttcatcttagtacacagaacaaggataagcaattctacttatcatccatttaaacatactactagtcatttctcgtaaacaagcgattcattaatatttacatttctcaatacctatgtagccaatcttgtgtggaatagtgaagagtcatttattaattccgagaaagtcattaaaatgataggttgttggattgaaatatgactatcaaaaaataaatttttcagatttggaaatataactatcaagactagatggagaaagtatatggctagtgggatcaagagcctgattaattattgtatttaatgaaaagttatatatatttcattgctattcaatgttacgtgtggttaggtggctgtctgatatattccctccgttttttaagcacattgattttttaagcacatgtttgacactattgatttttttaagcacatgtttgaccattcgtattattaaaaaacttttgtgaaatatataaaactatatgtatacataaaaatatatttaacagtaaatcaaatgataaaaaataattaataattatttgaataagacgaacggtcaaacatgttaaaaaaattaatagctacaaatatttacaaatagagggagtatttgatactccttttattactctcatgcttgtcatgatcagatctgaactttgctatatatcaaacccttccattgtcctcagttaccttcagtttggctaaatataccctttggctgcaaaatggcagaggaacaattttgggagatgattttttttttaaatgcagtcttcatgaacatccccattggatgggaaaacataaacaatatcctcgctttggaatgagtggcatcagtaattcagaattacaataggctagtgtaaccttctgggattgaacatggggagaaggtcgcccagcatgtagttcgctaaactctataactgcattctacctattcagagagtgttctattgcccattgaagctagaactataaaacattgacccctatacaggaagaaccctggtaactgcactgtagtgaatagcaaaattcagagagagcaaaaacagagttaattttcaatggaaaggcggagagaacttttggggcaattctctgtattatttctctagaattcataatgggtactccacaaagcaaaacctagctatttaacactgccaagtctttatctcgtgccaactgacgatccccaattctcgacaaaacacacaccacacctcacagactcacacacgcacatgccgccctcgcacaatcactagggcggcacccaccgtgcctatcacatcgcctaacaaaaaccgaaacggatattattctccaaccgtgcaagctacaccagtggcagctttgggatcaacccgggattagctagtgtaggcaacaacccctagatagagcaaaatataccaacgataatccttaggatcggaggggggggggtgcagcgaaaatggggcaccccccgacgcgtgggcgcgcgcccgtagggccccaccacgtctcccctgccatactgtcacgtgtccccaccatgcaggacgttgcaacaaatcacccacttattttgaaaaccctcaattaagggaattcgttttattttttgttccactaaaaatgtttcatctagtgcaatcacaatgtttcactatatatagatctaatattgcagtgaactgaaacattctttcgctatttgctgaaatattgtttttatataaagtgaaacaacacccgatttaaacgatcgaaacattttcgatctacttagtgaaacaattccgatatacttggtggaacaacgtgcaacatttaaaaataattcaataataagctaaaatttttttcgtcgaaatatatccatatgttgtcttgttttgaagatttaattaaaatgaatttaatggtgtaatcggatcatgatttggataaataatttaagagaaaaaataatttaaagtggttttgcacacatgcatcttgctgacatcaccgctcgatttttctactcctccatcagacgcccgatgtctaggctcctccatataccatagcaagcacataaaatcagttgtgcctctacaactgtatctttaattatataattgttttcaaaaagattggtgaaaaatgtactgagtcattccatccatgtaacaaatgaatatataaaatcgtccgggctg

SEQ ID NO: 20911 - DNA, 9481 bp, Oryza sativa
attcctgcagcccgctagggacgagtgcttggaggctctcgtcctgacgggatggggcgaggcgtgcgtcagaccgcctgtcgccacctaacccacgatttgaccggtctgtgactgatcacagaccggataaacgagcgcgctgcactgcgttacatgcggcgtgacgcactcgtccaaaccgcaataaatgtggttaggtgagccccgctatgctcacctaccccatatacgcggcgcaacacccacaaggggtcggggcgcctcggccctcggggctgagacgggagcggtccgacccctcggggagacaaagagaagggcggccgtatcaccctcgggcccgaccccccccccccccgagggggttaggccacgtgggtgatcgtatctgcctcaagtctctaagtcatgatactctcggtcccatgtcaccgacagtagcccccggcgttatgccagggcgatcgccctcctcgagggaagcggtcgggcgtgacgccacttcctaaggcctggtgacaggtgggaccggtctccacagttgggcagaaacccaacggtcgcaaatcacgcacatcggcaatggttactcggctgtcaataatgagcggtctcttcaagactgccacattactcgagtaacacgcgaatcgggacgagccggttcgtttttcctggagatatgatgatggcgcttcggtcggcgagcgtaattaacgcgcgcacgagatgttccatctcgactgccacagccgcatatccacctcatgcaccgcaaacgggcgaatgggattagtggaagtgtgggcgcgagaaacgagggggcagatagagggcgcgagaaacgaggagccgggcatagcgttggcaagggtataaagtcaccgaggaagagatttgcttccttcttttcgccattattccccttgtcttcgccgcttgcgccctgactccttgtttcctgtgccctaccttcgccacacgcgctcgctctcaaacatctcttcttccggcgtcatggtagcgtgctgccgccttcccgcatcgtgagcgagagacaagccgggctgccgcgccgcttcatgccggaatctgccaccggccgggagatagtctcgctgggcgagggatgcccggcgccacgctacccggggcggtccgtcttcttcctcccttttgctatggcagggctggttccgctattttcttctttcttcatggatgttctggagttttacgatctccagatggcgcacctcacccccaacgcggtaatgacattggccatcttcgcgcacctgtgcgagatgttcatcggggtgcgcccatcccttcggctgttccggtggttcttcaccgtacagccggtgtcgccgccgtcggtggttggtggttgctacttccagccgcgggggccggtgctgaaccgctacattccctgcgtccttcgcaagaagtgggatgactggaagagcgactggttctacacccccctcgccgacgaagcgcgcctccgacttccgagccagcccccagcgcaggcctccaactggcggacgccggtagatctgggagatggctacgacgccgttctcgaccgcctggcgggcctgcgatcccaggggctcacaggggccatggtgttcggcgactatcttcgtcgccggatcgcgccactccagcggcgcgcccagggcgcctgggagtacaccgggtccgaggactgtatgaggacccaccagggggtcagatgggactgggctcctgaggacttcaagaaagtggtccaacgggtgctgaatctcagctccgtggaggcatccctcattcctcaaggagtcctccccctctgctgcgatgcagaccgcgcctccatcctgaccatcatgcaggcggtcggggcgtcggaggagcgggctcctcgaggccacgatggcgcgggcgggagccgcaggggggaacaatctaccctgggagggggtcgtgcttctgggccctgcgtcgggggcccggggatcggccgccctgccgacgcccgggggaagaggaagtaggaaggaacccctcccccatctcctccccgagggggcggggcggcgcgtgccagcagcaggcgcccggagggggccacgccgacgtcgcagcccgagggggagcggaagaagaaacggccccgcaagatggggggggacagaaccatcccggggaaacctcatttcccctccaaggtggtcgtttaaccgaccccctcgcaggttcgtcccacgcccatcgtggccgtattcattccttcaatgcgagttttcactcatccatcttgtttgtcttctggtctttcttctgtttcagcgagatcccgtcgcgtccctcccgctattccaagtccagccagtctgaggccgaggacccggcgaccacagaggcccggaggcgggaatctgaccggcgagaagccgcggatcgccttcgggaagccgaggaggctgctcgggaggccgcccgggctcgccagaccgaggaagccgttcgggaggaggccggactccgccaggccgaggcgacgacatcctccgaggcgacccgtgaaactgaccggcaagaggccgcggatcgccttcgagaagccgaggaagctgcccaggtggccgtccgagctcgccaagctgaagaagccgctcgggaggaggccagacttcgccaggccgaggcggcgacgacttccgaggcagctcgcgacgaggccgcgggcgcatcgcttgggcccaatccctcgggcgacactcaggacaagcccggtccgggggacatccctgagtctggcacgtccatcggcgggccgagccgcgcggcatcctcaccgaggcggctcttccccacaccttccgttgctccactgagcgcagaaccccttctgcaggccttggccgtcgcaaacaccacggtgttggacgggttaagtgcccaggtggaggccctgcaagcagagcgggcggagctcgacgccgcatgggcgcgtgtcgaagaggggcgacgctcggtagaggccatggtggaggtgggccgcaaggcacaccgccggcacgtctcagagctcgaagcccgtcggaaggtgctgggggagatcgccaaggaggtggaggaggagcggagggctgccctcattgccaccaccgtgatgaacgaggcgcaggacaccctccgccttcaatacgggagctgggaggcggagctagggaaaaagctcgacgccgcccggggggtccttgacgctgccgctgcccgagaacggcgggcggcggagaccgaggtggcatcccggcggcgcgaagaagcccttgaggcccgtgccatggcgctggaagagcgtgcctgcgccgtggagagggacctggcggatcgcgaggccgctgttgctattcgggaggtcacactggcggtgcacgaagccgcctgtgcggaagaatagtccgcgctcaccgagcgggagcgagctctcgaggaggccgacgccgcggcgcaatggctggcggacagcctgtccctccgcgaggctgcgcaagaggaacaagcgcgtcgcaatctggaaagtgcctgcgccgagagggccgcactgaaccagcgggccgctgaactcgaggcgcaggcaagggagctggatgcaagggcgcgtagcggcggggcggccacgagcgacagcgacttaaccgcccgcctcgcagctgccgaacacaccatcgccgatctgcagggcgcgctagactcgtccgccggggaggtcgaggccctccgcttggcaggcgaggtagggcccggcatgcttcgggacgccgtctcccgtctagaccgcgccggccggcaggtgggcctctgggcgggcggactgtgaagtacgccgccaaccaggggggcctcgcccagcgcctctcggagatagccgggactctccaacggctcgccgaggagcttgagaggacgattaagtcatcctcgagggacctcgcccgaggagcggtggagctcatactggcgagttaccaagccagggatcccgacttctccccatggacggcgctggacgagttccctcccgggaccgaggatggcgcgcgcgcgcaggtccgggacgccgccgaccatatcgtccacagcttcgagggttcgacccctcggctcgcgttcgccttcaactccgacgaggaggacgatgacggcggagtgggcgacagtggcgacgaggctggcgacccgggtgcatcggagtgagcccccaggcccccgccaatctttaaatagtttcttcttttcttcttccgaggccttcgggcccccttcttgtatagactaatttaatctgcaatcaaataaagaggaaattttttgtgtcaattctatttgttgtgtgtatgagacaaggatgtctgtgccacggtccttttgtgtcttggcttgaacaagggctcgtgcccaggtcctagtcctcaaatggctcgggtcggggctagtgcctggggagatccacatgtcgagactggccaggccgggagcgtggtgaccgagggttatgggtgacccgattgtgggtttttgctgattcccccccggagttcactacgccccggggcacggctcggttctgggccccgtttggcgattttagccgacccgagcccccgagggcaggattgaacacgagtgacctatttcaagtcaagatccttcaaaaggaaacaacagcacagatacagcctttaggaaatcgaaaatgcttttattgaaatacagatataagagaaataagaatatgcatatgtggtagcccccgaccgaccctgcacacccgaggggggtgcggggttggcccgagcccgaaacctgacacccgattcccctttaggggtagaagcgacgaaggtgttcgatgttccacgggttaggcagctctgtgccgtcacccgtggccagccgaacagagcccggccgggggacgccgatcactcgatacggaccctcccacattggtgacagcttgctcaatccagcacgcgtttggacgcggcgtaggacgaggtcgtcgacgcagagtgatcgggcccggacgtggcgctgatggtagcgccgcaggctctgctggtagcgtgcggctcggagggccgcgcgtcgccttcgctcttccaagtaatcgaggtcatctctgcgaagctgatcttgatcagcctcgcagtacatggtggcccgaggggacttcagggtgagctcggatgggagaaccgcttccgcgccgtagacgaggaagaaaggcgtttccccggttgctcggcttggcgtggttcggttcgcccagagcaccgctggcaactcctcgatccacgaatcgccgtgcttcttgaggatgttgaaggtcttggttttaaggcctctgaggatttccacattggcgcgctccacttggccgttgcttctggggtgggcaggtgaggcgaagcagagcttgatgcccatgtcttcgcagtaatcgccgaaaagttcactagtgaattgggtgccgttatccgtaataatacggttaggcactccaaaccgggctgtgatgcccttaatgaatttaagtgcggagtgcttatcgatcttgacgaccggataagcctcgggccacttagtgaacttgtcgatcgcgacatacagatactcaaacccgcccggggcccgcctaaacggtcccaggatatcgagcccccagacagaaaatggccatgaaagtggtatgatctgcagggcctgggccggctgatggatttgcttggcgtggaattgacacgctctgtatcgccggaccaggtcgaccgcatcattgagagctgtcggccaatagaaaccttgtcgaaaggctttgccaaccaaggtgcgcgaggcggagtgggctccgcattcgccttcatggatatcggcaagaagctcgacgccttgttcccgaggaatgcacttcaggaggattccgttagccgcgtgccgatagagggtcccttctaccagcacgtagcgtttggagatgcgctggacgcgttcactcctttcgcggtcctcgggtagagtcttatctgtgaggtatgcttggatctcagcgatccaagcaatcaatctaagggagctgggagtgctcccctcgggtcccgaggcctggactccgacgggcctcggtggcctgtcaggcgcgtccgtctcccctaaggggtcgggtcgcgccgatggctgggcaagcctttcttcaaaggcgcccggtggggtctgggctcgcgaggaagcgagccgtgagagttcgtcggcaaccgtgttatcccgtctgggcacgtgccgaagctctatcccgtcaaaatggcgctccatacgccgtacttggcgcacgtaagcgtccatctgcgggtcagagcaccggtactccttacagacctggttaacgaccagctgggagtcgcctaacaccaggaggcggcggatccccagtccagctgccaccctgagtcccgcaaggagtccctcgtactctgccatattattggtcgcccgaaagtcaaggcgaaccaaatatctgaggacgtctccgctcggcgaggtcaacgtaacccccgcaccggcgccctgaagagacagggagccgtcgaactgcatcacccaatgggcggtgtgaggcagctgcggggggcccgagctggcctcggggactgagacgggctcgggagctggggtccactctgccacaaaatcggcgagggcctggctcttgatagcgtggcgtggttcaaagtgcaaatcaaactcagaaagttcgattgcccatttcaccacccgtccagtaccctctcgattttgcaagatttggccgagggggtaagacgtaaccaccgtgacccgatgcgccaggaaataatggcgcagttcctcgaagccatcagaatagcgtaaagcatcttctgggcctgagggtatcgggtcttggcgtcccggagggcctcactaacaaagtagacgggccgctgcacttttcggtggggccgatcctcttcgctaggggccacatccctggggcgctctttgtccaagcggcctcgcggggtgcactcgtcttctgtgccgacgacctcggggtcggaggacgacaggggtggccttcccacagtggcctcggggccgtcctgggggtcgggggttcctggcgtcgtcggacaagcgggcaaagggccaactccggtcgtcaggggccttaggccaccgttcggctcgggggcctcttctccctgctctctcccgggtcgaatcggcacagggttagcctcggggtcagagggcgataggtgcggccttcccgcagtggccctcgggccatcctgggggtcgggggcacctggcaccgtctgacaagcgggcacagggcctgctccggtcgtcgggggccttgggccaccgttcggcttgggggcctctcctccctgctctctcccgggccaagccagcacagggtgggggtgcgcggaatgaggattgtcctcatcgcgctccacaaccaacgccgcactaaccacttgcggggtcgccgctaagtagagtagcaagggttcatttggctccggggcgaccagaactgggggagagctgagatacgccttcaactgagtgagagcacgttcagcttcctccgtccaagtaaacggcccggagcgtttgaggagcttaaacaagggtagcgccttctctcccagtctcgatatgaaccgacttagggcggccatgcaaccggtgacgcattgcacatccctaagtttgctgggggggcgcatccgctctatagctcgtatcttctcggggttggcctcgatgcctcgggcagagaccaaaaacccgagaagcttgcccgcaggtacaccaaacacacacttatcggggttcagttttatgcgggcggagcggagactctcaaaagtttccgctagatccgagagtaaggtctcttggttgcgcgtctttagaaccaagtcatcgacataagcctcaacattacgtcctatttggctacccaaagaaattcgagtagtacgttgaaaagtaggacctgcattctttaacccgaagggcattgtcgtataacaataagttcctatgggggtaatgaatgcagttttttcctcatcctccctagccatgcgaatctgatggtaactagagtatgcatctagaaaacacaaaaggtcgcaccccgctgtggagtcgacaatctgatctatgcgaggcagggggtaagtgtccttaggacatgccttgttaaggtcggtgtagtcgatgcacatccgaagcttgccgttcgccttgggaacgaccaccgggttcgccagccactccggatggatgacctcacggatgaatccggcctccagaagtcgcgccacctcctcgcggatgaaggcttgacgttccggggcctgccgccgtactttctgccggaccggccttgcgcccgaccgcacggcgagacggtgctcaatcacctccctggggaccccgggcatatccgccggtctccatgcgaagacgtcagcgtttgcccgcaggaaagagacgagcgcgtcttcctatttgccgtccagaagaccaccgatccgtgtggtcttggacgggccgtcgcccagggcaacctccttgaccaggacctcgtcgcatgtgactatccgctgcctcggggcggcgggggcggatgtgctaagcctctcgtcgccaccctccggcttggacgcggcggcgaggtggtccgcacgctgctccatacaagcaagcgcgactttgaggtcgccatggacagagatggggccaccggggcccggcatcttcatctggaggtaggcgtagtggaccgccgccatgaacttcaccaacacgggcctccctaagaccgcgttgtagggcagattgaggtccgccacatcaaagttcacccgctccgtgcggaagttggcggatccaccgaaggtgaccgggaggtcgatatgacctagcggccaagtgtgccccggcgtcacaccgataatcggctgggacggccggagcatcatccccggggccttgatggcgtcaaaggctgcgggggaaaggatgttgagggctgctcctccatcaatgaggacacgccccagctttacgttgcaaacagtgggggaaaccaccattgcgatctgtccttcccgggcaacgcacggtgggtggtcggtctggtcgaaggtgagggcaacctccgaccaccgcgcccggcgcgtcgcctcatgagtaggggccgcggccagaagctctcgcttcatggccttgaggctccggcgagaaacgtgagcacacgctcccccatcgacagtggcaatggtggccccaggctcttggaaacctaggtcatatcgccgtcatcgatgtcctcggcgggggccttctgcttgtcctcacttcg

SEQ ID NO: 20912 - DNA, 12895 bp, Oryza sativa
aggtccatgcctcctccttacgagccactcggtccgcgagctgaaaaagctccgcggtagtctggggctctttggaggcgatcttttcaagcatgcggttgtgccgcacaccccccctgaacgcgtagatcaccgcgtgtgcagggatgcatggaatggtgttgcggacttgacagaactgctgaatgtatgagcgaagtgactcatcatcccttcgctggactgcatgcaggtccgcttcttcacctgggcgcggatatgtgccttgaaagttcatggtgaactgttggcacaaatcctcccaggagtggaccaacgcgggtggcaagttcattagccaaccccgcgcctgtcccttcagggccatgggaaagaaattcgccatgaccctgtcatcacccccggcggcttcgatcccggtcgtgtagacctggagaaactcggcggggttgacgctcccatcatatttttcggcgatggtgggccggaaccttgggggccaacggacattccgaaggctcgccacaaaggctctacagccgacaccaccaaccgggggcacggagggctgatccccgcgtccgtgttgaggtgacactccggacgaggaggcgccctctgttgcgtggggagcacgccgaccattacgtcggcgctcgatatcgatgcgggcatctggccccccacgctgatcttcctgggtcggaggcgctgacgaaggagtgacggccgaatggcgagcaacagccgccgctcgccgcgccctccgccttgacgacacggagccggtggtagcagcgccggaggtcttggtggcggaggaccgcccaccagcacctaggcgctgccgtgccgtcatgaccaagttggccacgtcgtccagccaacgttgggctggagactccgggtcagggacaacgggcgggtgacgtaggagcgcgcccgcagctcggagcgcgccctggggcgtgctgccgtcgccatagacgaggaggcgacgctccccatctcggcgcccttctccatcacccgtggatgtcgaagtcgcggatccttcgaccctctcgagcgcctcctcctgcctaggactttggcgtggagggggcggtggagtacgagctcgacggcgtgggtttggctccccgtcgtcaccgctaacactcggagagaggttgtgcgcttttgcttgttcagccattgggctgaacagaaaaagcttggcgcacacgaaagagtgtgagagcttagaagaacacacgcagagtcccctacctggcgcgccagatgacggagcttggggctcctcaccgggagaccgcgcaggccccccctttgccggttcggccgggggccctgggtgaggttctaaactccttgtctgtgtgtggaaggttcgcgagaatggaaaaagcacaagacacgggcgatgtatacaggttcgggccgctgagaagcgtaataccctactcctgtgttttggtggatctgtgtatgaagaagctacaaagtgcgggccagcccccgatcgttctgggatcgttttttcccctcccctcttctaagtgggcaaggtcctccttttatatctcaaggggataccacatgcaccatctctccctctctttcttttgtggggacttatcctatcttttcataaacagacggagacttgtatggttgccgtccgaatgaccttctgatgggacggcccacacctacctccacttccgccagaagcaggcgcaacgtgggaacatggctgtctgcagacgacatgaccagtgtcagaccggtcacaaatcggtcattcttgtccaccacgcgttagtttatcaatctgcatgttcgcccctcttcatacaatgtcttgcttgtaatggttaggatgaagcctggcatatatctgaccggaaccaatgtgccatctctaggagctaacacgccggctccggctagggacgagtgcttggaggctctcgtcctgacgggatggggcgaggcgtgcgtcagaccgcctgtcgccacctaacccacgatttgactggtctgtgactgatcacagaccggataaacgagcgcgctgcactgcgttacatgcggcgtgacgcgctcgtccaaaccgcaataaatgtggttaggtgagccccgctatgctcacctaccccatatacgcggcgcaacacccacaaggggtcggggcgcctcggccctcggggctgagacgggagcggtccgacccctcggggagacaaagagaagggcggccgtatcaccctcgggcccgacccccccccccccgagagggttaggccacgtgggtgatcgtgtctgcctcaagtctctaagtcatgatactcccggtcccatgtcaccgacaactgtagcaccacattattaacttatggcgtaattaggttcaaaatattcgtctcataatttacatacaaactgtgcaattggtttttttcgtccatatttaatgctccatatatgtgttaaaacatttggtgtgacaaaaaagttgaaagtttgaaaacagacccaagttacgaacccaaagggtaagcttgtcttttataaatgcttttttctccatttaaccgaataataataaaataatgatgatggtgtcccctaataaattaccaggtttttagagtgtccacgaaccttgtcacgtttttcggatgcccaggagcaaagaccttaatctttgagtgttccgtagcaaattttgttttttttacacaaacattatgaaattggttgttgcggtggtggcagatttaccacacaacctcgccatttgatatgttgagttatgaaccaaattcagttgcaattaataaatgctagcttctgctggagtttaagctttgctcaaacttaattggtatagtggtttagcccaagaggcaatataaaaatattaattgcgggagacattgaagtaacaattgatgaaaagtacataatatgcaccattccaaatttgcatgtacagacttgcatatatactttctctgttattaattagtgtgcagtgcagattgaaatcaggaatggaaaaaacaggggatgaacctaaaatttgttgctatgaaattcaggatcatatataacgttcgctgattgccattactcgagcaaaaaggggaagctataaggcagggatgcccaaatttggcataatcatcactataaatctacaatggaatgcccaaagttggcattgtcacccgaggaagtggtgaattctgatagtgggttctgataagaaagcaatcgaagaataccagtttttaaaagttgcacattttcatgtgatctgattacagaattatttgaagacccgaagcacaggcatcatgctgattactactacatccctgttccattttgaacaaggttgacgtgaaataattataacttttgactatcagaataatcatcttggagacaataaacacacgatttgtatataagtcttagaaagtactttaagaaaaaaaatatttacttattttttatatattataatataaactcagagttaaaatatgttttagagatcgtgtacatttttgttcaattattgaaaatgtcaactgaaccggagggagtatgtacctagctatgtatatacctattgggatgaagagccttaattatgttttatgttttaaagaaaatgttgttgacgtataagccccattcatcactccatggacactgcaatagtgtggctgagccattactctcacctctggtttaagatatatacatatgaactcctctcaatcattgctcagttccctttcaatttgcctataatagcatgtgtctaatcccatactgagatggtatattctagaacggagggggttcataggttagttggatatagtcgataggacaatggccctaattatattattgaacgaaaggtttgtagatacattaatgttaatacaaactccatttgttacttcatactccatctttccaaaaaaaaactaacctaggaggggatatgacctaggaagagatgtgatccctcatagtacaacgaatctgaataagtaggggtcacattaccttttacgttgggttttttgggacggagggagtagatatctgcaatgcatttcctttcttcttcttttttgtggggcctgagtgatttcctctcgactatgtatatatgagtccattccgtcgtccttggttcccttcagtttggctgcaatatattatacataccgttcgctgaaaaaagtatataaagttgagagcaccgaaagaaaacatgagagatgtttatctttcattttgaccatcacaatctttatgaacatgcccatctcgtaacatcaaaagatgttgttttggaatgggagacatcagcaataaaaaatcatggtattgtctgacggatccttttgtgctccccctgtcaccgaaaaaatcaacatagtgattgacgttgatacattataatactataaatcagaagctgcatctgtcctgaatcgtagtagtagaatgtgtcaatattcaagactaagttagtttttatgagacggaggaagtacaagaggccagtgtaacctgattatagtggtaaagaagcaagattacagtcgacctagtggataggctgtgatgtgcagtgccccgtggtatatcctttccgcaagcgataactgtcatggcattcaacggtcgttctggtaatcgttcatcatgaagaacaagaagaacatgtcaaaagctgcgatggaaatgggcattatggccgcatgaagtataatttgttaaacaataattagggatataattgtttgctatagaaaccatgcacgttgttgtatagatataatgtgatacatctgctccaaaatctgcattagcctagttctatagattgagcgagctaacatatgcatggtatcccatttacactttcatcatatcttgtgtaaaatggttaacccaaggtgatatgattggagcgcaaaggcttataagcatgccacttaattaggacctacgctctataaaagaagcaaatggtgttcgattcaaacattgttccaagccaactacatactacatgcttagtacagtggcggctaggccgacgtaagctggccggaccaaggtggggaagacacagaagccggcttagcccgtttcagggtttaggccaaaaagctctgtgagattaaataattggtttcagtattcaagaaattcaggagaatgttatggcataaaaagaagcaaaaagatcttaatagaacttaaaacatatgaaatctgacaagtttgaaattgaaacaagttatttgtgaaatgtgatggtgggtttaaagtttgaggtcaaaacaattttgttatgcttgaaatggaagaaaaatggaagagactccttttaaatcttgatgtgactatcttagatgaataaagtttcctttatcttaaaaaatgtgaggttttaagaaacttaatttagacgttatataacatctcttgctggttgtaatagctctaatttgtctcacaacacttagtaaatcctatatataaaatagttgtatggttgtaccaattgtacaaatcatatgaaattttccaaaaaggaacagttatataatgattgataaagtatgaattgtacagatcagatgagattaaaccatatttcattgctacaaatcaattccagtttgcacctctacttttgtgacatgcagcttttccactgcaacacgtggagttttcgcctggtgttttaccactgtgtcttaatgataacaacactactacttactccctaccctcaaatataagtatttttttaccaggtcaaaaaaaatataagtatttttacgacacaaaattttaagtatttatgatttcaatgcatgggaattaaaacatttttagccaattaggtgcgtaggagggaatccaagtaatattagaaattgaaaatttgacaaataactggtgacagctaaaagatcattattagaaaacatattttttacaaagagttaaaataaatttttctaggcggctcttcaccccgcctacacttcaagacatgtgaaaatacactattttcacaggcaccttctgtccagccgttggcaggggccgctgccgctgtcctcccccatctagccggatctaggagggagggagggtgggaggggaggggaggggaggggagtgctgcctctactgccgcctgcggtggccgccaccaccatcgcttccctcctctggccggatctagtaggaatggagatagggaggggtggggagcgccgcctctgtcgctcccctcctccggccagatctaggagcaagtgggaagggaggtgaggggagcgcctcctccgcactgtcgcttattgtgactcccactgctgcccctcccctcctccggtcagatctaggagagagggaggagagggctgtgctgactactatggccgcccgctgagaggggtggagggagagaggccggtcatagcgggtggaaatggaatctagccgggtaggtggtgatttttatgtggtatgaccttttttgcagatggacatcttaaggtctcctgcgaaaatcgattctcacaaacgtggtcttaagaggtacacctgcaaaaattatctcttatttttgctagcggaccacttaagatcatgcctgcaaaaattgcagataggactagatttatggtatctttatctatttttacaaacaaaatagatatgagggtagtgtccaccaatttggacaatgggactgctttaaaaagcctccatatgtcactgatgctcataatataataaaccctcatactctaatacaacctagctccctcctcatatcttttagctttcttctctttctctcaacttttgatccaaactgtatataatttctatgttatcttcatctactataggatggaattaaattttatatgtaacggtgatagatgatcaaccatgggacaatatatatgcatggtgattgcattggaaatgagcggcgtcagaagaacacaatctcgtcagtgaatgagagcttgaagcatcttgttgagcaagaagatgggtgcctgtgagtgtatgatggtgctgtttaactcacagtatcgtcttgcacttattttcgctggcttaatggttctagctgtttctccctccatcgtaaaataagccaacctcatactaggtatgacacatcgatcctaacactataaatctggacgatgtatcacattctagtatacgatgttggtttattttgggatggagatgttagaaataatcttgttgtattaggtgatcatgtttattttgttgcatgtcatcatatataggagtagactataagttgtcagctgcatgcgttagtcgttatggcatagcgagctaatctcatgtgaagcacaaaatttggaagaatgcttaaagtagattggcagccaagtagtgcgtacgtgcatgttgggactagtctcaggattatgtggtgaattagtcttgcatgcattaaactattggagaaaccatctttggttggtcgtccaaaatccacaatagtcctggttcgaataggaaccggaactaaatattatttttagtcctggctaacaacattgttatctttaatccctgttgatgttaccaaccaagaataaatatcatttttagtctcggttcaagttatcaggtcgagtcagggccccaaatatctttagtctcggttgtttattatatcagccgggaccaaaattcaccccgagaacgcaggcctcattttgatctcggtcagtcgtcgatcttatcccctcccccttcctcattaaattaacagcctcagcccccatctcagtctcgcgttgatcttatccatctcagcctcagcctccatcgatctcagtcatatcccctctcccccttcctccccttcccctctcctccccctcccgctccccgcctcctcctctccaggcgaccgagcccaggcggcgactactggagcggcgggccgtgcggagggcggagggcggagggcggcgggtggcggcgtggccgcgctggcgggcggatgggagggcggcgggagctgccggccagcggcgccctcccctctgccgaaggggaggcgggaggcggcagcggcaactcgattttgttgttcttttttttttaagaatttgtgatatattggatttcagaatttttagaagttgtgattcgttggtctgagaacttttagatgttgtaattcattggatatgtgatgtatttcttttagaatttgagatgtattttttttaagaatttgtgatgtgaatctatgtttgtgttgatactttgattttgatttggggatatgattggggatatagggagcatcttgatttgtgccgttccaactcgatttgtgcagttacaactcgatttggaaagaaacaatgaaaaaaaaaagaaagaaatggtgaccaaccgggattggcgttgccatctttagacccggtttgtatcaccaaccgggactatagatggatgtttagtcctaggtatttcacccaggactaaagatacctatctttagtcccggattcgtacttctggttataaaactaggagtatagggggctacaaaccgagaggaaaaacgctttctctggtagtgttagttagttgcagatgcatgtgcatgcatgcatattatttggttggtgcaagcaacgacgtctgggaggactcatgttcgaatccaattaaaaacgtgaataaaattttggataaaagtggcacgcttttcaaactgctaaacagtgtgtttcgtgtaaaaactttatatatgaaagttgttctaaaatttcagattaatctattttcaagtttataataattaaaactcaattaatcacatgttattaccactcgctttgtgtgaacacttaatctttatttcaacatcatcttccgtagtggagatgcggcctgagtcaagcagttgcgatacttgtggagttttgcggccaagtaaaccggacgtgggcgtatgtgcgattagtagtatgcatggattgtaaatagctgctccttgtaatcgtttgttttgtgaagaaatagcaagagaaaaggcactagttgtatatgtgcggtgccacaaatatgctcggtactgtgttctcttcttccctgtgttcttcacgtgcaattgtgattcgtgtccactgtgttcgcgtgagttgctttgatttccaacaggagggaatatactgataggctgggatggaactgggatcatatcatacaaactaataggctggttgtacacgctatctccacttccctttgatagtaacttgtgaaacaaaatcaaacggccttgtcatgtccaacagtgcagactgaaaagcaacatatcgcatcaaattgtggaagggcctgtagccttgtggttaccagagcctcaaacctcagaagcatctgaggttctgggttcgactccccttagaaacgaattttctaggatatatcagcgttttactcatagtgattagggtccgtcctttgattattgaggtgtgtactcgttgatccgaacggccgaatgtcgaatgtaacgtcaagtagaattgcgcatgtctataaagtaattaagatattcagaaactaaaataaatatatatcatctatccatccaaatcaatagcaccattcaccaaatcaacaccttgttctattctgcaagtattaggttcagacacacgaatgtcaggcagcgattaatcgcaccagattggttaccttttacattctgttaaaaactgtaagatattcagagaaatcaaaataaaaggattcaaggaaagaaccaaaaataagagggggtggacaggatgatacatataactacacatgacaagttgctatgagattccaggtctagcattgtaaacaccagctggttggaacacgaaaacacaggaaagataaggaagggatgcatgtaagaatcgccagtgtaatacaatgcgactgtgcctaaattctgcactatcacctgatgacgctgttgtgaattaaaatagttggttctgataacaaagcaagcaaacaaaaacagttgataaagttgcccattttcatgtgatctcattacagcattgaacacccaaaccaaacaccacgtagattagttcgtacctatatatagctagagggatcaatggccttaattattttattgaatgaaaggtttgttgaaatattagctccattgatgtgttcatcgatcctgaagccttgctattttctgtttattcacatgattattttctgttgttttgaagaacaggaaggaggtcttcgtgtctttgattgagaaggaatgatggaatggacaacaaaaaaaaagagttgacattgtttacccttgctaaagaaaagttcatttagtaaatttgatgtatgaacacttgaaatcacgttagctagtaaaccatcatatactaggttgcaaaacgtactaatgattacgaattctcagagatttatctcttgaactcggtgactgaatagttttatattttcaagtatatattgacattcatcaatcgtctggaaactgctaaacgttgcccattttttctttatgtacgttttctgaacatggggttttattttagttctaaagggaacttggggtttatttcctgatcacattgttacttttatgtagaaactttatgtaactcgccttacctaacaaagatcatatataaaagatctttatcctcctaattattcactccatttacccgtctggagggtggagcagaccctagcagtgtgctctatttattcccattcttctcctagccaatattaacaatgtcttcttttaaccattcatgtacaattaacatcattctttttaatggatcaagtgttttcatcggaatgagttgcatcgggatgaagctctctgcacagcagacatattctgcagaccaagattatggacctaaatcctaaggagtggtttaaataacagtgagctgaaacagtagtgaagatcgatgcagaagttgagaagcatgtgacaaagaagatgccaaagcttaattagttggggtattgtgatgatctatcttatgcggttcctagtagaaatggactgcataaggattatctgtttcctgtttcttgagcacaaggggatcaatcgaccctccataattcttctcgtgtgtgaaaaactaaaggattgcagtcctcccataaatctgagttcatttcttgaggttcccaacgtcaactccttaatttcctagctaggcatacgcttcctggactactaagcgattcattttttataaaaaagaaatatatgaaagttattgtaaaaatttatattaatctactttttaagtttttttactaatacttgattaatcatgtgctaataaataatattgttttcaatgcatggaagaatattttcaatctctcctcccaaacatagcaagtactactctagtccgaaaaattaaggggcggagtcaagacccagccaccacgggcgagtgccagagctccgcccactgcattattacgtaccctgtttgattaacaaggaaattagtaaagttgtggagattatggataccccatatctatatgacggttgtaatttagtcggatatacggtaccaaatatagatggaatatctctatgaagactcgggttaggttctaaacttgtatgtcaaggaaatacccgggatcttagtcggttacgattgtattttatctataatcccatattccgttaggatatggactgtattttgtaaagcggactccttcccctatataaggagggtccgtgtgcctcttggggggcgattctttttccaatttatacaatcaataacacactaggcggaatcatccccagacaggagtagggtattacttcttgaataagaaggcctgaacctgtataaaattccttgtctccaaacccatccactttcctagcttgatagccacccccttttattattgccgaaatcttgcttcgacagttggcgcgccaggtaggggtagcgtcaagttctcgccgactaagtgcgatgggtttcgtttctggcatcgacgacttcgccttccctcccgggcaggtgttccggtttggcagcctcaacttcatcaccaacgacttcggcaagatctctctccttgactcggattcaaaccagtcggggagagaccaggtccccgtgccgttcggtattccgaactcggccgaggcctactccaagatcatctctcccgactcggcttcaaaccactcggacgagatccaatctactcttccgcgaccagatcaagacgacgggtcctatccctcaatcctgacgaaacttcctgatgatttggccgctgtcttcacagtcaagacatctcccactcgaagatctaagcgagctccggcttcggccccgatccgatctagatccaggaaggttggcgttatactccaacctctcgggacagtctcgacggaagagttggatggctacctcagctcctccggcgtcagttctcgaccaaccgagatcctcgactacgatgatttcggctaccactacgaccacggcgacctcgacaacttcgacgacagctatgaggataactacacgcccctcttcttcggcgtattcaaggctaacaatgaaatggaggaacagcaccaagcccgagaagcggaccaagatcgcgcacgacaagaagctgaacgtcatcgactagaggaagagcgacagcgataggagcgagaacg

SEQ ID NO: 20913 - DNA, 11890 bp, Oryza sativa
ttcgatctcaagactatcaccagccaagcctcagcattgccggcgtcaaatctagtcgcaggagcaggggacatgatgaacggtccgttcgctcgcctcccgagcgatatagggagcgccaagtcgaacgaccacagtccccacatcgaagatgccccatcgatcttcgcgacaccatcaaccagcgccgcgcacaagaggccatcattcaccggatcgctacgacgacgacgtggacggagttgctgccttcacaagcgatctgtgtcgagtggattggccagccagctttaagccgactggaatcgagaaatatgacggcaccaccaaccctgagtcttggcttaccgtctatagtctcgcaatctgcgcagcaggaggagacagcaaagccatggcgaactatctacctgtggccctagcggattctgcccggtcatggcttcatgggctaccccgcggcacgatcggatcatgggcagagctacgcgaccacttcatcgccaacttccaaggtacttttgaacggcccggtacacacttcgatctctacaacatcgttcagaagtctggagaatctcttcgagattacattcgacgcttctctgagcaacgtaacaagatctccgacatcaccgacgatgttatcatcgccgcctttactaaaggcattcgccacgaggacctagtcggcaagttcggacgcaaacctcccaagacggtcaaacatatgtttgaaaaagccaatgagtatgccaaagccgaagatgctatcacagcgtccaagcagtcgggcaccacttggaagccaaagaaggacacgccgactgcaggagggagcggaagtaacaaccacaaggatcgcaagcgtaagcccgaagaacttgtggccacaacctctccatcttcccgacaacgtccccgcgtcaacaccttcgacaagataatgaactcccaatgtccgcatcaccccaactccaaccacgtggccaaggattgcttcgtctacaaacaatttgcggagcaatacgtgaagaacgcacgtaagccctcagacggagatcaaggcacatcaaagaagaaagatgatgaagacgatgccccgactggttttcaagatcatcgcaaagaacttaatcacatcttcggcggacccctggcttatgaatataagagaaagcagaagctaacagaacgggagatcaatgcagttcagcctaacacgccccaatacctccggtggtcagagatagcaattaaattcgaccgctcagatcatcccgaccgagtggtccacccggggcggtatcctctggtactagacccagtggttcgcaacgtcaagctccgacgaactctcatcgatggtggcagcgcactcaacatccttttcgctaagaccctggacgatatgcagattcctcgcacagaattaaagccgagtaatgcacccttccacggtgttatcccaggattgtcagctacaccacttggccatatcactcttccagttaccttcggcactcgggagaattttcgcacagaaaatgtttgtttcgaagttgctgatttcgagacagcatatcatgctatactcggacgactggctctagccaaattcgtggccgtcccacactacacctacatgatgatcaagatgcctggtcctcgaggggtcatatcactacggaacgacatcaagcaagccgtcacatgtgacaaagaaagttgcgagatggcccaaactcacgagactactctcgcccgcgaagagatccgactggctgcgaccacggcaagcgagggagaagtgcctgcaaccaagctgacgaagaccgaagaaagtgatgccaagacgaaaaagattcccttagatccctccgatcctgataagactgctgtaataggcgctgagttagattgtaaataggaaagcgcgctcatcacctttcttcagaataataaagatatttttgcgtggaaaccatccgatatgcctggtatccccagagaggtgattgagcactctttacatgttaaggaagacgccaaacccatcaagcaacgactccaccgttttgcacaggacaggaaggatgcgatcaaggaggaattaaccaagctgttagcagcaggcttcattaaggaagtccttcatcccgactggctggctaacccagtcctggttcggaaaaagacggggcaatggcgcatgtgtgtcgattataccgacctctacaaatcttgtcccaaagacccttttgggttacctcgcattgaccaggtggttgactcaacggccggctacgagttactcagcttcttggactgttactcgggatatcatcaaatccgactaaaagaatccgactgcttgaagacctcgtttattacgccctttggggcctactgctacatcaccatgccctttggattgaagaatgcaggagcgacctatcaacgcatgattcaaagatgtttttcaactcagatcggtcgtaatgttgaagcttatgttgatgatatagtcgtcaagaccaagcagaaggatgatctgattgcggatttagaagaaacctttacaagcatacgtgctttcaagatgaaactaaacccggaaaagtgcatcttcggagtaccatcagggaagttgctcggatttatggtatctcaaagaggcatacaggccaacccagagaaaatcaacgccatcctcaacatgaaaccgccaagctcccaaaaagacgtccaaaagctgactggttgcatggcggcgctcagccggttcgtctcacgactcggcgaatgggggatgcccttcttcaagctgctgaagaagactaacaatttccagtggggacccgaagcacaaaaagcctttgaagacttcaagaaacttcttaccactccaccagttttggcctcaccacatccaccagagccgctactgttatatgtgtcggcgacctcccaggttgtgagtacggtcctggttgtcgagcgtgaagaggaaggccatattcaaaaagtccaacgaccaatttattttgtcagcgaggttttagccgactccaagacaaggtatcctcaggttcaaaagttattatatggtgtcttaattaccatcaggaaattatctcactactttcaaagtcactcggtcacggtggtcacatcgtttccactcggggatatacttcataatcgcgaagcaaacagacggattgcgaagtgggccttagaattgatgtctttggacatatcgttcaaaccacgaacttcgatcaagtcacaagctttagctgatttccttgccgagtggaccgagtgccaagaagacatgccagaggaaaagatggaatattggactatgcattttgatgggtcgaagaggcttacaggcactggagctggggttgttttaatctccccgactggagaaagattgagctacgtattgtggatacatttttctgcgtcccataatgtggcggaatacgaggcgctactccatggactaaggattgcaatatctctaagtattcgccgactaatcgtccgtggatactctcagttggttgtcaatcaagtcatgaaagagtggtcatgtctagatgataatatgaccgcttatcgacaagaggtacgcaagttggaaaataaattcgatggactcgagctcacccatgtcctccgacataacaatgaggcagccgacagactggccaattttggttcaaaacgggaagcagctccttcagatgtgtttgtcgaacacctttacgaaccgaccgtgcccagaaaagagacagtcgaagccatggatattcaaggcgtaagcatgatcgaagccgactggagagaaccgtttataaaatttttgagcaaacaagaactacctcaagacgaaaatgaagccgagcggatttccaggcgcagtagactttacattattcatgagactgagctgtacaagaaaagtccgtcaggaatactgcagcgctgtgtgtctttggaagaagggagacagttgttgaaggatatacattctggtatttgtggtaaccatgccgctgcacggaccattatcggcaaagcttaccggcaaggttttttctagcctacagcggtgtccgacgctgacaagattgtgcgaacatgcgaaggttgtcaattttttgccagacaaattcatttgccagcccaagagttgcaaaccatcccgttgttctggccatttgcggtctgggggcttgacatggtcggcccgtttaaaagggtagtcggtggttacacgcatctctttgtggctatcgacaaattctccaagtggattgaggctaaaccggtcatcacgatcacaacagataaagttagagattttttcatcaacattgtgcatcggtttggggtacctaatcggatcatcactgacaatggcactcaattcactggcggagcatttaaagacttttgtgaagacttcggcattaaaattttttacgcctccgtggcgcaccctatgaataacggacaagtcgagcgcgctaacggcatgatattgcaagggatcaaagcacgagtttttgaccgactacgtccctatgctggcaagtgggtagatcagctgccgtccgtactttggtctttacgcactactcctagtcgggctaccggccagtcgccgttctttttggtttatggcgcagaagcaatgttgccgagtgaagtggaatttgaatcactacgatttcggaacttcaacgaggagggctatgaagagggccgagtagatgacatcaaccgactagaagaagcccgagaagcagctttaattcagtcgactcgatatttgcaagggttacgccgttatcataatcggaatgttcgatcgcgagcctttttagtcggtgacctggttctgaggaaaattcaaacaacacaggatcggcataaattatctcccttatgggaaggacagttcataattgctgaagtcactcggccaggttcttatcgactcaagcgcgaagacggtactctcatcaacaattcttggaatattgaacaccttcgtcgattttatgcttaggcatttcgcttgtatctttcctatttgactgctaacttcaagtttctccttgaagttttcagtcagggggctattatgatagtaatggagtgtgatttttatcaattcaatttgcttacttgatttatcattgccctgtttggtctttcgacttagccaatgaggactgaaggtttttaatagcttttgcgggttttaggctcaataaggcttgacaaaggcttttaagaaatcagaagctaagtatggaacaccaagcatagcataaattcatcagtattgtacaaattgagcctccaccgtcattgatcatcaaaatcattgttatatcaatcagtatcagttttttcatcatcagacttattagacccagtcggccgaaggtcgacatattggaatctctcaactacatcagcagcaatcttgtcagccgctttctgcgcatcattgatgaggtcaagagcagcttctttgctcgtcccgtctgcaaagccatcaatggcatcaatgtcaactcttggataaagggatttggtcatcgccaatgccagacttgctcccatacttccagcttctttgatgttcttgaagtaagtatctggagcgactctcagcttgtcgaagatttcggcagcatcaagtgtactcgaaccggcgttattgaagaacatggcctggataagtggagtagcggcattagcgactttatccctggctccttcaagcttgttgatcttgtcaactaagacatcaaattgtgcttgagacttgatcttgcggtctgcgtcaacagattcacattaatgaatcagcatgtagaagataatggcttttgaagtattgattattggtaccttcaacctcctttaaagccgaatccctctgtcttgccagctctgccttgtcattttccagagtttggatatgcttctctagttgagatatcttggcagcttgcactacattaacttcggttaatcaaggttacaaagataacagcacaaattagttgggcagagtttgcgcgaaccttttgatgagccactcagttcgaaattggactcctggagctcagcaatccgatccctcagatcgtgttcattcttcttggcaagttctctggcctcgtgcagttgactcctggtggcttcgagggttccaagatgaggaactagtctctctagggttgcggttttcgcctcgttcctaagatgaatcctctgcggagcagtttaatcagcgctcgagctagacagtaaacaagatggctgaggtcaggcatcaaagaaacttacatttacaatgcgagtcgcttggttgagtccctttttcagcaggcatacctcttcgtcttctttttgccggtttattacaattccttgaggttgcaagttgtcatcccaccacttgaccagaataggagggcacgaatcttcggttgcttatatacggggaatttcttcttcatcatcgatcattggtcctaatgcatccaatgacaaaggttagacaatcgatcagagttatttgggtcaacatggtttcggacaaagtgtttacctgtaatgatttcaggacgaggacgagtggattcggatacttttaaaggggatccagatctccggtcattgctggcgtcttgtccgcgagggttgtttgcttgggtttcgacttctggaatctcttggcttggccctgcgtccgactggtttccagtcgggggatcttgattaactccggcttcggcttcggccaactggattccagtcgggggttggtcactggattctacattatcggttgccggttgattgtcactcggatgatcctcagcagttggctcagtttctttggaagaacttgtgtccacgttagttgggtcagagtctttcccagacggatctatatcagatggcttcctgcaaatttgattatcagtattattgccgcaatgggtgcgcatcaatgcaagagaggtcgttatatgagttgcacctagaagacttcctgatctttggcacagggcgactggatgttttcttccttggagtagcctgttttggtagtttcttggttgtctctcggtctccaggcctcctggcggtatcatcggcttcgtcgtcacttagaaccagcttcttctttcgagaatctgactggccgattggatcagaagcacttggttgagtttcagaccgaattcttggtcctccgctcccttgcccagtttgatggcggggcgatcggcgttgagcgattgggggatccgacttcatcaaagcaaattcctgggtgtaatatccttcattgttaactgattcaacaagaaagcaagatcatattttgagaaaggttgaagtgtatgaatacgtaccagtggaggaggattgaatgcattgaacggtatgactggcagcaagtgagagtagctaacaacgatggcgtttgagaagatcttatacatcctttccttcatgaccttgaagtcaagagaatctggatcttcacggtttggatcatgcttgccgtcaaattcgaaggctgtgcgagatctttctttgattagagctaaccgacacttgataaagtgccgggtgatctgttttccttgaaggccctgatctttcagcttaatcatcctctcgatcagttctactgcttgtgcagcttcgtctcccattggcagtgaattccaagtatcccgataaactggaggaagacaggagtactcgggaagaacaggctcggggttttgaacataaaaccaatttgcgtgccagcctttatttgaggtcttgaagggcatggagaagtatttttggcttagtgttcccctgagttggaaaccagcacccccaacgacgcatggtttactcttgtttggttggggcttgaggaagaagatgcggcggaacaaggcgaaatgaggcctaatgcccagaaaagcttcgcaggcatgaataaagttggcaatatgcactatggagtttggattcagatgatgcaagctaatcccgtagaagttcagaattccccggaaaaatcttaaggttggaagagaaaatccgccgtagaagaaatgagcaaataccacgatttcgtgtgtatcgggtgttggaaatgcctcaccaaatgccggttgccacccgatgatctcttttgctggaagaacgccgtgcgccaccatctccttcagattgtcttccgtcacatcggagggcgcccactgactcttgaagctttctctttcttccgccatgaatgtgaactggatggtctgatttagttcgagatacggctggaaagggatggggaatttgagcggtggatacggggagaaatttcgtgaagattttgaggagggattggagcggattgatgaaccctagtttggccggcgcagttttgcactgtagcaggaaatggggaaaatggcgagagtctcggcggggaagacgaagagacgagtttcacttcggtattattagggtatcgggagtactaatgggcctgggcctgtacagtacttcagcccaatactataatcagcgtggcctgttgtgatccctagggacttaggcactttttgctttggcgatttgtgttcacaatggtgtggcccaatgctgttaaaatcctttttaacacgattcaataattcttgggaattattatgatgcacataaaaaggtgcccgacagaaaggtgttataccgtttttgtaagctttgttaggctgcaaaagctgtttgggttgatttgagatgactggtttattaatagtcattcttttagcatgttatatgcttattttggttatggtaagggtcacagcctaggctattggactcattaattaccatgattttctatcctgtttggtgggtcattttatgagattcttactcggattcctatcaaacatgtttatttttggacctttgagtgtttatcactcggcccttcttgtattttttgtccttgatatattcaagttgagaagcagtcggctgggtatcttactaagtaccattcgtgcttcgctataaaaccactcggttcttgactatatgtttagtttttcaactaatcacatactcgggggctacacctaattaggtgcatctactcgatgcaccatgttttattttcgcccttcacagtttttaatttttagcactcggcaagctggagcaagttgaattgaagcactcggactactgtttttttgtttcgagaaggctattttgtcaactgcgaaggtctcgggggctactgtggagattatggataccccatatctacatgacggttgtaatttagtcggatatacggtactaaatatagatggaatatctctatgaagattcgggttaggttctaaacttgtatgtcaaggaaatacccgggatcttagtcggttacgattgtattttatctataatcccatattctattaggatatggactgtattttgtaaagcggactcctttccctatataagagggtccgtgtgcctcttggggggcgattccttttccattttatacaatcaataacacactcggcggaatcatccccggataggagtagggtattacttcttgaataagaaggcctgaacctgtataaaatttcttatctccaaacccatccactttcctagcttgatagccacccccttttattattgtcgaaatcttgcttcgacaaaagtaattaaggccatcgcagaaatatattagtctagcccatgctacattaattgatcacgttggttttacccaacagcacggtatagataaatcataaatggtctatataattatatagattatatgtatgcttgttatctcgttatatttgttcagctaaaagatttctagaaccgccaatcgtaatattatagcatcactggcagaattgaaataattcacccccaaaattttgtttttggcttcttaatctgaaaataggaagtgaaaaaaataatctcttcaagaaaaaactttaatttaatttgaaaaactaaaagtgagctattctgttaaactaccaaaaaaggctcgcttcccctcgtatcagacaatttcagggtagggaactccaaaaatcatgcaaaagaataaagtatctggtgaagtagttttttttaaactaaaatccctcaaattggttttagaaataaaataggagtactgttggtgatattcttagataatatcccatcctaaaactccgaagctacatttatggacagatatactagctattaatattctcgtagccacctagagatgctaacctcctgaaacaatcctacgacatgatctggtattagcgacatatcactgcatcagtgctacatacagttccagcaaggaaatcccagaaccatttcttcacgatgcacttgcagaatccaacgaatcagcattcttacatctcgcagtacctcccaatcccatgcaaagatagttaccaacaattagggccaacaaatgaactgactaaaggaaagagttctgaacttaattgtgattgatcttctcgtctgctagctggtaatgatatgtctgccaatcacccgaatcagaaatcgatgcatctgattcaattggctaggctcagatatatctccaaaacttattcaggactcgagttgaatgcacagctaagcagtagcttaacacttgcagcatgcagtgatgggaaaataagaaaaataaaatgagacttgtaataataagggataggtgatcgggcaagaagagcagaaggtgtgtatctgtgggtagtgaatgttcagagcagagaagacagcaggtcaatgtcccacccccccccccccccgccccaaccaaaaaaaaggttttttttttcagaactttatatcaaggacaaactgcatgaagtattgaggatacggatccgtatcatatacaccatccggtcataaatacttaatatttagaacaaaatttgacttgaaattttacagctagcactcaagagttactaagaggtacccgtagctcctagtaccaaacacaacgagaggtaaaatgtggtacctccagaccgtaaaatctctcacttacaaactttgactatcaattttgtattagaatatctaataagtttttataccatgataatactttttcaaggcaaaactaagcatatatactatttttttcctttttaaaatgagcattagaaaaactaatgatagttaaagtttcaaaagttctgactctatatatcatgaccattgtataagaccaaaatgacaaatctgagctaattatttattcattcatttattttttgcaaaacgtaagcacaaaagaaagctaattaaacactgcgttggtcactacctgatcaatctcatatcaacatacatttctgagaggattttactgtgcttgagaggtacccaggtacctcctaaatgaattaatatgcacctttgatttcgaaaggataatctagaaacaacaaataatattaataatggtagcttagtaattccttaaacctcaattccccatctgttggctagcagcatcctatactaatatgatcactaacccaatccatctgtgtctaacccggaaaaatatatggtgcaaagtacatatgtagtggaaacctgaaaactaccgttggatcgaaaaatagacgtctgatatttgtctatgtcatcacgagtaaaaattttgctatgagtaaaattttaaccgtgacattgacgaatctcggacatctatttttgatccaacggtaatttt

SEQ ID NO: 20914 - DNA, 9678 bp, Oryza sativa
ttaatttctgctggtttgtttgcggcaatgaggctgacgacgcgttaatcattttgggtgacgttaccagctgacgtatgtgatcttcatcttgtgttccaagtttcaaaagcttcgctcgatcttgagcttttgatatatcgtggctctcaattagctcttgctgactggcagctctaaatcaacgagcacaagcttgttggctatagctcttatcctcttggcctcttggcgagcaaaatatatctaatcttagccgtttagtgataaaatcctttcaaaagtagtagatgtaaatcctcaatcaagaaaaagtaacgaaaattaacccaaaatcaaggcaaatcgatcgatttgtaggcaacgcaaaaacagatactccgctctaagtagtaggagaatcttctagtatagggcgtggagctagcatggaacaattcgaagaaattaatcaagaaaccggaaactaaccaattatgtaattaacaacaaaatccatcacaagaagagcaaaaaaaaaagctgcagaagcagcaaaagtaattcatataattggttgaggaattattagagaatactactcacatattgttgagtacccagctgcgcacggcgtgcctcgcctgatatgatccagcaaacgatccgccgccgccgccatcggaagcgagaacgacgacagagcaagaggtcgagctagcgtgcaaatggccgcagtgttgctggcacgcggcaatagtcgaggcggcggagtcaacctactaggtaggtagtgtggtctcaactctctctagggcagacgatagctgtggttgcagagctggtggtcgtggtgggcgagatagatgactaatttgcagctagccgcgcgtgtgggccgccgcgcgaccaccccgcgttttccatttcggcccaggtgacgccggaccgtgcgcctccactttccgtcttgggttttcttatttcagcccagctcgcgcgatcagttcagcccatctgtctaaattttgtatacatatggatataaactttgaatttataagtatacaaactttgcatatgtctttacattttttatacatcaaaagtatgcgtatacataaaatacactcacacacacatatacacgtatgatatgtgcatctgcttcctccgcacgccaccaccttaatttgctccctgtacagtgtcaccaccgctactcccttcgcacaagcaccgccccttctacctccgcgccgtcgctccctttatctctcgacatgtcagttgctttatctctcgacatgtcagttgctgcttctccctcaacgtgcctccatccttgctccctccgtatgtgtcgtcgctttcgctgctccctctgcgtgccgccacccctgctacctccgcacacactgcctccgcgccgctctctccgctcaccgccaccccttctcgctccgtgcgccaacggcaccgctccctcctcctgacctattcattgctacttctcccttcgcacacatcgttgtcgctcctactctctccacgtgtgccgccgcccccttctccctccacatgcaggtgacgtcgctccctcgttccccgcccgtccgctacaccagcctcccaatatgaaaggggatgagaagaaagttggagataggattgttgtgtactcatgggcattttggtacttttggctaataaatacatgctttttttttgtttttttatatacaaaaccttaacgtgtaatggaaacacggtcaaatgataacttcaattttaaaaaataggatcaaatgcaaacatgaaaatgtgaggttagattggtagaataaggtcaaataagcaattatcctaatttattattcttcttagagaaaggtacctgaactaatttaatggttcacttagcccactaaagttttttttttgccttatcttacccctaaactgttaaaaatgtttcactttgctccttaataacatgtacattttcttacccgtcatacaagttgcattttaagctaaaatgtaccagcggtattttaagctaaaatttgttaggagccatagatggcaccattaacgaagttcaaaagtattttcaaattttttttcatcgatgtttgcttgaacttaattttgatgtttgaatcactttcaacctaagtaaacagtgagaattctttttttacaaaaaatgttgaaacctaaattgtgaacgcatctatgttctaccaaatttccagagcaaaattgacttagatagagagagtaaaaaatactgctaggggggttcgaggtgtaaaatgagaaaaaaaagtttaggtggttaagtgctatgatgaaatggttacttttttttcttactctttattacgagccacctatcttgtcgtcatctagtccaccactgttctcacaaattaaggattattaaagcctattagaaacatatattgtttgtatggactttgggattaattagttagtaaacaaatgttaaaaaataatgtaaggttatactctctccgtcccaaaatataataagtggctattaaggagagaggtaaaagaataatgcatggttgcctctccttgggatgaatggagtatagccgtataggcctggacaaattggggctataacaaagggataatatggttaatttagtggtaaaagtcacattttataatactgggttgctttatttgggataaggtttaaactattttatgatgcaaggagcagtatttttccaatgccctagctaagctagggcctattctttttagatgacgcagcatattctgataatataagataacttacttataacaatgaattaaatattacattatagagttaacaaatagcttcaaaaagttaccaagcaaggctaatgaataattatttttctggagcattgtactttgaagcatggcaccaataatgatgtattgataatcagccccagttaattagctcattccaacagggcagtcattcagagccacaggcaaatcttcccaaaatataagaccatgaaacgtcaggacaacaacaatgaaggaatagaagtaaaaggaaaaaaaaaaggatcgatatttgaaccttggagccctagactttaattagtaatccatataagagctaagtgtataggttgacaaggaattaaaatacttaaaaagaaacatacaaaatatgtgaaaaaacaaatttccaaaaactatgtcgaattcaagctgggagtgctaaaattgacaaaaatggttcctaaacttcctatcgtccgttcgacaagaagcccaaatcccaaacgctttaactaggcgggtctcaccgaatctttatctactcaccaaacaccatcaacacatatatttctccaccacacactccaatcttatcccatctctcccttatctctctccactacaacactacctcatcacgagcagcgacagggctcttgtcctcgacggctatctccttagcttactcaagggcagcttggtcagcctcggcttcctcaacgacaacgtggcataacatcagcggtcacttgttcccaacagctacgcgatgagcttgaacttggcttccacaatgatccatgctttcatcaagtgtggcgccgcataattgcagcatactagtgtcgagttcggcgacagtcagtcactggagaggagaaataagtactttagactgtttttttttatgtttcagccaatatgtttttgatgttcctttgtattggatcaaaatcttgcagtgaggttttttgtattgtttcatattctgtccttgaagagtgagattcgtggatgtttcaaacgctacactaaaatgttttaccatatgattcaattatgtttcaccaaaatacacaatgattatagcactttgcctttgcttaagcattggagtatttatgtactccctaccattgcatgtggctgcaaggtcagtaatcacagtaacctactctactagaaaatgcatttttcccgacgtggaggtcttattttcacagtcggacatgactcttggagccaaatgaccgtctaaaaaaaatataaatcggcatgacgttcgctgtccgcctgcgaaaatctattttcgcacgcgcctctattttcacaggcacaccttatgtggtctgcctgcagaaatagtacctaccaaaaaaatctagtcatcctcatccgtatcctctcctccaccatccttatcctctcctctccaccactcgtttcccttccccttctctctctctctctctcccccacacttagaagaatcgcccggctccctcctctcccacgtccacgcgccgccgcctccctcctcgacgacgacgacgaccgcgacgccgccgacggctccatccactctagatccgcgtgctgccggctccctcctctcccacgtccgcgccgctggctccctccaggacgacatttgcgcgccgccgcatccctcctcaccgccggtggcctccctcctcgacgacgatgacgacgactgcgacgacgccgacggctccctcctctcccacgtccgcgccgccggcgccctccatgacgacgtccgcgcgctgccgcatccctcctcgccgccggcggcctccctcctcgacgacgacgacgaccgcgacgccgccgacagctccctccgctctagatccgcgcgccgccgacagctccctccgctctagatccgcgcgccgccagctctctcctctcccacgtccgcgtcgccggctccctccacgacgacgtccgcacgccgccgcatccctccgccgctggccacgacgagcgacgacgacggctccagatccgcgcgccgccggcttccctcctcgccgcctccgccggccacttcctctcctcccctccgtccgctgccgtcggcgcccgtggtgaggccggcggcggcgccccatggttttttttattttcctgagatgattttcacagccgggctgtggcccgcctgcgaaaatggtctattttcacagtcgagatggtagcggcggtcctctcctccgcctgcgaaaatggttttggaccgcctggaaaaatcttttttctagtagtgctaatctactgctgcatggacggtggagcccgggcaactgcccgtggtggccaggtcctggctccgccaacataacacaagctttttttttttcttttttcgcgatcgatcacacatgaaaattgaaaaggcagaattatgcatttttcatattagttttgttaacgtaaatctatgcaatttgatccctgttgccagctatttctgaaaggattccatggttataatcatgaaaatgatcctgcactggtccatactttttttctttggtctcaatcctgcacaatagtttctttacagagttttcctcctgacaaaagaaaatgatatataaaactggcacaatttattgacatttgcatcataattggttagtgccctaatggcaagtgttctactcaagggactgtcctgagtattaacttaagaaactctgaagttgccatcgattgcaactgttcatagtgaccacattcttaagttaatacatcatgagtttgttatatttctttccacttctctatatgtataaaaaaaatagtgttctctgaccatgcttttttgcgattatctgacaatatataaacaatgtaatgttttctgaagacatttgtatctctgtatccctctcccccatcctttttgttctgtggggtggatggatgggcctatcaaaaggttgttccattatcatttgaatgcacctataataagaactaacaattggcaaacaacagttttccttcagaactagggactgttgtttcaatccaaaaatagtcatagttttactgccatgtctcttatagcttttgctgctgtgcgactagcccatcatgatgatctgacttacaatgcttgtgtctcttgctcttgatctccttctatcagtcactctaggtgcagctaatttctgttcgtctcctgacatttctagggatgcaagatatcgaagatcgatggaaattgctgccgcctacaaggtgcaagaaatcatcacatccggcatttaagtgtgtgaaagactggttctgatttttttttttgctttgttgtgtttcttctctgtgccatagctagaagctagactgaaaacaactatggtatttttaggcttttttatcttagtgaattcatgtaaaaatatttagttatggttctatccagtttttgatggttgttcttgaagggtactagttactatttttagcaggagtgccataggagctaatttagctaaacttgttgcatcggttaataacaccatcgaatatttcatttgccaaccttttgtagacctgaattttgaaaaccaattagaaagtagacacgggctataatgagcgcctcttggcgcgctaattttttaagtatatcagtgcattcacatagtactcgatttttttaaataaatgttttgattcgtgcatgaatcactgttttgcagccataccacaagctgacttaaaaattgcaaattgctgaaaggtacaatcgtataagaaacaaaatgattttcacatcacttcgcaaactacattttttccctacaaccaccggaactcaatatagttcctacgcagcttcatcattcataacagaacaactagcaagttcaattcaatttaaagagatcgaatggtgattcacactctaaagcaaacttagactaaaaattaatagtatctttaaagattaaccttaagggtaaaaaaatctgcaatccctgcaaacaataatgcttgcttcaatatggtatacttagtcatatacatggacattctccaataaaacattttgttttttttgacgcaaataataaaacattttgtaatctacagctcataactcaaaccatattgaccatctcatgaaaagtcacattacacatcacaaattaattccagccacaacttttagttcatgtgctcacctattggatttgcatgaaaggggcagggctgagtagcaaattgacgcacagtaacagcagatgcagatccagtagagtgaagggagcaggattttagtgggaatcaactttcgtaactgtggcatttggggagttcatataattctaaactaacatggtaggttgtctgtagctcatatacaaataatctgcacccaaaccagtgccaaaatatacgaacaaatgcagaaattcgcttaggcaatactgcaaacaccttaagtgcgcaaaaaactgaagtaaatttaaacgatgtaaatggagaggaatgaacctgcagatgtcacagtgttcagtgcagatgtcgatggtggcaccgcgatgggcagaaggcgggcgggccgcagggcgctcgacggcggcgagtctctcccacgagctaggtcaccgggcggcgctacggcgcatcgatgggcaatgccgcagcgggcgacggtcggccgtcgacaaaatgcctccaaatgctgtacatcctgtagtgtctgaggatggtaggtgggtttggccaccaaccaggcaaaaccacacaattcccccatccttggccttgcgcttgcgcattagggtgagccaaaaagaaattaaaaaaaaaaacaactgaggtttctttccctcaacacataaatacccgacaatgccctagccgctcgacgttcataccgcagcatagagcacacgcttggtgtcgcggcggcggattgatggcagggaagacggatatcatccgcgatatcatcggcggctgggtggtggacgagacgtgcgtatatatttttgtctactactacattccctgattacagaattttctgtgttggagttagttttcttcttcttcttcttcttcttcttcttcttcttccaggtttggttttgctcttgtgattgatgggatttccgaggtacatcggtttccggtttccgagtaatcgctctactattttaggtcgactacgatcttggggataattacattgcttccttttttcttgatgatagagggtctatgtgaatgctgctatactatgaatatgattaacgtggacaacggctgatggatttgattcgatgcgagcggccgttgacatgtgggccccactccaacaatgactaaggttgctcattttggcccaggtcatcgtgaggcccattaagcccatctgcccacgttgtgatgcccagatgccctagttgcaaccgccgccgccgccatctctgcggcggtgtccggattcttcttcttcttcttcttccctcgtcatccgggaacgcggcgaggaggcggcctggctacaggacgtcttcttcttccctctcgtcttccccctcttctccaaccttctcttcacgggccaaaaaaaatctttggtaattggtacggtccgccatgcgggcggtgccttgtcgagctcggaagacggcatgagtgctgtaatattggttggattcagttatgaaattaagtagtactgaataatgagattcgggttggatcaaatttattcgaacgggatcggttttgttcttttgtttttggaaagaaccgaatagtttctttttaactatttcctcattttaaagaacggtattatgcgattcaaatcaaatctacgcaagtcaaaatttcaacaaccagttgcgtcaacatgctttttgtctggttaaaagaactgaaagtacgtactatgctttttctctgctttgatgtgtgatcttagtccttttgttcctttcttgttattctctgaatttctcctgtccgtattctaaattggaaaattgcattgatcatgagcagtttgcgttgtgtgtcacaaaatcatgaggattcaattaattacttgttcatgagggtggtgtatatgccattgtgatttagctttctgaggattcaattaatctctcatttaggggataagaggatagattctgaaaatatataagatggcacctggatgtcattgtgatttagcttttaattaatctctcatttaggggataagtggatagattctggaaatatataagatgacaccttgatgtcattgtgaagctttaacattttttttaaggtatttagcttttacttcgatctgaatttctaaacccaccatttttttcgtttgtgttcaaccagagatgcggcattggctggacttcgtgtggcagagcgtgcctattggaaggaatttgtggacagagtattgaaagataccagcagcattgatataactgcgtcaaatatagctgttcccacaaggctacctgtcgagctgcaagtcctgatcaaggttatgatccaccagattcttaacactcagcctggagcaatccctccactagcatttcattggtgttgcaatcagcttcttcagcatttggtgaattcagtaagaacccaaggacagccaactgttgaaccaaatgtacatggacatcaacgttgcaggggtgcaggttggtcatcggggattcccgaacgattggccgatcgaaatgtttcagaagatggaggtattggaggagttgattcgaggaggaacattagagagatgaatggtaaaattaaagagacaaatgcaagtcgtgagtcaccccgaat

SEQ ID NO: 20915 - DNA, 17936 bp, Oryza sativa
ctgcacccacgttgcatccgcccctgcatccacgaatctcactcttcaaagacatagaatatgaaaaaaaaaactcactgcaagattctgatccaataccaaggaacatcgaaaacatattggctgaagcataaaaaaaaagtctgaactacttatttctcctctccagtaacagaccgacgccagaatcgatactagtttggtacaaccatgcggcgccacacttgatgaaagcaaggatcatcgtggatgccaagttcaagctcgtcgtgttgccgttgtaaacaagtggccgctgatgttgtgacacgttgtcattgaggaagccgaggctgaccgagctgcccttgagtaagctaaggagattatcatcgaggacaagagccccgtcgctgctcgtgatgaggtagtgttgtagtggagagagataagggagagagagagaggatacgattggagtgtggtgtggagaaatagatgggttgatggtgtttggtgagtagataaagatgaaggagaaggattcggtgggacccacctagttgaagcatttgggatttgggcttctcgttaaacggacgataggaaccatttttgtcaattttagcactatcaacttgaattcgacatagtttttggaaatttgttttttcacatattttttatgtttctttttaagtattttaattccttctcaacctatacacttagctcttatatggattactaataaagtctagggctccaaggttcaaatatcgatcctttttttccttttacttctattccttcattgttgttgtcctgacgtttcatggtcttatattttgggaagatttgcctgtggctctgaatgactgccctgttggaatgagctaaccggggcaaattatcaatacatcattattggtcccatgcttcaaagtacaatactccggaaaaataattattcattagccttgcttggtaactttttgaagctgtttgttaactctataatgtaatatttaattcattgttataagtaaattatcttatattatcagaatatgctgcgtcatctaaaaataataggccctagcttagctagggcattggaaaaacactgctccttgcatcataaaatagttcaaactttatcccaaataaagcaacccagtattataaaatgtgacttttaccactaaatcaaccatattaattatcccaagaagaggcaaccatgcattattcttttacctctctccctaatagccacttattatattttgggacagagggagtataaaataaccttacattattattatttttgaacatttgtttactaactaattaatcccaaagtccatacaaacaatatatgtttctaataggctttaataatccttaatttgtgagaacagtggtggactagatgacgataagataggtggctcgtaataaagagtaagaaaaaaagtaactatttcatcatagcacttaaccacctaaacttttttttttctcattttacacctcgaaccccctagcagtattttttattctctctatctaagtcaattttgctctggaaatttggtagaacatagatgcgttcacaatttaggtttcaacatttttttttaaaaaagaattatcactgtttacttaggttgaaagcacataaaacagattcaaacatcaaaattaagttcaagcaaaaatcggttgaaaaaaatttgaaaatacttttgaacttcgttaatggtgccatctatggcttctaacaaatttcagcttaaaatactgcttgtaaattttagcttaaaatacaacttgtatgacgggtaagaaaatgtatatgttattaagcactaaagtgaaacatttttaacggtttaggggtaaactaccaatctaacttcactttttcaagtttgcatttgatcctatttttcaaaattgacgttgttgtttggccgtgtttccattacacattaaggttttgtcttaaaaaaaagcatgcatttattagccaaaagtaccaaaatgcccatgagtacacaacaatcctatctctaactttcttctcatcccctttcatatcaggaggctggcgtagtggacgggcggggaacgagggagcgacgtcacctgcatgtggagggagaagagggcggcggcacacgtggagggagtaggggcgacgacgatgtgtgtgaagggagaagcagcaatgaactggtcaggagaaggagggagcgacgtcaccggcgcgcggagatagaaggggcggcgctcgtgcgaagggagcagcggtggtgacactgcgcacagagggagcaaattaaggtggtggcgtgcggaggaagcagatgcacatatcatacgtgtatatgtgtgtgtgagtgtattttatatatacgcatacttttgatgtataaaaaatgtaaacacgtatgcaaagtttgtatatttagagattcaaaaagtttatataagtatgtatataaaatttagacagatgggctgaactgatctcgcgggctgggctgaaaaaagaaaacccaagacggaaagtggacgcgcgcggtctggcgtcacctgggccgaaatggaaaacgcggggtggtggtcgcgcggctagctgcaaattagctatctcgcccaccacgaccagctctgcaatgtaaccacagctatcgtctgccctagagagagttgagaccacgctgcctagtaggttgactccgccgcctcgaccagcaacgctgccgccatttgcacacgctagctcgacctcttgctctgttgtcgtcgttctcgcttccgatggcggctgcaggcggcggatcgttgctggatcagtcgaggcacgccatgcgcagctgggtactcaagaatatgtgagtagtatttctctaataatccctcatccaattatgtgaattacttttgctgcttctgcagctttttttcccgctgttcttgtgatgaattttgttgttgcataattattggtttctttccagtttcttgattaattccttcgaattgttccatgctagctccacgccctatactagaagattctcctactacttagagcggagtatctgtttttgcgttgcctacaaatcgatcgatttgccttgattttgggttaattttcgttactttttcttgattgaggatttacatctactacttttgaaaggatttttatcactaaacggctaagattagatatattttgctcgccaggagggtagttaagagctatagccaacaagcttgtgctcgttgatttagagctgccagcaagagctaattgatcaaaagctcaagatcgagcgaggcttttgaaacttggaacgcaagatgtagatcacatacctcagctggtaacgtcacccaaaatgattaacgcgtcagcctcattgctgcaaacaaattaaaccagcagaaattaatcaagcttgtgctcgtggacggccggatcgcagtgaagcaggaacgcttcgatcggacggtgcatgttgcggcatagctagcaagctcgcgcgatcggtgggatgagaagaacgcgtagtaggttaccaaacactacggctttctagttttatacatataataatgattctctctcggctgcatcgtcttagtactagctattttcttctttcctctccttcctatgcataataaaaaaaaaactgttatgcctatgaatattactggcatgtgatcagtaggtgggggcttttcataaaagtttagcaaggacagagatttattataattaatgctatactactatgtgtgttaacataatcgtaaaatttgtgatgctatgtgtactgtagaacgcgcgctaaaagaatatgaaagctgaattagatatgtggtttgacttggaaaaagaaccagaatcggtgtttggcttggctcttggaaaaagccatgtcaaacattcatgcagctaaattgaactgctcttgactgaactgttaaagttgcatgatttatgttgcggtacaagggtgcgagagaggtttgattctcattgattgtaatgttcaatttatataaggggatacggtcggtaccgcaggggcgcaaacagtggctgagctaggaaattttcaaaccagggcaaactacttagctaaattgaactgctcttgattgattattaatgtttagctaggaaaaagctcggagtatctagtatttgctaaaatatttctaactttaatcctttcaaaataataaaaattcaatggtgtatttgatggcgagcctgggcggctgcccgtgcaagcctggtggtggccccgcttctgggtgcaaagtgcaatccatcgtgccagttgtcaagaagtgccgaaggagagaaggggcgtggccgcctcatttccttctctaccggttgtggtaatggggggcatggccaaccgcaatgcctattccatcggatggatgagatcatacatatatatttctcaacaatttcgttgtcaactactttaaattaaacaaaaataatgctttcctccgggtgtctaatgtggacacagaaatcaaattgctgtcacccatccatgcctttcccgttcagtatttcataagcaagtaaaattttcaacatggactcacgtgccttctttccgtttcatcttttggtgaatttctgtttttcagacttcggatttatcggcggatcagtacacatagccgcagtttaagatagatggtgatggtgaagttgtatgtgtatgactttacccattagagttcaaatctaatgtccatgaatactatgcaaatgcaggtcgacttttagcatggttatagtaagatcagaaatataccgctgatttccgtttatgtcttttaagcgtgtgttagaggcacattcgtctaagtgtgtagtgatgtagtttgcatgtgcattgttgtgtaataataaaataaaataaaattgaaatgagcagtttagaataagaggtagtttattgaaaaatcatatacttttaatcgcagaaaaacatatttttttagaagtgtcaaataaatactccatccgtcctaaaataactcaacctaggatagaaacctaggataggatgtccgtatccacgtacatccggacattcccatcccatccccttctcctctcatcttgtttctcaagctacaattaatggtggatcctagcgggcgcgctctctctctctgggtcatgaatcttctgatagaattcctaccattgcagcttttcttaggctatgatgcgttacaccggtgagttgtacatggctcacctccattccataatgtgcttttatgcaccagcgtaaaatattggttgctcattgggatatcgacatatcgtgcttcgtttaggctgtgttcgatgcaggagttcccaactctccctctcattttccgcgcatacgtttttcaaactactaaacggtgtgtgtttttttgaaaaagtttatatacgaaagttgcttaaaaaaatcatattgatccatttttgaaaaagagctaatacttaattaatcacgcgctaatagaacgctctgttttccgtgtgtgggttatgggttcccaacacccaccactgaacacaacctaaatgttccctactacataaaagcacgtacagaccggcactataggtgccgtggaagtgctaaaactggcacctatagatctttttcacctctgcaagctgaaaacacaaaaaaaaccgataccaatatatagttgctagataattaaagaaccgacacttataatatattataggtgcgtataaaaactgagcagagctaagctgttggtccttatcctcttgaggcagataaggggaggaggactcggtctctccccggtctcctctctctcccggtctctctctcgctctcctctctctgtctctctctctatctatcgatctctctctttgtcgcttaaagtcaacaaatagttgcatcaaaagctttaattttgtctgctttgatgtatgatctcagtcctttacttccttctggattgcttcagtacttcctttgaaattggaaaattgcattgagcgtgtgtggtgatacattctgtgtgtaacaaaatcacgtgtttatgaggaatcatttaattacttgttcatcaggcaggtatagacatagtaggaacaggttctggaaacatatacatgacactaggtaggatctcattgtggcatcaattttttttgtcgacatttatctgaatttctgaaccctattctttttgttcaatcagagagaaattggcaggacattatggtgcagagttcaactctttgcgggcatttgaggacagggtattcaatgagaccagcagcattgatgattatatttctaaaatatcaacgaagatggctattttggagcgaccgcagtcttcttcaggtatgcagcatcaagggcagatgggaaatcaaacgaggctgcctactacagttatgcaagaacagccacagccacagcagcagccgcatttgatgtcaaataatcatcaccaaacacatggaggatggcagagcaatgttgcaagggtacagatgatcactggtgttggagaagtgaattggagggaggaaatgtttcagaagatcagcgttttaaagaactctttcttttccgagcttacggattttgaccgtttacttcacaattgcaaaaaacagaagaacagttgcagtcactacctaaaaagcaagctgaccaatacaagcggataacaaagctcaaggatgcggttaggagtgctctggatttattgcagctccagaagagcagcatcgatgaaggcatgaaggtgaaattctgcaagtacgaaagctccatacatagcctactcagattctacagggaaacaaaagctaaaattaatgagatgaatgcaaatcgtcataacaatcagcaagagcaacctgcaggcctgccgaggcaaagaattactgacagaactccatcgtcagctcgtcggcaaaaccgcaatgacaacgtgataggccaatcagaggataaattgcgatgcagggttgaatcagttgtagccaagaagaagcccatcgaccgcctaatcaacgctctgcggcacagtgtagaggatgaccgtacggacgtcaagaggcagaaaacacggcatgttaacagtgccctggcgaacgagatcgacgccatgaacgccaagctgatcgataccgtggttagaatcgccggtgagaaagatggtgggacagagattgaattcagctacactgcagtgtctcttgcactagacatgaagcagctatttgcagcatatgggacgtctcctgtcaagccggtgaaactattcgtccctgctgattaccctcgaagttctccggtggtctcgaacaacaacgatgatggagatgaacagcggcgaggaatgttcggcgagatctcgggcatggtcagtgcggcttttcactgcgcgctgcgtgagctcccgccgtccatgtcagtcaagcagatggcctcggagtggaattcctgcgtgcagatgatcatgaagaaatttgcgatacggcacggtggaggaacgttcagctccaggcatggccagtggatggattgcaccgttgaatgatttagtaccgtgaggtaccgatacctcgagatactttttgttgtaccgaagcaaatctcttaattattacatgaggatgaagtgatacggagaaccgtatttgatctgttgttattgctgctggagggtacatgcataatccgctctgtgtatcatttgttttgattaagctggtattgcttttgatatttctctgtctggattttgtaattggaacaagcaaaatcgcttgtaggacatgtatttctgaaaatggtaactatctatctttgaagagcccaacaaagcatttagagttttattggcaaacaataggttgagctcgcaggcttatgcaatggtggccaaacagttcaattcctaccatatatttccttctgaaacttttaccggaactgaactgttttagctgaaagcaacaacatgggacgtctgcaatgcagacaatcaactaatcaactaattaagcgaattttgcatgtgttcaaaataccggaaagattttgtgaggagtatgaacagatggtgagaaatttttggtagggacatgataaaggagaacggaaggtacactcgattggttgggaaaagttaatgagtcccaaactattccgaggacttggttttcgggacattagatgctttaaccaagccttactagcaacgcaggcatggagactgttcgataatccagataatttatgtgcttgggtgctaaaggtgaagtactatccaaatggatcactaattgacacggccttcccttcaagttcatcgccgacttggaagggcatcgagtatggactagagttgttgaagaaagacttgatatggatagttggagatgggcaccaaattaaaatctagaggagtcaatgggttgcacatagggaaaacccagtgattctgtagaagaaggcctggaatcgtctcacgtatgtacatgagctcatgttgccggaaaccaaaacgtggaatcagcctttaatcagacatgtgtcacgcccagaaattcactagtaatttccgaactaatttgtgcattaaatcctcgtccaggaatcagccaaggtacacaaactgacaatttaatatacagattcatcaaattaactaaaacgataaatacttacttaagaggcacttagttctcaccatgaagaaaactgcagcggaaaataaaatctagcgaagctccggctccactcccacaggcagctcaactggggtatgagccaaacgtcttctccttctgaatcctttttcttcaactgaggtttgatggttattgcaaggtgagcatatgacatactcagcaagccacacaacaaatatgcaagtgcacaaggataccaaagaatggtataatatagggcttatttgcaaaagcagcatttagcaaacttttgagaattgtaaaacagtagagcaattaatcatcaatattaatcaacactgtacaacacacccatgctgcacaggcccaaccatcctgaacaaccatacccggctgtacagatctatctccaaaccaggaatgtaccattccaaaccaggagctaatcaaattattatcagttatagcatcttttattatggtgagaagtgtgagactaatcacgaaagacattgttagacccgcccataactgcgggcacggctattcgaatagttttactctggccagaggtgtaccactgtacccacaagacacagccccacgacatgtcaccatgcgcctcaataccaccacggtacctcggaaaggagctgtgacagtacccctcgcacaacacaatccaccacagtgcaccgttcctggatcataatcacccccttataaacaaggtatggactccccagcgacccccgtgggcttatctccgccacttctcagtctagtgctccgcaatgaaccatgctatataaaaggtaaagccgttgcccatactggcttgtggttggcacggttaatgtttcacaaccgaaactcatgaaccggtccttaattgtcatgagcacgaccatcaaaaccatgtgctcacaacccaccattatcaagttttagttgacaatttaattaattaaccaatcacgattgaccatcgtgagcttccattaaatatccataagtgatagtgaagcatgatttatcccattaatgagctaatgtttctaagcacggctaagcaactataaataacatctagctgaaccaatccaatatataaggtccatgctagtcaaattataacccataggaaaataaagtcatctttggccataattaaatgggaaaggctcaccacccaatgacattcgaaaacaatgcataagttgaaataaatcaatagctttaaacaggttcaacatgctcaaagggttgtttgggggatctgtgtgacttgccttacaaacaagcgtcttcaattcgtcttcaggaacttctccaacgaacgaacgatcctccgaaacaacgggaagtctaaacctaaaacgcaaaacaaggaaaaacactaataaaaaccaaatgaacagtacaattaaagttcataagggtagagtttgaatttagatgaattatgagacttgaacgacctcattccgagttcgtatgaattagatatgaattttacaagatttaattccaattaaacctattaaagaaaagactattccaaattgattaaacaatttacaaatgatttatagctgagacagaagattaaaacatcctccggaaaaagattagatcatatttagtagatgacatatattaaaaaggaataatatgtcattgaaaagagatgacaaatttatattaattttggatggtcaagatggcgctgatgccagcgatgacatggctgccatgcaggatcgacgaccgcaagcacgggaacggcagttaccagcgaaccacggtacaaagatgcaaacgaagggcaccgggagagagaggagatcaaggcgacccttaccaccacttacgcgacacagacggcgagggagatggcaggcgacgaggcggcgaccttgggttgacgatggcgacggctttccggcgacgagaggcagcaaccgaagggcggacggtcttcacctcggtcctgcgatcccgagggtggtgacggtgagtgaaggcggcgatggacggcgacgaacggcgcggctgaagatggaacagatcggcttcacggtgacgacgggcttcccggggtcttcgacgatggggaagtggaggccggtcttcttctcctcgcaaactcaacggcggcagcggcgaccgaaggcgacgaccacagcgacggcgcggggctgctggagcggcggccggaggtggagagagaaggcgagcgcggggagagcgattccggcgagattcggcgcaagggaacgggtggccggggtagctctcacccttgcgaagccgagggaggcgacggcgcaggtcggggtcgaccgaggaggcggcgcgacgcggctggagggtcaccggcgtcggcggcggctagggcaaggcggcggcggcgctacaagcgacggctcggcttgggacttgaggcaaacggaagaggaggccgaggggatgctatttatagccggaagagggagagatcggctcgggaacggatggaatcggcgacggattaggtagggttcgccggaaaaaggaaggatttgatccgcgaaattggaaagaatttccatataaacttttggggatttcttgggggaaatgaagaggagattgagaggattccattcccacaactaatttggaaataggagcaacggagaggacgaatttgatggggaggcggcgctgtacacgggcacggcagggaggatatcggccggctggaggttaggggcgacactgtagcagagggggacaaaacagacttatttccgggcttcatttcctcggcccgattgaaggaggaaggcaaatagaacttcgtcagagagaggaagagaagatgcaggctcgggttgggccggcggaagagagaggaaggaagggaatgggccggattcggcccgagacaaagaagtggattttgattgactttttaatttaaataattgctgaaatgatgtttcatttattaaaaatacttataatgctcaaataattccgggaaaaatccagaaaatatttggacactaaaaatatttaataaagttttatctatatcaatttaatgttcaaaattttcatatattttattcaaacacttactttaattattaaataaattctaaaaattcctttttttacaacaatttataatatagcgattttcagggtgtgacatagtccaggaaaatgatgcatccgaaattctgaagatcaaaatacctggaagggagatgtcggactttccagcatggcatcttgagaagacaggaattttcactgtcaggagcgcctataggttagcatggaatcaatcagggaaggctcgtgtggaatcttcatctagcacggcgacaaatggtgaaaggaagctttggaagaatatatggcaaacaaatgctcaaccaaaagtgagaatttttgcatggaagctagccaggacagattgcccacttggggaaataagggcctgtttaattcgcgaaaagaaaatttttgggtgtcacatcagacgtttgaccggatatcggaaggggttttcggacacgaataaaaaaactaatttcataactcgcgtggaaatcacaagacgaatcttttgagcctaattaattcgtcattagcacatgtgggttgctatagcacttatggcaaatcatgggctaattagactcaaaagattcgtctcgcgatttcccccctaactgtgcaattagttttttaaaaaatctatatttaatgcttcatgcatgtatccaaagattcgatgtgatgtttttgggaaaaactttttgggaaccaggattcttgtggttccggggaatccagctacaggagaaccaggaacggggagctctcccctgccctaagagaaagagaaagatagaacagagtggcatatgcccgatctgcgggatggctgaagagaacgggtttcatgtacggtggagtgcactctagctagaggtttacgggaggcaatgagaacacattggctattgccggttgaaacgagttttgcatatacagggccggactggctgttagtgctgctggatagttcgcagtgttcagaaaaggcacatgttatgtatttactctggagagtttggcacctgcgaaacaacatgatccatggcaaaggaagtgcatcaattgctgatttggtcagtttcttggttagctatgaaggccaactgttgccaatccgacaacaagaagatgaccacaaaggaaagggccctatatacatggaaccgaaccagatatctctctctacaagtatcagcaaactgactgacaaatggtgtccaccgccggagcgcttcgctaaactgaatgttgacgcaggttatagggaagaaaccggggatgctagtgtcgggtttatatttagagattgcaggggtttggtgctattggcggcccaaagaaccctgcatcaatgtggctcagctgtctaggcattggcgctagcatatatcttgagggactcagagcggcgactgacttgattcacatgcccattgtgttggagatggacaatgcataaattgttagggatttaataagaaaggaacagctgaaatcggcctgggcgacgacaattgaagatattaaaggagtgatgcaaagtgcaagtgcacaagataaagagagaagcaaatagggtagcacatgttttagcacaaatggctgtcttgagggactcagagcggcgactgacttgattcacatgcccattgtgttggagatggacaatgcagaaattgttagagatttaataagagaggaacagctgaaatcggcctgggcgacgacgattgaagagattaaaggagtgatgcaaagtgcaagacttgattcatatgcccattgtgttggagatggacaatgcagaaattgttagagatttagtaagacaggaacagctgaaatcggcctgggcgacgatgattgaagagattaaatgagtgatgcaaagtgcaagtacacaagataaagagagaagcaaatagggtagcacatgttttagcacaaatgacaatgagttgtaggtcctacgcggagtggaggttgtgtgctcccgcaagaattctagacttattaaatcaggagtgtaatcccttatttaagcattaataaagctctctttaccctcatttttttttgcatgtgctagaatcgatcgcagaatgaatacgaaaatgcgtgtgccatattccgttctactccagttgggttgaggccatggcttgcgtacatggtggatttgtgggcttctcgttctgggccagaggaaacgagggacccaacataagaatataacaggctgtgggctcgtgggctcaattttaatacttcccagctagcattcgacaccgtttttggatttttagttttccaaatttatttctgtttgttttaatactttgtcaagcaatcaagttataataataaaatataatgatttttttttaaaaaaacagtcaagataggtttgtacttacacttagctcttatatggtttattaactaattgagtgaaatatagtttgggccatttttatggttgaagattcactttggacctccttttaaggtaacattttcactttgcaccattttaaggccctgtttagagtctaacttttttttccaaacttctaacttttccgtcacatcgaactttcctaaacacacaaacttccaacttttccgtcacatcatttcaatttcttcaaactttcaattttggcgtggaactaaacacatcctaactctattttcttttagccacatacaacttcgtctctggtaaagaagtagattgaacacaagtgtgagagattgccagcatgtggatgtaagtgcgcttgaggctgttgatgtgcttgagaaaagagttgttgtggttcaaactgtaataaaggtagatttatctagtccgaagtaaaaatattagataaagatagttcaacgtaaaacattggcaataaaagttagtccgatccaaaccacagttttaggcatttgatttcaagcttcaaattgtgctcgaatttttttatagttttttatggattttttttgagaaagagagcgtaagctccccatttcattaacaaaatgcaaattaccacatgttcagtacagagttcagaaaactaaaaagaaagaaaaacttgaaatatataatatataacatttcattaactaaagttcagagttttttatggaatatataatatattatgagtccctaatatggatttgacaccaacctctttaaatttagttttaattttcttcattcattgtcacgacgttccaaggtcttatttaatctggaagaagtggaaaatttggctcgtcgatcgtagctcaaaataaccatggttagcattcgaatacgactacaaaataaacatgacatacttttcaaaaaaaataaattgtgaagcccatacactagaacaggatcgcttatctgtgacgggctgaaagcatcatcactatcgggtaaggcccccgtcaatgggcaaaggtcactgatgtgaggaaaaatctcaatcgggcaaaagcccgtcacggatggatgttatctcaatcgggccgaaaacaaagcccgtcacagatgagtatgaccagtcaaaccagcgtagtaagaagcctgtcacggatgactaatctcaatcgggcacaccactaagcccgtgacggatgagtagtcatctccatcgggcatttagccagagcccgtcactgataggtttgacgccacgtgttgagtcaaactagtcccggttcggacgacttatctctatcgggtgtattctaaaagcccgtcacggatgactaatctctaacgggctggactctatagcccgtcacggatgagttatctctttcgggcattagctaaatgcccgtcagggatgagtttagaaccaaaaaaaaaataaaatttgtctttttggctagcctcagacctttgctagccatgcccgctgcaaaaatgacagaagcatatatatatacatagtcccattcccagcaaccccattcccagcatcaattcacatattccatcacagccatttcatatagacccattaccagcatcacatcagccaattcacattcatattccatcacagcacagtcaattcacaaaatcaagcacatatacattcacatccacaacccattcacatatatgtcattcacatccatttttctctccaaaccgccgacatgcatcaaaacctgcaaaaataagttataaattggaacaattttatatgtaactagaaatgcaagtatatacagagacgagctacctaggactttactctaaagaatataattgtattacaaagaatatttacaaaaatcaaatgtttgtcgcatatgcattgcaaatgttctgccattctgagacgagctacctaggacttcactctaaacatccctttcggtgacaagatatcatctagtatgaattgtgctatctcctctctaatgatttcgaagttgatttctggaatccttgaaataaattcctgcatgttcggcgccaagttagtctacatacttgtaaatttgtcgtcctatgtgtatataaacaattgaattacacaccttagggtcgagcaatgtcaccttgtctgcgaagctcctcatgttatggcagacatggaacccacactggttgctaacttgttgacatattgggaagtctttcttgtgaccgagtttgggatgcccatccttatgcctcccgcctcttgccacgtattggtcccatgcctcgttcaaggaagattcgatggccgaccaatcgtatatttctggcttgatattggagttaaggtagtgtaccaaactccacttcggcgttattaccagaagaatccaatgtcgcctgcgaaattattaaattgccagttacatactacagttgtacgcgttgagtatttgagtataagtacggtacacgcttactgttgattgtaggcgcacataatgaagtccttgtcttgacgggcaaataagcagtccttgatataggtcaccatgtttgctcgatcatttttcagcgttgtcacgttgacgacagctggatcgagtaaggcaatatggggtgctttacgatggacatgcttccaggttaacctacaagcaagacatgagtcagggtaagcgtaatttatggacagtcgctaccatatcgcgtaccaagaaatacttacaaggagtagcacttaaggaggttggtgtcgatcgctcgcaccctatagaggtcccatagatctttgaagtctacggcgatgaaggcagtaggcccgaggaacggctgaccatcgtgctggcccaacatggaggtctctctattcttcctccttgcattggacttctccctgtagtacctgtgcaactccttgcatgcagggcccatcttgaataaggcatcgtctccgaccaatggcatgcccaatgtgaattctgctggaggctttggaggagctactggtgccttgccaagatcaagcttctttggggctaatggcacctttatttttcctctccccgttccagcagcttttctgcgtgtgtcaagcttgggtggagaagatttcgccctcttgctccttttcgcagaaggggggaggtgcggcctgctgtcaacctccataccgtcgtcccaaaaatcagtatcatactgtaattggagatcttcatctctttgttcaacggcaggagggagagatacaacagtttgatggggatgcgtcggcggcggacgagaacttggcgctggccttggagttatattgatctcaatgttgtgcttgggccattgaataaaggtcccacgtgcagccccaagggtcagaatctcgtcattaggtgggtgtgggatagtgtagccaacccaatcgggcttcactaagtccacctgaactttggcattgccggcttgctgctgcgccccatgcactcgggtctccggggtaggcttgaaagcttgaccctctgcggcaggaattgcaaatcctggtgtcaccctaacgactagggtacacgatgtgggttcctgcgatagattcattagtgtccttagtatatgttgcaa

SEQ ID NO: 20916 - DNA, 2943 bp, Oryza sativa
  unsure (1)..(2943): unsure at all n locations
ttaacataagatagtggcaacggtagcaagttntagtgggatatggatgtnnagtngagatcccgtctgctccgaccctaaggaatatggatgctacatatctgctgacgaggcgaatgcagatagaacacacaggcaaccaaaacccttcctatccaagatttctagacttatctctaacgtaatcatcagcaaactcctagatttctagaaatgttgtatttgaacgaaatgttctgtttaccaatttgtcttggtcggtaccgtgcaggcagtaacctgaccaaaccagatttggcaaccaggacacttcgtattctcctaaatgccataatttcagtaacttcatttaataacagatttctatgcatatccatcccatttcctatgacccatttaatattattcttgtacctaaaaaaacacaagtcatgacatataataagtttggcctcagttttgctcagaaattatgcttcaattatcatcatttgcaactgccccacccccaaaagaaattaagaataagtgtagagggtctgtccttatgcaaaaaagaaacaagtgtagaaacccacatttaaacctaaacaagaacaagagtgaggccggcccaacaatgcatccattttgcaaaacatcccatactgccactcccccccaaataaaatgaacaagtgtagatacaaaacagccataaaaaacatacaaaaactcacaattcccccaaaataattcaaccatcacagcccacatcaattcatccatcccattggacccaaaatatcccaaaaatggtatgttcttgagcaatcatcactggccattcatccatcatagcccacaatatttcatcatcacagcccacatctaaacaattttcccaacatcccattctcccccaaattcacaaattcatccatcacagccatataaaaatttatcactagctaacacatatagaaatgcacaagtcatcacagccatataaaaattcaccactaggtaacacatataaaaatgcacaagtatcacagccatataaaaattcatcactagctaacacatataaaaatgcacatgtcatcacagccatataaaaattcattattagctaacacatataaaaatgcacaagtcatcacagccatataaaaatcatcactagctaacacatataaaaatgcacaagtcatcacagccatacaaaaattcatcactagcacaagtcatcatatgtagacattagcatctaaacattgaatcaacaaataattgcactatcacattatcgaatttaaacattatcatcgaatcatcaaatcatcacatataacatgtacacaacaaatcatcacattatgcatcatcatcggtgaggagtacctaccttgcacggtggcgggctcggtgaggaggttgacgtgggctcggggacggcggtcttgggcggcaccgggctcggggacggcgtggagggaggcgccgggctcggggacggcggtcttgggcggcgccgggctcggggacggcgtggagggaggtggtggccgttggggaggccggatcttgagtggccccggcctcggggacggcggtcttgcacaacggcggcggtcggcaatcgatagagggaggcagcggcgtggaggaggtcgacgtggcggctagcacgaggtcgacggccactgggcatagatctggagaggaggatgtgggacggccgtggttggtgaggccggatcttcgagagaggaggaggcgacagcgttgaggacgaggaggtagcggtcttgaggactaggcggagaggaagccggcggtggcggtcttgggcgtggaggacacggacttggaggaggaggaggcggcgtcagcggtggtggaggaggacgaggtggcggcggcggtggatctgagagagtgagagtgtgagagagtgagaggcggcgtcggcggtggataaggacccgtggatgaggattgactaaataaaccctagtcaatcctcatctctatcaggcagactattatgcccgatgcggatgacacttatccgtgacgggcgttagtaatctacccgatacggatgatacctatccgtgacgggcattagaactaagcccgatagagatgtaataatctctatcgggcatagtactaaagcccgtcacagatgacttattaaaatatttttaagttataaaaatcatttataattatcttctgcccgatttaaaattgctattacatttgatttatcacatataattaacaaatgtcttatttacatagttcaaaattcctattaattttttaaaatcatataattgacaattgcctttctcacatatagtttaaaattcctattaattttttaaaatcatataattaacaattggctctctgacatatagtttaaaattcctattaattttttaaaaccacataattaacaaatccatttcttcaaagagttttaactggaatggcatgaaacatatgcaattcattcattaaggctccaatacaaattaaatacatcattcacagtgatatgccttccgaatggtctaaacaaacgtaagccacttcgtcttcgggatcatcgtcaaggtcgatctgaggtctgacatgaagattcttgttgtattcttcttcatcgacaacgttgtccacccccacaattcttcgcttgccatccctaacgacgtgcatcttcttttttgcggggtcttttatgtagaaaatctgttcgacctgcttcgctagtacgaatggttcgtctgcgtatccaaccttggccaggtccactaatgtgaagccttccttgtcgaccatgacacctgtgcggatattcacccaactgcaacgaaacaaagggactttgaagttcagatagtgcagctcccatatctgctctatgcggccatagtatgtgcg

SEQ ID NO: 20917 - DNA, 614 bp, Oryza sativa
caggcgccgtggctgtgagcccgcagcagctgcacgaggctcttgttcgcgatcacacggaccacggcgagcgcctcgccggcacgcctcctcagcagctcagtgaacgggctgtcccacctcccggtgcgcctccaccagaggacctcgaacgacatggtgtaccagtgctcgatgtacggcaggtgctccgccgccacgcgcgcctcaccgctctcccacctgctcgacacggtctccccgactggccttagccgcagggcttgggtcagcaccatcgacagtgttgccacgccacgcctcatcgcctcctcgccggtggcaccggcgtcgtaggaggacagtgccccgatggcgcgcagcgaggccgccctcctgagcggcaggccggggatgttctcgaggccgccaataaggtcgcggtaggtgttgcggaacgggagacgcctggcgttgtcggggaggacgtcctcattaccggggaagacgtgccaatggccgcttcggttggcgaagccagcgaaggagtagtcgtgtttgtgcacggccaggtgcacggtgcaccacgtcgccgtcggcgcctttcatgctgacaccgtacttctccaccacca

SEQ ID NO: 20918 - DNA, 704 bp, Oryza sativa
tccctaccgccgacgagaaaagctgacaagagattttgtgtgaataacctgatgtttcatatgcatattagtacagatcatcacaatgaatttgctgtaaatttgcttgattaccaccgttaccacataattacacccgacgcaatttcaaacacgtacaacgaatgctgaaacaatcccagcgttcactaacacatcctacacaaagaaggttcagatagacgaccgatcgatctacagtagattgtacaaaagaaaaattggacgaaatggaaaacccaaattcaaattcgaatgaagtatgcatcaaaaaaaaaaaattcgagcattgcatcgacctcatattctcaatgaattctcaagcctgaatcgactgaattcgtcgagctagctagcgcgccatggtgatcgagccgtccttgatgaggctgttgctgagcgtcttgaaccgctccctcgagtattgccgcgacgccttcctccaatccgtcccggatttcatcatcgccacgaactcctcgtagctgatccgcccatcctgcatgcaaattcagagattgatcagtttcagagtttatttgggagagctctaacgcctaaatttaactccgagagccgagtttgcagtggagttgtggaggaggctaaacccagttacatttctccagttcattttgtaagagcgcttcaagggctgcaggaat

SEQ ID NO: 20919 - DNA, 14549 bp, Oryza sativa
  unsure (1)..(14549): unsure at all n locations
gaatccaattctttccaaagcgatttagccaaagattccaagggagaaagggtagaggagatcccgaggatcatttcccctctatcaattcggccggagaaggaaaggaacgtccggatttggaaggagacggcggcggcggcgcgcttagggttcgggccgggccgaaacggcggcttcggggaagacgaacctgacaggtgggacccacctgtcagcgaccgaacgcgcgcgcggcgcggctgtggactgggccggactgggccgaggagagagaagagaggttttgggccgactttcggtccaaagccaaaagaagactttttaaaacctttttcaatttaaattatttcttaaatgcaattccatttattaaaaatactttcttagctcaaataaatcccagaaaaatctaggaattatagaattaagcaaagtatttaatgaaattttatctgggcccattttatattggaatttattaattaaaattagatcttctctccaagactttttaaaattatttctaaaaattccaattaaacaacaatttatatattttgaattttcagggtgtgacagatttgcacctcctctgcttcttagtttcaatacgaagtttgtgatcttaatgtagtcttctctactgcggtttttgttggctctttgccttaagccttaccctttggcgttgtacaggggcttgtctccttgatctgttgctttaatatatgtttaagtttaaaaaaaagatggaggagaggcatgcacaccactgagctcgtcggaaagagagagaaagaggatcgggccagcgccggcgacggtggcgcagccaccgcggaagaggaccgggccgacgccggcaatggcgacgctgccaccgcggacgaggaccggaaagggtgaagaaggggggagggggagacgggagctcgaggtcgatcagcgccgccgcttgggccatgccgctgccgcggtcgttgggggtggaagagagggcgccggcgaagataggagaggggagagggggagtagctcgaggtcgaggctgcgttctcggtcgatccgcggtgccggaggaggaggaggaggaggaggaggaggaggaggaggaggggaggcacggcggaggtggtgctccgacccagacggccgccggctgacctcgccgtccaacagtactacgccgcggagcttatgttaagggagggggaggaggaggaaaggtgntnttnnancnngtgctnggccacnccaccggtcccgttcggcttggttggcccggcgccgtcttccgcccggctttctgtggtggggaaaatttgaaaagaaagaggggataaagagggaaggtgaaaagtgaaaagaaaagtagtactggtgggaaccactataaggaacttgtactgtggaacatgtgactaacattgttcttggtctaggtggcatgtgaagcccaccaaaactttgtgacatgctatgaaagcccttaggactttgctatgtgtaaaagatagttttattagcaagttttaaatagtttttctctgaaattactcatccaatcttcaatctacttacaccaccaaactcattgtaattaaatctccacaacaagatcttacatgattatattctgaccaaaagaatatatgtttcagttggaatccaactacgttgcacattttaactttatatgttctaatgaatttttatcaaatgttgcatgtggtgtgttacgtggatgtgacttagtccaatgttttattgattcatttgaaaatgttgcacattgtattatatgaatgtttctgtaaaattacgtaatgtttcaaccatcgcacctcgatgttttatatagtatataaaagtattttacttaaaaatataatcatttttactcataatatgatcatgcgggatctttttataaggatttaattataataaatataatggtataatcggattgtaaattagatcaataatttaggagaaatatcatttaaaaattgataaaagatattgcatggatgtgcgtcaaacctacgcatgacagagaagacaggagagacagaggagagaacaaggagtgcagcatgcaagcatgcagagatggctacaccaaatagatattgcagcatggagaagggcgctcgactttttcaattttatcaggcacccgacccatagtcttgtcggtacatttatgcgtgtatttgggtatcatattgtaggatgagtttttgacatttataaatatggtgtattaaccaggcaacacctaccacacttcaaaagtatttgtccacaattattttttatcagtattgtttctataattttctaacatattactttgctttatagtatgtcgtacttaattcatccttatagactttaattatttgtaatctttttccccgcaaaaaatatatttataatcttttcatcatctaaaaaggggtaaaataattttgtttaaaaagcattttatattagtagtggcagaggcctttcaagccctaaaacaggaactcattccagctcctgaactagctatgccctaagccttatttttctcaggttgtttgtggttgagacaaatgcatcccatcaagatattgtggctgtgctgatgcaaaacgaccatcttatcgcttttctgagtcacgcactgggtccacgacatcagggtttgtgtctacttatgaaaataagagcttagctatcatgttggtgattgaacattaccgtctgtatctccagcatgatgagtctatgagccagaatgcatcgagaaggtccaggaggagtacgtttgttgatttttagatcggcaataacagaaggggtagcacagagataatgagttagagtattcggagcaagtgtgtgccctcaacttcactgtcgagcacatagaggcctcccaacgcgtgccacttccccaaacgaacgactcctctgtctcggcgtcgcacacggtgcaagatggctgcccactgcccgaggacaatgacacgcacttccacagttataccttcctggcacatcccactggcgcattggaattcccgacgtacgacggcaagggtgattcgctcccgtgccgctgcgacaggttcttccatggccaacaaacaatagagaatcgcaaggtttgatatgtgtttttgtatctaaccggggatgcctagttgtggtattgcaggcttgagctcaacgccggcgccccatcctggcggcgatttgtccaattggtgcacacccgttttggcccaacaatgatagatggccccctcagcgaactcatggcgttgtggcgcactggcatggtggaggattacatcaatagcttccttgcgctggtgtactgcgacgctatgctctcggagaatcaacacgttcaacttttcacggcaggcctcgtgaacccgctcaagacagatgtcacgctctgtcggtttcgctccctggattacgccatcatgctagcctgggactacgaacaacgcgtccacacttatcccattcccacacgggcgggccgcgcaccacgcttgcactccctacggcgcccgtggctgtgcctgtggcgatcgcgccaggcgacgcatcgtcctctgccgacgttggcaagcaacccctggtgactgccctccctcataagcatctctccctagcagggatggcccagtgccgctctaagggcctctactacaattgcaacaagaagtacgtcgccagacttcgctgctagaagtccttcgtcattgagttcatcacgttgggtgaatcgagcatatcgttgcatgccttgactggtgtgcactcgcccaagttcaacacaatcaagttccttgctcgcactggtgcgacggatctcgtcgccctcctggacttcagctccacccacaacttcataagcaacaccacggcatgacgggcgaacgttccgctccacccctatctcggcctcagtgtcgccatggtgaatggagaccacgtgacgtcgcccggtcggtgtccgcccagcgcgtcaaaattaacaattgtcctgggtgcaccttcgacatcgatttctacgtgctgccactgggggctatgacaacgtcctgggtgcacaatggttcggtacactcgggtcatcttgtgggattctcctgctaattgctcgcctttagcccagtcgataaccgcgtcacataggtgaggatcgacactctgccaccacccgtccactccatggccatcgacggcacctctggcgaactcatgaacaaactactcaatgacttcatcaacatcttcgccgaaccacaaggcctaacatcagaacaacacatgtgccatagcatccgcctagagcacatggagttcgccgtcgtcgtgcaccctgtcgaaacatgatttcggcaataataaaacggggtaacgcacgagacctaaaagtggatggatgcagagacaaaggatttagacaggttcaggccctctcaatgagaggtaataccctactcctgtttggggatttgaatccgccgagtgtgtattgatctgacgatcaggttgtgtcatgcccctagaggggctccctgccctccttatataggttggggggcagggttacaagatagaaaccttaaccaatacggtatcggtttcctaaatctactttacaatcttatcaaaccaggactttaggccgttccataatatacagggaaacgtaatacccaagtcatgatctgttacatattccatacatatatgttatcccctattactagtcggataaccatgccgtgtgggtatggggtacccataatctccacagtagcccctgagaccttcacagtcgaaaatataatcttctctcgaactagattactctaaagccgagtgcttcaatcatcttcgccatggtctcccgagtacttttaccaaatctgaagactgtggagggctgaaaaataaagtcaggtgcatcgaatagatgcacctaataggtgtagcccccaactatgtgattagctgaacaaactaaacatatagtcaaggaataaattatccaattaaccgagtggtttttgataattatagtcaaccaagtgacttgataccaatatatagcatatgcggtgtgaatccccgaataatatgatccaagtgatataccgactgcttggcaaaatatgatgcgtacaacctaaagttgacaacatctttgaaagttcacatagcaaaataattataaagaagcttgaatgctgtgaataaagaaatttccaaagtattgggcatacgccatgcgcacactgctttaacagatgtgcttaagtccctaaaagacacatggtttcaccacacctggaaatatatggcatatatggtataacattcgagtaagtaaactcataaaggatttaccaaccgcctgaaaaatgaccataatatataatcagcctaagccataatattggtcaataaaaatgcacacatacgtggcaaaaagcaatgatattgtatccaatcaattgcttgataaacccaaacagcgccatgactatataaaaaagtcagcgggacagctatataaagctttactgtttgacaccttttaagatgcattgtaccaactcctaaaaagtcgagtaactgcggtataaaaggattttaaggtattgggcacttgatcacgcgcactttggcctaagcgaaaagtgcctaagtccctaaaagaacgtgacaggccacacctgaaaatatgggctgcagacatattaggcctaggccaaaaaatatgccttcgacaccctttaaaggatgacgcatgtaacatgctcccgagtaataaatcttccgggtaatatagaccaagtgtagctcatatgaatagcttctgatctgaatgattatcccttatgggatactccaaaatagatgtaacaattgaatcccgactggcgcaagtattcagttgataacccttacggggaataataaatagtccagtctttgagcatataaaatagacccatgatcatgaattcatgttgcatgtatccgaagcaagtccaaattgaagatataatacttgtatttgagctagtaagcccctgagcatatagcttgtccttctgtcatagtcaaaattgtctattggcaatagctgacgcagtcggcatggagatgaaatgaccaacatgaagacgaaattgctcatcagaagtaacggaagatgtcagtggtagtaaaaacagtgacaccaatcaaaagtaatgaagtcgcatagccatggaggcgaagaaaccagtcggcggcagacagatcaactatcaatgaagatgaaagcgcccggcgataaagttgtgtagccatgacagcgaaataatcagtcggtgacagacgaggcaaatcaaaggcgatgacgaaatccaccaatcatgaagatgaagaaaatagtcggcgacgacaaatgcaactgacatgatgaagatgacgatgtcggtgatccagtcaatagcagtgtcgcaaccaatgataatgacgaagacgctcatcagcatttgcatagtaggtcaaccgtgaaggtgaaataataagtcggcgaaaacataatcatccattagcaacagcagagatgtcagggtcgatgaagcagaggtgctggtgatgatgtcagtgacaataatccatcaaattaatgttataactgttgtagatgcttcacttggaggagagttgatgttgttgcccaactcgtctaaaccgaaatatttgaagttgctgaagtagagtgtctgccccgaagcaaagatgaagataatgactcctggagttgactcgttggctgattaattgatttcttcagcgtgacataaaatttgttaaattttgagccttgtatttgtgtagcccccgactctttgattagttgggaaacaactgaacatagagtcgagaactgtagcatcttgtcatcgaatagttattgcttgattgaagatatgtgttgaagatgtccaagtagaaatcatgaatgttggagagccacttgttgtagtaaaataacacggcatcgcatgccgagatgtcgagattcacaatgtcgcgaccgggaaaattgccttttcccgaacgctagtgtattaatccccgtcccaggaaaagccggggtacaccatacaaacatgatataaaagacacatctttattatatcggtaatatttacattattacaaaggcacttaaggcctgacaaacaaaaataaacagcagcggactagcggcctacggctccatcttcacaggcgctcaactggggtataagccaggactccacctaagacatcttctccaaagtttctcttactgaagggggaaaagattgagcaagaatgagtacaaccacagtactcagcaagccacaccggagatgcataattaatgcaagggaggtacaagggaataataatatagggattaagttttgcagtaaacagcatttaaaagtcacttagttgcccaaagccattttgtaaagacaatcctagagctacacagtattattaaacaaggccgtgaaccctcacgaacctgccttaacccaaggcctacgatgatttggaccgaactggcaacccgacctgggtcccagctcgtcccaagccaacccaggccaaccattccatattttagttgttgagcaaattttaagaattaaaacactgacttgggtacattgctaggcttgcccatatccgagggctcggctattcgaatagatttactctgatcagaggtgtacatctttacccacaagacacatcttcctcacgtgcaaacacgtgccacataccaccacggtatacggacggaagacgtgacatagttcccaacccatcctagccataaacaagagtaccgacccaatcccacctacggccgggatacccgggacaggtaggcagaactgagcccctagcagcagggcaccaaccctctgccgtatgacatctcgactaccgggccgcagcccgtgtagccttcatttgccctggagaatgtccatcgacacccgacttcatccatctccaatccgtgtacttttgtttaagactagactgagccacaaactaagccttacccattagacatgtggaagtacggtagtgctttgcaacagaggcccgagcttaatccttatagtggccggggtgctacttcccacaactggcatgcacccaaaccccaccaaaaacaggttttaggggttttgaaagaggacgagaggtgtgtgtccaattccaacataagccaaccattccatagtgtccaaatgatatgagaattcccaaagtctaaagttgtaaaaccacctaaggttgcctaattaatcagcgaagcatctacctaaattcatactagtggaaccaggaatagagtacccactagttggggttttgtttattctagggtgaacaaggtaataataacaataacaataatagtaaggtcataacaaaggtaaataggcatggctaaataaaacagtgataacgcgggaatttaaataaagcgataatgcattaatttaaattaaaataattttgtaaactgggatttcaatatgctcaaggatgatgtgacttgccttgctcgctttcccaaacgacggcttcgacttccacgaagagcggatcttccgaagctgcagcgtctacacggccaacggaaaagaaaaggcttttactctaataaactccatacaacaagcaggaacaaagcacaaaaatgggttctttacatcttaaggaaaaattagagacttgaacggtccaattccgagttcaaatggccaagataaggccatttgaagtttatatgctctttaaatggatatttgcgaatttcttcatttaaattttaatttaaaaacgaattattgcgtcagccgaggggagagggcgcgcggaccgggtccatgggggtgggggcccacgcgtcagcctctcggtccacggtggaccgggagcacgcggctggcggcggtcggcgccgtgggtcccacgcgtcagccgcacccgcgggcgcgggcggctgacggccgggcccacttggcagccgcgagggcgcgcccgagggcggcctcgccggcgcggccgacgggagcggcgcgcccgcgccccgatggtcaccgccggcgaccaccggtgcggcggagcggcgcccgagagagcggagagaagggggaaagcgaacggcggtcttcggctcaccccgggacaacgacgacgacgagaacggcggccggagcggaagaaggcggcggcgcggttcgggatgacgatgacggcggcgctccgacggtcggcgagcgaaacggaggcgcggacgaggtcgacggcgatgcggcgatgccgagggaggtggcgccgagccgggaggaagaccggagcgacggcggcggcgaaccggagcggaggaaggcgacggcgcggttcgggatgccgagggcgacggtgctccggcagtcggcgggcgaagcggagcggcggacggggtcggcaaccactcggcgaagccgatggaggtggcgccgagtcgggcggaggaccggagcgacgtcggcggcgaaccggaggtcggcggcgacggcggagagagaggagcacggcgcgagcacggatccgacggcgagagcgagcggcgagcggcggaaacggaagagcggagctcggggagcaattatataacaccgagagggggagagcgcggccggggagagaggaaaccgcgcgcggagatctcgggcgccattgaagacgccggcgaacttcgcgggatgaatccggacgaatccgagggagagagagagggaaaagagggggaatcgggagagggaaacgcggggagtaattcccctctctttaatgcgcgcggggacggcgggatgcggcgcaatccgcggcggcggcggcgctagggcacgggcgcggcggcgggcgcggcgggaggaaggcgatgacaggtgggccccacccgtcagcgagagcggcgggcgggcccgcctgtcagcggcgcgcgcacgggggaggagccgatgggccggggggaaagagagagagagagggagggaatgggccgagccggcccaagaagggaggaggagggggaaaagacttctttttagggttttctttttataaaacctttttaactttgtttatttcttttcaattattatttgtgctctgaaaattccactaaaatttgagggctccttttagaccaaggagaatttaacaaaaattctccgggccatatttgaatttttcttggacgtattttagtgtttgccaatttcttttcgaattttaattaattctattattccttttagaagatgatttttattttgggatgaatttatcaggacgtgacaaatccaccccccttacaagaatctcgtccccgagattcgaggaggctagcaagaagataggttgggcggtcttctcttcttgtctgacttcttccgttgcgtcttgacgaacttccagcaaaactttaccactcggaactgcttggcttgacctcctgttgcggatggaatcttctcttcacctgacttggaccagggtgcaccttttggctgactcagactaggttgcggtagttcagtgatgcttccgttccagaacttctcatgcttcatatcttcggagtcaacctcagacaagttaccacttcacgtcatgcgtcaacactagcttgtcattactaggatactatgtttgtcatcataagaatatcatgcttgttattcacttctaacttgccatcaactgtctcatattagctttcctggtctccggtgctaggtacttcggctattcgatgcaagggtcaaccactctaactataagttatgcttcccaagagaaccaatttatcccacttgacatactttgacgtcttcccaaatagttttactgctggatttgttattgtctgatcgtgatcctgccagatctgaagcttcgttgttagaggtgatcttaatctgacctctgtagactatcttcgaacatatcacttggttcataactgggaatggctctcacgaacaagcagctcggattcactttctttacattcagtttacttcccattattatcttcaggttgtcctcagttagcattcaacgtattcctttacacttttaaccttgatgtgttctttcccattggatcatctcccaagacttggcattacctggtaaccggtgcttgcacttttcacttcgtgtagcatctgataccgagttgaagatttcactccttgccttcatagaaacatttttacctaggtcatcttgcttacttaatgacaaggtggctgttgtggggcaattacaattaggggtcttccttgagcgatgcagagcatgtttctgtttatcaatcacctttcggcctacttctttcatgctagagaacatctttgtcaatctctttttatcaatcatctttcggcttatctctaacaggtggtattctttaatgtggattgcggacgcttctggggacgatgaggtcctttggcttgctgcctttcagtgaaaccttgatgtggtgcgtcaaaagctgcactgactaccttcagggaaatacattgcctgctatctgtatctataccactagggtttaattgccgatggtcatctttagtgcttcctcgagatggggagcatccaaattgttcttctgccacatcacctttgacctttttctgataccagataaactaattaccaaccatcgactattatgttctcaaatattgatgtctcctggatctccttatctgttggcaggtatatccgatcttatcaatgtagaggtatggcgggtacccttcggggtttcctccaacaatccttatcttgatctgtaaaaggcgtatccaaactcctatcctcaactactgtctcgttggctttttaacccaacacagtttaattgtttttcttttccatccacaggttggctattaactcgaggttagaatatagttcctctgacacgagaccctaggtctcctttgtcagtaaacaattatacacatgatcacatatccgcatctttcaaacgaatcctcatggaacttgtctgtattacacatttctccctcattacatgaatacggggcactgccttaaacaaaaagggacggtgcttaacatcggtacattgtatctactatgggttagaattaacatgaggcctcacaggtacggcgtttgctccagtgaccacaaggcgagtgacttgtcttcttcttgcataatggccggagtgatggcgcaggttacgcttcggctgtggacaatctctagagaaatgtcctggtcctttgcagttgtaacaaatcaacgtcttctttactgagctgtccatctggggacgatcattttgacttggagttggaattggtggttgggaatccttgctaacattggcatcagtggtaccattattgctatcaccattggagtccttcccagagtcaaaattgctagggttgtcattctgggtgccttcattgatactatcgtcgatatcttggtgaatgatgttgacattgcacgcttgatctaagtggtcatgaatggggcaagaaccatggttgttggtggtatcatcagcattagtattgctattgttgttgcctgcattgcgttcatcttcttggggcaggaactcttgatacacaacagaagatccggtgatctgaagtggctcagtgcgctgtctttggttaccacctggaaatactgggttgttaaccatccttctcttgcagttcgtcatccgattatgctcactttcgagttgcatggctttgtccacaagtttctcaaaatcttcataatcctctagaagtagttgcactgcaagctcatcttttaacccctggagaaacttctcttgtttgtcttcatccgtttccacatcttctggtgcatattgagccaaacgatagaactcgtgcaggtactctgtgacggtcaaatctccttgcttcaggtagcggaactctcgttttcttagtgtgatcattcctgcgggaacatgtgatctcttgaatacagatgaaaactcgttccaggtgatggtatgtccttctggccgtgatgcttcgtagctatcccaccactctgaagccggtccaaccaactgatgagttgcgaagccaacccgctcctggtcggtgcactgaatcaaccctagcttcttctcgactgtgcgcaaccaatcactggcttccataggatcgacggccatggcaaaggttggaggccccgttttgagaaattctgataacttgcactgttgctggactgtaggtacttgaacgttggttgcccctgctgggttgttccgattctgtaatagttgaaaggcggttgccaacatgttggtttggttaaccacaatttggattagctctggtgaggtttcgttgatgcttttctcattcccattggcttgggttcttgagtcatcggatccatcattcccatagcctttgttaccagtgttatccatctgtcacaaggtaggggttgagagaggaagcatacaaggaaagaatataccagagctagggacaggaccttaaaggaactaactctttttattgatgtgttgtttgttatgcttattctgcaagttgattaaacaaacaacctaacatggtcacatcacaacccaccgatgcaaaccacgcactacacacacaagcaaggaacacacgactaacaacactaccctatagggcggcttaggttctgcgacgggttttccaagatcttcactcctgcttcacagctggcttcactgcttcctttgctacgctagcggatcctgcagtcttccggagcttcggcaaacaactgacgatatctttttcttcacaaatctgaccaactagtactaattgaaatttgaagaaggaagaaaagagtaaaccttttgcaaatagcattaggggaagaagaaaagaggaactttcgcaaatagttttatttataaaatatgtccttaggttttatccatttggcttatcctacagtcgagatggctctgataccagcttgtcgcgaccgggaaaattgccttttcccgaacgctagtgtattaatccccgtcccaggaaaagccggggtacaccatacaaacatgatataaaagacacatctttattatatcggtaatatttacattattacaaaggcacttaaggcctgacaaacaaaaataaacagcagcggactagcggcctacggctccatcttcacaggcgctcaactggggtataagccaggactccacctaagacatcttctccaaagtttctcttactgaagggggaaaagattgagcaagaatgagtacaaccacagtactcagcaagccacaccggagatgcataattaatgcaagggaggtacaagggaataataatataggg

SEQ ID NO: 20920 - DNA, 17298 bp, Oryza sativa
  unsure (1)..(17298): unsure at all n locations
cgggatgaatccggacgaatccgaggaagagagagagggaaaagaggggaatcggaagagggaaacgcggggagtatttcccctctctttaatgcgcgtgggaacggcgggatgcggcgcaatccgcggcggcggcggcgttagggcacgggcgcggcggcgggcccggcgggagaaaggcgatgacaggtgggccccacccgtcagcgagagcggcgggcgggcccgcctgtcagcggcgcgcgcacgggggaggagccgatgggccggggggaaagagagagagagagggagggaatgggccgagccggcccaagaagggaggaggagggggaaaagacttctttttagggttttctttttataaaacctttttaactttgtttatttcttttcaattattatttgtgctctgaaaattccactaaaatttgagggctccttttagaccaaggagaatttaacaaaaattctccgggccatatttgaatttttcttgtacgtattttagtgtttgccaatttcttttcgaattttaattaattctattattccttttagaagatgatttttattttgggataaatttatcaggacgtgacacacaacaacgttgtggttggtgaagtagtaaaacttgcgaagtagcaacaatagagtttgccggtgccgaagataataaagatgaagtcgctccaccatgatgacaaagttgtattgctgtaatgaagtgaacacaagtcggcggcaacagaagcaaaccggtagtgaagacgcgcagttgtgaagataaaagcaccagtcggcggcggcataacacgagtcggcggcggaagacgatgatgtccatcagtagtggtagctgtataaaccagatgtagaggcgagggcactagtcagcagcagacgagacgaccggcgatgaagatggtaaggccaatcaacactggcagaatcatgcagccatggaagtgaagaaaccagtcggcagccatggcaaacgtaggtagcttgtgttgaagatactgatgcctattagtagtgacagcgatgtagccagccgtgaagaagatagcatcagttggcgtcataacaggccagccgtgcaggcggtgacaccagtcggcggcggatgaggcggccggtcggtgaagacgtagacgcccaacaacggcggcataataggccagccgtgcaggcggaaacaccagtcggcggcggcgaaggcaagccggccggtgaagacgtagacgcccaacaacggcggcataaaggccagccgtgcaggcggaaacaccagtcggcggcggcgaaggcaagccggtcggtgaagacgtagacgcccaacaacggcggcataaaggccagccgtgcaggcggaaacaccagtcggcggcggcgaaggcaagccggtcggtgaagacgtagacgccctacaacggcggcataatagaccagcgagcaggcggaaacaccagtcggcggcggacgaggcagccggtcggtgaagacgtagacgcccaacaacggcggcataaaggccagccgtgcaggcggaaacaccagtcggcggcggcgaaggcaagccggtcggtgtcacgtcctgataaattcattccaaaataaaattcattttctaaaaggaataatagaattaattaaaattcgaaaagaaattggcaaacactaaaatacgtataagaaaaattcgaatgtggcccggagaatttttgttaaattctccttggtctaaaaagagccctcaaactttacttgaattttcagagcaccggaaataattattaagcaacaaaaacaattaacaaagtttattaaaaagaaaaacctaaaaaaaaataatcctcttcctccttttcttttgggccaattttggcccaaagtctcccctctctctctttcggcccgcggccgaagtctccccctcctccctctctttccctcctctcccgggcctcccctccccctcccggcccagctccctcccctcccctctctctcccgggcctcctctccctcctctccgcctgggcctgcctcggcccagcagcccggcccagccgccccagcctcccgagccgccccccccctcacgcgcgccgcacgcgcgttgcacgcgcgcctggccgcgtgggtcccacccccgggtcatcttcttcctcccgctcggcctcctctctctcccgtgaaaaccctagttcgttcctccctcgaatccgcgcgatttaagcgttggattccaaaattaattgggggaaattaatcccctttcctccctctcccttttccccctaatctcccctttaatcgtgcactattttgaccggaacggctgcgtcattcatggccgccttccatggccgccgggcgccttttccgccgccgttccccgctcctcccgtggctggctccctccccacgcctataaaatggaatccccattcttcgttctatcgttttagccccttcccgagcctccccgtggtcgtaccacccctccccgccttctccttctctctcttcgacgccggccggcctccagccgcctctccctcctcgccggagcgtcgtccggtcgcgccgtcacctcctccagcgtcgccgccacctcctccaccccggcctgccctccgtttcccgcggagacccccggaggcgcgttcccgccgtcgcccttctttttcctccgcgccggccgcctccagccgcctctaactccctgcctgagcgccggtcaacgtcgccaccaccttcctcggctccacgacgccgctctcatccccggcatcacatcctcctcgcccgaacttcgccggaacaccggcgcccgcgccggcttctccttcctcctcggcggcatctcctccggctgcccctttcgccatgcccgtgcgtcagccggcgctgccgtcccctccctcggcacggtgacgtagccctccacctcgtccacccctcggtttcgcccggaagccgccgcacatcgccgcgaatctctccatccgcctcgccggagttgttcggccgcccgtccctcctcgcccgtgcaccggtcgaccacaccactaccacctccggcatcgcagcggcaaggttgtcctcggcatcgtttcccctccatccaaacccctccgcggtccatcatcgtcgtctccgatcgttctcgtcgtcgacgtcccgtcggtcgcccggctcatcgtctcgcggcgccgcctccgtcatcatcatcgctgcggcgtgttccacgccgtcctcgtccccgtgcagccgctgccggctgtcctcgtcgcctcctcgccggtcccggtcgtcgtcgtcgtcgtcgtcctctcgtcgttcccggtcgtcgtggcgttcgtccctccgtcgagccgttctcgtccgtcgtccgcgttcgtcaagcgagccgctgcagccccgtcctcgtcttcgtcctcgcctccgcgtcatcaagcctagtgccggccgcgtctcgccttcgtccaaggatcgccgccgaagccgtcccctcgccgttcgtctccgttgtgcccgtctgtctccgccgcgcccgttcgtcgttgtcgttcccacgcctcgtcgcgtggtggtaaggttccctctccctcgctgccccgtcctcgtcctttcggtgtcgcccgtgcccgttgtgcggttgtcggccccggtacccgtgtaccggtgtcggtagtcgttcacgcgtgcgagtggtgaccgtgtggtgtctagtggagtccgtttgtcggccactcgcctcggttgacacacggggtccgcttccgtcgacccgtggaccgtctctgtgtacccggtctaccgcggtcctttaggttgacatgtggggtccgcatgtcaacggcgcagccttcctgtcttttccaggctagcgcttacacctgttttataattgcaaagcctaattacaaaaatccgcaaatctccatataacagcattaaacctcggatgatcatatcttggtcatacgaactctgaatcgacccgttcaagtctcctaatgtttgttataacctaaagaaccctgtgctttctttttatgtattgttattgcttctttataggtttgtagctttgcttgtgtgtgtcgcgtcccaaatcgactctaaaattcatcctcaaaattgtgcaaaagaataagtaaaattcatgtgaaagcctccaacaattaaaatgtgcaaagataaaagtcaaatgaggcttgtaggatttttgtatatttcctaaaagcctaaaatgcttaaataaattttagtggaattttcagagcacaaataataagtgaaaagaaataaacaaagttaaaaaggttttataaaaagaaaatcctaaaagaagttctttttcccccccccttccctcttgggccggctcggcccattccctccctctctctctctctcccccggcccatcggctccccgcgcgcgcgcgcgccgctgacaggcgggcccgcccgccgctctctctgacgggtggggcccacctgtcatctccctgctggtgccgagccgacgcccgcccgtgccctagcgccgccgccgccgcggattccgccgcatcccgtcgtctccgcgcgcattaaagagaggggaatcactccccgtgattccctctcccgtttccccctcttttccctctctctctccctcggattcgttcgaatcgtgcccgcattcgtcgccggcgcaatcaatggcggccgaaatctccgcgacggattcctccctctccggccgctctttccttcccccggcgctatttaaacgttgcccgagctccgctctttcgtttccgccgctcgccgctcactctcgccgtcgaaatcgtgctcgcgccgtgctcctccctctccgccatcgccgccgagctccgttccgccgccgccgccgctccggacttcctccttactcggcgacacctccgtccgcttcgccgtgttgccgccgaccccgtccgccgctccgcttcgcccgccgaccgccggagcaccgtcgtcatcgtcatcccgagccgcgccgccgtcttcctccgctccgtccgccgtttccaccgccttcgccgtcttggggtgagccgtggaccgctccgttcgtttcccccttccctcctctctctcgggtgccgctccgccgcgccgttggtcgccggcggcgaccatcggggcgcgggcgcgccgctcccgtcgccagtgccggagaggccgccttcgggcgcgccctcgcggctgccaagtgggcccggccgtcagccgcccgcgcccgcggatgcggctgacgcgcgggacccacggcgccgaccgccgccagccgcgtgcgcccggtccaccgtggaccgagcggctgacgcgtgggccccacttcccgtggacccggtccgcgcgcccgccccctcggctgacgcaataaataggatttttaattgaaaattaaatgaagaaattcgcaaatatccatttaaagagcatataaacttcaaatggccatatcttggccatttgaactcggaattggaccgttcaagtctctaatttttccttaagatgtaaagaacccatttttgtgctttgtttctgctgttatgtgaagttatttagtgttaaagcctttttcttttccgttggtcgtgtagacgctgcagcttcggaagatccgctcttcgtggaagtcgaagccatcgattgggaaaacgagcaaggcaagacacatcatcttgatcatattgaatcccagtttataaaattatgttgatttaaattattgcattatcgctttatttaaattcccgcgttatcactgttttatttagccatgcctatttacctttgttatgaccatattattattgttattgttataattattaccttgttcaccctagatcaaacaaaaccccaactagtggacactctactcatgacaccactagtttaattctaggtagatgcttcgcaatttaattaggtaacattaggaggttttacaactttagactttgggaattctcatatcatttggacactatggaattgttggtttatggtggaattggacatacacctctcttcccctttcaaaacccctaaaacctgttttcggtggggtttgggtgcatgccagttgtgggaagtagcaccccggccactataaggattaagctcgggcctctgttgcaaagcactaccgtacttccacatgtctaatgggtaaggcttagtttgtggctcagtctagtcttaaacaaaagtacacggattggagatggatgaagtcgggcgtcgatggacattctccagggcaaatgaaggctacacgagctgcggcccggtagtcgagatgtcatacggcggagggttggtgcccaatgctaggggctcagttctgcctgcctgtcccgggtatcccggccgtaggtaggattgggtcggtactcttgtctaaggctaggatgggttggaaactatgtcacgtcttccgtccgtataccgtggtggtatgtggcacgtggcaacacgtgaggaagatgtgtcttgtgggtaaagatgtacacctctgatcagagtataatctattcgaatagccgcgccctcggttatgggcaagccgagcaatgtacccaagtcagtgttataattcttaaaatttgctcaacaactaaaatgtggaatggttggcctgggttggcttgggacgagctgggacccagggtcgggttgccagttcggtccgaatcatcgtaggccttgggttaaggcaggttcgtgagggttcacggccttgattaataatattgtgtagttctaagatcgtgtttacaaaatagccctgagcaactaaatgtcttttaaatgctgtttactgcaaaacttaatccctatattattattcccttgtactcccttgcatttattctgcatttgtgggtgtgtcttgttgagtacggtggttgtactcagtcttgctcaatttttcccaagtccagaagaggagctccttgaagatgaaggctttggtgtctagctcgtgcctgccgtcaagtgcctgtggtcgtcgccctagtcttccgctgttttttttgttgtctttgtgtgctgggccgttgttgcccgtgtaataattatatttacgcttccgcttgttaaactctgaattgtatcaacttttggtgtaccttgcctcctgggacaaggaataatacacgcacgtcaggaacgcctgttgggtgatttccggtcgtgacaagttggtatcagagccacccttgaccctaggacgagccgtagatcccaagccttagctatattttcaaaaataaaaatcctttgttatttgtgaaaacccgctattctctcttgtcttgctgcttcatttatcgtcaaaatctggcctttaaaatgttgtttctctttttgtttttgtttgtagatggccggcagcgttacccgtcgtggtttgcacatgactggcttcgtcttggagctgcgaggcatgtgcgtggtcttggggtatccacacggagtggattaccaggccaggccgctcccggagcaggagggtgaggatgcagagcctcacgctggttgggaggtcactgcagtgatcctctccggctctcccgagcggacttcgctggcagtcaccgcgggtggggattccttccccgccgcttgccagaacgccgctctcctcgccatcggcacccttcaccagcgctacccggacgagttgcagcactcgccctaccgctaccaccctcgtcgcggaggagcccgcgactacgccaccttccgagacgccagctcggaggatgacgctaccgtcgtgcatctggcacgcatggtggaggcgtacgacgcggctcgtatcgacttccatcagatggtgcgccgtggcatggtggagaacaacatgaagatcctggagctgcgccaagagaatctgcagctcaagaaggacctcgacgcgttggaggcgcagctgcatcagctcaagatcgcccagggagaggacagccgtcccaagcgtcgccgcgtctgccgcagccagaagatcaccgcccgcaagagcacctccaggcccgagcttgttcgtcagtccctggcgtggacctgcttcgtcgagacccctcgtgccgagcctgcgcccgtggttccccaggagggggaagcctccggcgttggtagctcggagggtgcgctgttgctcaccttccgtcctggcccgtcgcagcgttagacgagcagttagtaggcttgcgcgtgtgtttttctctcgtttgtcttgttgagttgtgtggggcatggttatgccggtgtgtggcataactatgtcggagcctgtctttatttgtttgcctaagcaacttgaaccttaatgaaccaatttaatagcagtgataaatttaagaataatagtagtcgtgggtggttagttttaatcgtcagctctccttctctgtttgctggttctgtgtggggttttcagatggtgacgaccaggagaaatgttaacaccggtgaaggcaaccaacccgagggcagcaaccccaaccaccaaggcaatccacctccaccaccaccaccagacaccaacgccattctcacccaaatcctcgcccagcaagccaacatgatgaatgctttcctccaccacctccaaaatccgccacaacagaatgctccaccaccacccccacaacactctaaactcgccgagttcctccgcatccgcccacctaccttctccagctccaacaaccccgtggatgctttggattggttgcatgccgtggggaagaagctagacacggtgcagtgcagtgatgaggagaaagtcaccttcgccgcccatcagctgcaggggcccgcatctctatggtgggaccatttccaggccacgcagccagaagggcaacctattacttggactcgcttcaccgccgctttccggagaacccatgtgcccgctggagtcgtggctcttaagaaaagggaatttcgggagttgaagcaaggcaaccgctccgtgatggagtatttgcatgagttcaacaatctagcccgttatgccccggaggatgtgcgggaagatgaggagaagcaagagaagttcttggcaggaatggaccctgagctgtccgttcgtctagtctctggggactatcctgattttcaacgactggtggacaagagcatccgcttggaagccaagcacaaggagctggaatcgcacaagcgccgcttggcgaatttccgcaatcagcagggtgctaaccagagggtccgctacaccaatccctacccagggggatcctcctcgcagcagcagcagcagcagcagcaacctcgctccgcgcctcgacctcaattcgtggtgcgcgtcccacagcagcaacagcagcagaatcagcaagggactcgtgcgccacgtcctcctacgccaactgtgcagcctgttcaaggtcgcagggacgcttcaggtccgcagcgtctgtgcttcaactgcttcgagcccgggcactttgcggataaatgcccaaagccaaggcgtcagcaaggccaagcgcctccccgctccaacaacggtggcaaggatgtcattcggggtcgtgtgaatcacgtgacggccgaggacgtgctgacaactccagacgtcatcgttggtacgttcctcgttcattccatccctgctacaattttgttcgactctggagcttcccactcgtttatatctgtgccattcgtggggagtaatcagttgggggtagaaaggcttagaaaccctctgcttatcaccacccctggaggggttatgacagcaaagtattatagccctgccgttcctatagaaattcaggggattccttttccctcggatctgattctgctagacaccaagaatttggatgtgatccttgggatgaattggttggcccaattccaaggggtagtggattgcgcgaggcgcactgtcactctgtaccgagggccagaacaaccggttgttttctttgcacctccaacctctgtcagaagttcagaacttcatcagataggactgtcagaaatccccatagtcagagagttcggagacgtgtttccggaagagcggagcggcgcccgagagagcggagaagagaggaaagcgaaaggggcggtccacggctcaccccgggacgacgaggatggcggaaacgacgaccggagtggaggaaagcggcggcgcggttcgggacggcgaggacgacggtgctccggcggtcggcgggtgaaacggaggcgcggacgaggtcgacgacgacgcggcgaagccgaagggagcgatgccgaagcgggagacggtccggagcgacgacggcggctgaccggagctcggcggcgacggcggagagaaggtgcgacggtgcgggcttgattccgacggggagagcgagcggcgagcggcggaaacggaggagagaggcacggngaacaattatatagcgccgggggagagagagaggggccggagggggaggaatcggccgcggaaatctcggccgccatcaaagacgccggcgaagattgcgggagcgattccaaacggatccgagggagagagagagagaaaagagggggaaaagagagagggaatcacggggagtgattccccccactttaatgcgcgcggggacggcgggaggcggcggaaacggaggcggcggcggcgctagggcatgggcgggcggcgggagcggcgggaggaaggcgatgacaggtgggccccacccgtcagcgagggtggcgggcgggcccgcctgtcagcggcgcgcgcgcgggggagggccgatgggccgcgggggagaggagagagagggagggagagttgggccgagccggcccaagaagggaaaagggggggggaaagaagacttttagggtttttctttttataaaacctttttaactttgtttatttcttctcatttattatttgtgctctgaaaattccactaaaatttgagggctccttttagaccaaggagaatttaacaaaaattctccgggtcacatttgaatttttcttgtacgtatttttagtgtttgccaatttcttttcgaattttaattaattctattattccttttagagaatgatttttaattcgggatgaatttatcaggacgtgacaaatccaccccccttacaagaatctcgtccccgagattcgaggaggctagcaagaagataggttgggcggtcttctcttcttgtctgacttcttccgctctgtcttctataacaaacttgtctaactaaacttctccactctggactgcttggctcgatctcctgttgcagatggaatcttctcttcacccgacttgtccctggttgaacctttagctgacttcgactgggttgcggcacttgaagatggggcttcagttccagtactttgcgtagttcatatctttggagtcaaactcatacaagttacccacttcatgtcatgcgtcgagatcagctcgtcattactaagataccatgcttgtcatttgcttctaactcgccaccaactgcctcatactagctttcctggtctccgggtgatagctacttctgctatttgatgcaagggtcgataactttgcctttgaattatgtttcccaagagaaccaacttatcccacttgacatactttgacgtcttcccaattggctttactgctggatttgttgttgcctaatcattatcctgccaaatctgaggcttcgttgttagatgcgattttaatctgacctctgtagattatcttcgaacatatcacttggttcataactgggaatagctctcacgaacaagcaactcggattcactttctttacatttggttcacttcccactattctcttcatgttgtcatcatttagcattcaacatattcctttgcaccttccgccttgatgtgttctttctcgatggattgattgctaggaaagtgcgttgagcgatactagtgcaggtgcttttattctagtagcatctgatacaaagcccaaggttgaaccgagctttaggttccactgttcaggttttacttcttgacttcttggtcatgtcaccaaagtttccatccttgtccccatagaagtacttctacctgtggtcatctctcttactcgtgaattcacctactttaatgacagggcaactgttgtagggttgtttgctatcgggagtcttcctcgagtgacacaaatcatggttctcgttatcctttatcaatcacctttcgacctacttcttttcccagtaaccaaacatcttttccgatctcttccattaatcacctttcgacctttctcaaccaggtactcttcgctccgggtgttgaggatgcttctggggcaatgaggtgcttgggcgtgcggtctttcagagaaaccttgaagtagtgcgtcaaaagctagactgacgattgttgcctttgatccgaagagacacatctgaaactcttagtccgaacaaatgcctctttggttgatcacttgattttcttcgccatcaatcgctaggctatttgattcctaacagattatgggtttacggaaatgagaccctaggtctccctaatcaacaacaaaatgtgcaccactcacagcacttgcactcttaacatgggtccttcataagcttatcaaactcattcattatctcatgtttctctgttattacatgattgacggggaacaactataaaacaaaagtatttgaacactgatataagagtattatggttgcttctgactagcgctaggcttatcaggtactgcatttgctccagtgaccacttggcgattggcatgtctgcttccttaacaggtactacagtttgtaacagacaataactttcttacgctcgggttcttcatcttgtacttgatttctttggctgctgtgctggaacatccaaaggtacaatgccgatactggcctctgtcttgtcaactgatgactggggctgaaattgagcattgacaccttgtggtaatgcactcgctggagttggagctgttgcaacgcggtctataggactgcttcgggatgcatggatgacaattcgctgaggagcaagcttctgattgcaaggagttgcgtggactgacgtgctggcagctatgtttctcggtctggggcacttgtcggcgaaatgacccattccttgacaattgaagcaacagatatcttcccggacttggcattttcttttctattatcaggttggttattaactcgaggttcgaacatagttcctctgaaatgagaccctaggtctcctttgacagtaaacaattatacacataattccatatcagcatcttccaaaataaccctcctagaacttgcttttattacacaggtctcccttattacatgaatacaaggccctgccttaaacaaaaagggaaggtgcttaacatcggtacattgtatcctcaacaggaatcatccataaatatagcaagctcactgtttatagtcatgactatatttatttattacatgattgctgcaaactttctattacacaatgataagtagcgaactgaaaaccacaaacggggctgctcattttgattcaggagagatatagctggcattgtcctagtgactgcatccttgattggttctgtgatgatgtggtaggactgcgtattgctatcattcacaggagaagcttccttctgattgctgtttgaagcggatgacggttttctgcttggtatcgccctcttgaggttgattgccctttgcttggcctggagtaggtcggggagagacacaacttcttccatcgacgacaattctttgctgaggctgtcggtgcagagaatggttggtgctaaagatattattgctatgatttattgcagagttaggtggagcaggaggagcattggtgttgtggatgatatcgtcgatgttgctgttggagctgactagctgacgagacaatcgtagggtcgttcgttggatttctgcggtcttggtcaacaacacactgagttggcaatccttgggcacatggtttgtaccttcgcacacaaaacatgtgaccttgcgggtgggacactcccctggtggatggtcttcttcacaataagcgcagagtgtgagacacatgctagcaacgtgtccaatttctccacaacgggtgcatgcttttgattccatctcttcctcaccgagatgtcggggagactcatcttcatcatccgaggagacttgatctgacccttcactatcagatactctgccaccatggcttagaaggtgctgggtcaactgtcgtgcacctcggaaggtatttcctctttgacgtctaggaatagttatccctgcggaaggccattcggtgctgctaatagccatcttacgtacttcttcttcagttcgcatcggcgcttttctcttctgattcttactcttcttgcctttggcttgcttagtacgtgaccccacgtggtacgaaaggctaggaggaaagcaattcccgggattccatggattctctccattgggctctctactttgcacactaggctgcaagcttgtcttggtgtgaggaggctggtttagtgatgtctgccctgctaaaccaaaggaaggggcttctttggcatatacccatggacaattcagggcatagtgtccttgttctctacaatcgtgacaaaaggggacatcctcttctggcattggaagctcattgacctgggtggcaaatgctcgatcaaacacatactgattttggtcttgacttccaaccaatggtagctgtgaactaagcggcatgcttggaatggaccaagggtgtgccctggttaactctcttgaggccagtggtggattgagttgaaaacttgagttacttgaggcatacccgctgacattctttcctttttctctgttaaacatctgttacagggattgaggtgagagaggaaacaagccaggaaagaatagaccagaactagagacaggaccttaaaggaactaactcttcttgctgatgtgttgtttgtttcacttattctgcaagttgattaagcaaacaacctagcatggttacatcacaacccaccgatgcaaaccacgcgctacacacacaagcaaggaaacacacgacaaacgaaacactagagggtggcttaggttctgcgacgggttctccaagatcttcactccttcacagctggcttcactgcttccttcgcttcactagcggatcctgcagccttctggagcttcggcagacaattgacgacatctttttcttcacaaatctgaccaactagtactaattgaaatttgaagaaggaagaaaagagtaaaccttttgcaaatagcattaggggaaggagaaaaagaggaactttcgcaaatagttttatttataaaatatgtccttaggttttatccacttggcttatcctacagtcgagatggctctgataccaccttgtcgcgaccgggaaaattgccttttcccgaacgctagtgtattaatccccgtcccaggaaaagccggggtacaccacacaaacatgatataaaagacacatctttattatatcgataatatttacattattacaaaggcgcttcaggcctgacaatcaaaaataaacagcagcggactagcgggcctacggctccatcttcacaggcgctcaactggggtataagccaggactccacctaagacttcttctccaaagcttctcttactgaagaggggaaagattgagcaagaatgagtacaaccacagtactcagcaagccacaccagagatgcataattaatgcaagggagtacaaggggataataatataggggttaagttttgcagtaaacagcatttaaaagtcacttagttgcccaaagccgttttataaagacgatcctagagctacacagtattattaatcaaggtcgtgaacccacacgaacttgccttaacccaaggcctacgatgattcagaccgaactggcaacccgaccctgggtcccagctcgtcccaagccaacccaggccaaccattccacattttagttgttgagcaaattttaagaattaaaacactgacttgggtacattgctcggcttgcccataaccgagggcgcggctattcgaatagattatactctgatcagaggtgtacatctttacccacaagacacatcttcctcacgtgcaaccacgtgccacataccaccacggtatacagacggaagacgtgacatagttcccaacccatcctagccataaacaagagtaccgacccaaccccacctacggccggaacccccgggacaggcaggcaggattgagccccctagcagcaggacaccggccctgtgccatgacatctcgactaccgggccgcagctcgtgtagccttcatttgccctggagaatgtccatcgacccccgacttcatccacctccatccgtgtacttttgtttataaccagactgagccacaaactaagccttacccactagacatgtggaagtacggtagtgctttgcaacagaggcccgagcttaatccttatagtggccggggtgctacttcccataactggcatgcacccaaacctcaccgaaaacaggttttaggggttttgaaagaggaagagaggtgtatgtccaattccaccataaaccaacaattccatagtgtccaaatgatatgagaattcccaaagtctaacgttataaaaccacctaatgttgcctaattaatcagcgaagcatctacctaaatttatactagtggaaccacgaatagagtacccactagttggggttttgtttattctagggtgaacaaggtaataataacaatagcaataataaggtcataacaaaggtaattaggcatggctagataaaacagtgataacgcgggaatttaaataaagcgataatgcaataatttaaatcaacataattttataaactgggattcaatatgttcaaggatgatgtgacttgccttgctcgctttcccaaacgtcggcttcaacttcccgaagagcggatcttccgaagctgcagcgtctacacgaccaacggaaaagaaaagggcttttactctactaaactccacataacagcagaaacaaagcacaaaaatgggttcttgacttcttaagaaaaaattagagacttgaacggtccaattccgagttcaaatggtcaagatatgg

SEQ ID NO: 20921 - DNA, 797 bp, Oryza sativa
cctctcggtccacggtggaccgggtgcacgcggctgacgccgaccggcgccgtgggtcccacgcgtcagccgcaccgagggcgcgggcggctgacggccgggccccacatggcagccgcggggcgcgcccgaaggcggcctcgccggcacggccgacgggaggcggcgcgcccgcgccccgatggtcaccgccggcgaccaccggcacggcggagcggcgcccgagagagcggagaagagagggaagcgaaaggggcggtccacggctcaccccgggacgacgaggatggcggaaacgacgaccggagtggaggaaagcggcggcgcggttcgggacggcgaggacgacggtgctccggcggtcggcgggtgaaacggaggcgcggacgaggtcgacgacgacgcggcgaagccgaagggagcgatgccgaagcgggagacggtccggagcgacgacggcggctgaccggagctcggcggcgacggcggagagaaggtgcgacggtgcgggcttgattccgacggggagagcgagcggcgagcggcggaaacggaggagagaggcacggggaacaattatatagcgccgggggagagagagaggggccggagggggaggaatcggccgcggaaatctcggccgccatcaaagacgccggcgaagattgcgggagcgattccaaacggatccgagggagagagagagagaaaagagggggaaaagagagagggaatcacggggagtgattccccccactttaatgcgcgcggggacggcgggaggcggcggaaacgga

SEQ ID NO: 20922 - DNA, 7553 bp, Oryza sativa
tttcgtgattagtctcacacttctcaccatagtaaatgatgcttaaattggtaataatttgattagctcctggtttggaatggtacattcctggtttggagatagacctgtgcagccgggatggttgttcagaatggatgggcctatataacagggtatgttgtatagcgttggattaatattgcttaattaatacttaactgttttattaaattctcaaatgtttgctaaatgctgcttttgcaaatggatccctattacgccatcctttgttatcctgtgcacttgcatatttgctgcgtgacttgctgagtatgtgatatactcaccttgcaatcattcatcggaggaagagttctacaatgaggctgatgctgtggaggattaggtgtagccttggtcaagctgcctgtggagtggagccgtctgcgccgtttatttattttccgctgcttagatctttattgattgagaggaactatctacctctgtaatgacattttattcgcttattaattagagtaataattgtactctattatcaatttgttattgtgcctcggctgattcctggacgagggttcacacacatgtaagcgtttggaattttggatagaaattccgggcgtgacaaaatcgacgaggagctgcggcaatgctgcgacgattgcaaccttcggtctcctttggcgtgcagactgcttgacaaacctgtaatccccttcggtcacctccacagaaactgcacaaattggagatttgatattgagccgtagattttggtgtaggcttcaccgggctcaaccagaattcaccatggagttcgtcgttgtatctgaggagcttgagctcaatccgaacaacaaactgtggagattatggataccccatatctacacggcggttatatttagactggtaataggataccgaatatagatataatatctttatttgtatctcgggtttgtttcttaacttgtacgtcaaggaaataccctgaggtttagtcggttacgattgtattttatctgtattctcgtattctgttaggggtatgagttataccttataatacggactccttcctctatataaggaggggtccgagtccttcctgggacatcaattttctaggagatcttacattcaataatacactcggtggtttcatccccggacaggagtagggtattacttcttgaataagaaggcctgaacctgtataaatcctttgtctccaaacccatccacttttccagcttgatagccacccccttttagtattgccgaaatcttgtttcgacagttggcgcgccaggtaggggttgcgtcaagcttttcgccgatcagtgcaatgggttccgtctccggcatcgacgacctcgtcttcccacccgggcaggcgtttcggttcggcagcctcgagttcatcaccaatgacttcggcaagatctctctcctcgattcggaattggaccagtcgggagagagccggatctcggtcccgtttggagttcctaacgcggctgaaatatactccaagtccatctcaatcgagtcggcttcaaaccactcggacgagatcgcatcttctccaacgtcatcagatcgagatgatggggcttacccaccgattctaatgaagctccccgacgatttggcggccgtcttcaccaccatgacgtccccatcccgtaggcctaggcggaggtcggcttcaacaccgatatcgcatagctccagggaagttggcgtcatcttccagccactcggctcagtttcgacggaccagctggatggctactggagctctcccgccgtcgactcgcgtccgaccgagatcgtggactacaatgagttcggctttcacaacaacgacccagatctcgacgacttcgatgaaagcttagaagacaactacacccctctctatttcggcgtctttatggccgataacgagacggaggagcaacgccaagcccgggaaaccgaagcacgacgcgaggccgagcggcgccgactggaggaggaacgtgaagcacaagaacaagaacggctacggcgtgagcaacaggagcgtgagcgggccgcaaaggaggctgaagaccggcggctacgagccttggaagcagggcaccgagcgcgagatcttatcggccaacaagacgttgaggggacaccggttttccgcaccccacaacagaatgctgttgccgcgatcaccctcctcgacaccctcctcaagagaacgagctcaatcagtctgaccacgtcgtcaacatcttgaaccagaccaagaccatgattgcggcttcggtcccagttaactccggaagcgtccgcacgtcgagtggcagctgagtcccccatcttcgatctcacgactaccaccagccaagccttagcatcactggcgcaggatctaatcgcaggagcaggggtcacgacgagtgatctgtccactcgcctcccgaccatcatagggagcgccgagtggaatgacctcgttcgccacctcgtcgtcgccccgtcgatctttgcgacacgatcatacagcgccgggcagcccgaggccatcatcattcgctagatcgccacgacgacgacctagacggagttgccgctttcaccaacgacctgcgtcgagtggattggccagccggctttaagccgactggaatagagaagtatgacggttccaccaacccggaatcatggcttaccgtctacggtctcgcaatccgcgcagcaggaggagatagcaaggccttggcgaactatttaccagtggctttagcagattccgcccggtcctggctccatggattgccccgtggtacaatcggatcttgggccgaattacgcgaccacttcatcgccaacttccaaggcactttcgagcgccccggcacacaattcgatctttacaatgttattcagaagtccggagaatctcttcgagattacatccggcgattttctgaacaatgcaacaagatctctgacatcaccgacgatgttatcatcgccgcattcaccaaaggaattcgccacgaagaattggtcggcaagttcgggcgtaagcctcccaaaacagtcaaacttatgtttgaaaaagccaacgagtacgccaaggctgaagacgccgtcatcgcatcaaagcagtcgggctccagttggaagccaaaaaaggatacaccggctacgggagggggtggaagatcatcaaagcgttcgcgcgtcaacacgttcgacaagatcatgaactcccaatgcccgcatcatcctaagtccaaccacgcggccaaagattgtttcgtctacaagcagttcgcggaacaatacaccaagactacacggaagaactccgacgaaaaacaaagcacgtcgaagaagaaggacgatggcgaccccccggcaggtttctaagaccaccgcaaggagcttaaccacatcttcggcggccccttggcttatgaatctaaaagaaagcaaaagttgactgaacgggagattaacgctgttcagcccaacataccccaatatcttcgatggtcagagacagcaatcaagtttgaccgctcggatcatcccgaccgagtggtccacccggggcgataccccctggtactagacccagtggtccgtaatgtcaagcttcgcagaaccctcatcgacggtggcagtgcactaaatatcctcttcgccaaaaccctggatgatatgcagattcctcgctccgagttaagaccaagcaatgcgccttttcacggagtcatcccagggttatctgcaactccactcggccagatcacccttccggtcacctttggcactcgggaaaacttccgcacggagaatatctgcttcgaagtcgccgatttcgagacagcataccacgccatactcggacgtctggcgttagccaagttcatggccgtcccgcactacacttacatgatgatgaagatgcccggtccccgaggagtcctatccctacggagcgacatcaagcaagccgtcacatgcgataaggaaagttgcgagatggcccagactcgcgagatggcgtctgcccgagaagatatccgactggctgcgaccacggcaggcgaaggagaagtgcctgcgaccaaggtctcgaagagcggagaaagcgatgctaagactaaaaagattcccctagatccttctgatcccactaaaactgctgtaataggcgccgagttagattgtaaataggaaagcgcgctcgtcacctttcttcaaaataataaagatatctttgcgtggaaaccatctgatatgcctgatattcctagagaggtgattgagcactccttgcacgtcaaagaagacgctaaacctattaaacaacgactccgccgcttcgcacaagacaagaaggatgcgatcaaggaggtattaaccaagctgttagcagcaggcttcattaaagaagtcctttatcccgactggctggctaacccggtcctagttcggaagaaaactgggcaatgacgtatgtgtgtcgattataccgacctcaacaagtcttgccctaaagatccttttgggttgcctcgcattgaccaggtagtcgattcgaccgccggctgcgagctactcagttttttggattgctactcggggtatcatcagatccgactgaaggaatccgactgcttgaagacttcattcatcacgcccttcggggcctattgctacatcaccatgccattcggactaaaaaatgcaggagcaacttatcaacgcatgattcagagatgcttctcgacgcaaattggccgcaatgtcgaagcttacgtggatgatgtagttgtcaagactaagcagaaggatgatttaatctcggacctagaagaaaccttcgcaagcatccgcgctttcaggatgaaactaaaccctgaaaagtgcaccttcggagtaccgtcagggaagctgcttggttttatggtgtctcatagaggcatacaagccaacccggagaaagtcaacgctatcctcaacatgaaaccgccaagctcccagaaagacgtccagaagctgactggatgcatggcggcgctcagccgattcgtttcacgacttggcgagcgggggatgcccttcttcaagatattaaagaaaacagacaatttccagtggggacccgaagcacagaaggctttcgaagacttcaagaaactcctcaccgagccaccagtcttagcctcgccacacctacaggagccgttgctactatacgtatcagccacctcccaggttgtgagtacagtcttggtcgtcgaacgtgaggaagaagcccatgtccaaaaagtccagcgaccgatctactttgtcagcgaggtcctagccgactccaaaacgagatatcctcaggttcagaagctgttatacggtattctgattactaccaggaaattatcccactacttccacggtcactcggtaacggtggttacatcgtttccgctcggcgatatactgcacaaccgcgaagcaaacggacggattgctaaatgggatttggagttgatgtctttggacatatccttcaagccccgaacctcaatcaagtcccaagcattagccgacttcgtcgccgaatggaccgagtgccaggaggatattcccgcagaaaagatggagcactggaccatgcattttgacggatcaaaaaggctttcgggcactagagcgggagtggttctaatttccccaaccgaagaaagattaagttatgtgctttggatacatttttccacatcccacaacgtcgcagagtatgaggtgctcctccatggactacggatcgtgatttccctagggatcaagcgtctaatagttcgaggggattcacagctagtcgtcaaccaagttatgaaagagtggtcctgcattgacgacaacatgacagcatatcgacaagaggtacgcaaattggaagacaagttcgatggactcgagcttagtcacgttctccgacacaataacgaagccgccgatagacttgccaactttggatccaagcgcgaggtggccccctccgatgtattcgtcgaacacctttatgagccgaccgtacctcagaaagaaacaactcaagttgcggacactcaagacatagccatgattgaagccgactggagagagcccctcatacgatttttaacttctcaagaactccctcaagataaagatgaagccgagcggatttcaaggcgaagtaggctttatgttattcatgaaaccgagttatacaagaaaagaccttcaggaattctgcaacgctgcgtatctctagaggaagggagacaattgttgaaagacatacattctggaatatgcggaaaccatgccgccgcacgcaccattgtcggcaaagcttaccggcagggttttttctggcctactgcagtatccgacaccgacaaaattgtgcacacgtgcgaaggttgccaatttttcgccagacaaatccatctaccatctcaagagttccaaacaatcccactgtcttggccgtttgcggtttgggggctcgacatggttggcccgttcaaaaaggcagtcggcggttacacgcatctctttgtggccattgacaaattctccaagtggattgaagctaaacgggttgtcacaatcacagcagataaagctcgagatttcttcatcaacattgtgcataggtttggagtgcctaatcggattatcaccgataatggcacacaattcactcgcggagtttttaacgacttttgcgaagacttcggaattaaaatttgctatgcctcagtagcgcacccgatgagcaacggacaggtcgaacgagccaacggcatgatacttcaagggataaaagcgcgagtttttgaccggctaaaaccctatgctggaaaatgggtggaacagctgccatcagtactttggtctttgcgtactacacctagtcgggccacaggccagtcaccttttttccttgtctacggggcagaagcaatattgcctagtgaagttgaattcgaatctttgcgctttcacaattttcgcgaagaacgctacgaagaggaccgagtgaatgatctgcaccgattggaagaaatccgcgaagcagctttaattcagtcggcccgatatttacaagggttgcgacgctatcataatcgcaacgttcgatcacgagcttttctagtcggcgacctggttttgaggaaaatctgtcacgaccgggaaaattgccttttcccgaacgctagtgtattaatccccgtcccaggaaaagccggggtacaccacacaaacatgatataaaagacacatctttattatatcgataatatttacattattacaaaggcgcttcaggcctgacaatcaaaaataaacagcagcggactagcgggcctacggctccatctccacaggcgctcaactggggtataagccaggactccacctaagacatcttctccaaagcttctcttactgaagaggggaaagattgagcaagaatgagtacaacc

SEQ ID NO: 20923 - DNA, 3074 bp, Oryza sativa
  unsure (1)..(3074): unsure at all n locations
caaggcctacgatgattcagaccgaagtgccaaccggaccctgggtcccagctcgtcccaagccaacccaggccaaccattccacatttttagttgttgagcaaattttaagaattaaaacactgacttgggtacattgctcggcttgcccataaccgagggcgcggctattcgaatagattatactctgatcagaggtgtacatctttacccacaagacacatcttcctcacgtgcaaccacgtgccacataccaccacggtatacagacggaagatatgacatagtttccaacccatcctagccatagacaagagtaccgacccaatcccacctacggccggaacctccgggacaggcaggcaggactgagcccctagcagcagggcaccaaccctgtgccatgacatctcgactaccgggccgcagctcgtgtagccttcatttgtcctagagaatgtccatcgacccccgacttcatccatctccatccgtgtacttttgtttatgaccagactgagccacaaactaagccttacccactagacatgtggaagtacggtagtgctttgcaacagaggcccgagcttaatccttatagtggccggggtgctacttcccacaactggcatgcacccaaaccccaccgaaaacaggttttaggggttttgaaagaggaagagaggtgtatgtccaattccaccataaaccaacaattccatagtatccaaatgatatgagaattcccaacgtctaaagttgtaaaaccacctaatattgcctaattaatcagcgaagcatctacctaaattcatactagtggaaccatgaatagagtacccactagttggggttttgtttatcctagggtgaacaaggtaataataacaatagcaataataatgccttaacaaaggtaaataggcatggctaaataaaacagtgataacgcgggaatttaaataaagcgataatgcattaatttaaataaaaataattttataaactgggattcaatatgctcaaggatgatgtgacttgccttgctcagagggaacggccttccgaaccttcggcgacgaccacgaaccacgcttcgggaacctccgggacgacgaaagttacgcgaagcacacaagcaaagctacaagcctacaaagaagcaataacaatacataaaaagaaagcacagggttctttaggttataacaaacattaggagacttgaacgggtcgattcggagttcgtatgaccaagatatgatcatccgaagtttaatgctgttatatggggatttgcggattattataattaagctttgccactataaaatatgtgtaagcgctagcctggaaaagacaggaaggctgcgccgtagacatgcagacctccactatttgctttatctnatnataaccccactctaaggaccgcggtagaccgggtacacagagacggtccacgggtcgatggaagtggaccccgtgtgtcaaccgaggcgagtggccgacaaacggactccactagacaccacacggcctgcacacgtggaaaccacgcggctaccgagcggcacactaacgcggacactacacggtcaccacccgcacgcgtgaacgactaccgacaccggtacacgggtaccggggccgacaaccgcacaacgagcacgggcgacaccgaaaggacgaggacggggcagcgagggagagggatccttaccaccacgcgacgaggcgtggggacgacaacgacgaacgggcgcggcggagacagctcggggacgacggaggcgaaccgcgagggaacgacttcggcggcgatccttggacgaaggcgagacgcggctggcacaaggcttgacgacgcggagctgaggacgaagacgaggacggggctgccgcggcttgcttgactgatgcggacgacggatgagaacggctcgacggagggacgaacgccacgacgaccaggaatgacgagaggacgacgacgacgacgaccggggccggcgaggaggcgacgagggcagccggcagcggctgcacgaatgcgaggatggcgtggaacacgccgcagcgatgacgatgacggaggcggcgccgcgagacgacgagccggcgaggatgaacgggcggccgaagggacgtcggcgacgatgaggatggagaggccagcacgggcgacggtgttccggcgaaacagaggagcagctggaggagaggacaacgcggcgacgtcgatcgggtccgcgacgtacaggagccggccggaggcggggaggtactggacgccgacgtggaggccactccggcgagcttcgagcgaggaggaggtgatgccggggatgagggcggcgtcgcggagccgagggaggtggtggcgacgtcggccggcgcacgggaaacgcgacagtggcggccggaggtggaacagtggcggcaacgccactgttttgccggcgaggacgcgtctccggtgctttcccgcgaaacggagggctgaccgagggagaggaggtggctgcgaggccgagggagaagacggcgcggccggacggcgctccggcgaggagggagaggcggctggaggcggccggcgcggaggaaagagaagggcgatggcgggaacgcgcctccggcggtcaccgtgcgaaacggagggcaggccggggtggaggaggtggcggcgacgctggaggaggcgacggcgcgaccggccggtgcacggtcgaggcggcacaggcggctggaggcggccggcggcgtgggagagagaggagggcggcggggagagggctagggaccacggggaggctcgggatggggttaaaacgatagaacggagtgaggggatcccattttatagggtgggggcgggagccgggctcgggagagggcagaacggccacgggaataacggccgacggccatggaaagcggccggacttggcgcgtccgttcccggggattgaaggcacaaatcaagggggaatttgggggcaattgaagaggattcaatggggattaaaaccccccaattaattttggaattggccaattgaatcaagcgg

SEQ ID NO: 20924 - DNA, 22334 bp, Oryza sativa
ctaagctaattataatcgccccactaatcacccctactaatcaaaaccaagccttaatttatttatgtaatgactagctgctgcttacgtaggcgtaattaagcttagcactaatgacacgattaagccgttggtggcgatcgaatggtggcgcgcatgtgccgcccaggaggcacgggagctagcatgcaccttcacccacgacgacggcggcgagtcggcgacgccgctacatgcagaaggggatcatgtggtagggcagcgccggggacaccagcggcgcgtgcccgccgccgccgctgcagttgctctccggcgaggacgacgtggccgacgccgaggagaaggagttgttgtcggcgtcggcggccttggtcgggttgaacggcgggatgtcggccggcgcgggcggcggcgggtggcgccaccgggggagcgggccggcgaggaggagtgtctggagcagcggccccgccgacacaacggcctccactagccggcccttctccggcagccgccgcgccagcgccatttccagtccggcttagtcgcggggggtttccggaagcgccgccagctcgtccgccacggccgggacggcgacgacgtgcgcggcggggaggctgctgacctgcggcgtcggcgtcggcggcgcggcgggctggctctggtggtgcagcaggagcaggagggagtggcagtgccgccggagctcgtcgcgctcggcggcggcggacgcgacgagcgcggcgaggcgcgccgcctcggactccatccgccggagctccgcctggtgcgccgcgcgcgccgcgtccagctcggccagcgcccggagcagcgcctgccggagctccaacgccgtggagaaggccacctggtcgccggcgccggcgacgtggtcgaacggcgcgagctgtgggtcccacgtgtaagcgagggtgggctgctggaggtggtgaagaagagggtggccttccatggtcgatcttgttgggtttttggcctttttttgtggttgggtttagaagaaagatggaggaaattaaagagattgatgtgttgttgatatgatatgagtgtgaactgtgtgagtgtgtgtggatcttggttgtgttgtgtggtagggtatatatagaggatctttttctgggtttcttattgatttctttcttggatgctggtggttttattggttcatgttgtgattagaacaaagtgttgtggggtatgtgtaattatcagatatttttgtggtgctctcacgtttcatacaccataaataagtaaacaaattgttatttggaaatatggttgttcattaggcaagtactagtgaaataatctcacatgctatattataaattttggttagaatataaaaataattttggtgaaaaatattatctattactagtaagtttcagatgtagtataatccaaggtcaaatattggagaatatcacaaattattttccaatttgatattttaatgtatatattcagacaaattaaagaaaacatctttgttttttacttacataatgaaataatcttgaattaagtctggacatatgaatccatttacttggtgtctatttagatattagattcaaatcacaatctttttgccaaaaaaaaatcaaaatacaaccagcaagaaaatcctatttatgacagatagttttggaagggtaattactttgtccattggttctttccttttcatgcaacaatttattggttggcaaggacacaatatctttttagcaaacaacggagggcggaagagtatcgaagtagttgggccacccttcaatagtatttgttatgatgttttttaaatagctaaactgtatgttttatgcaagaaaatatactgttttaaaaatttaaagaaacttatttttaaagtttttaataacaaatactcgattagttatatgctaatcatgcttattgttttacgtgggactaatcagcacggccataactcaaagtggaaattctttgggtgaaatagaagagacgacattggtcaggttttgtgaagggacgagaaaagcggctccaattttcagtccctcgaagttggactattcattttaataatcaataggccacataatcccatatatttttcgtagacactttacgccatttcctcaccatgtatacttttatatattttttagtaatttttgctgctgatacacaaaattgcaaagtgggtataatttaatacacgaccttataaaatgttcattcttgtacataaacgtacttgtgttatccatgcgaatcaagaccaacacgatatatcataaacttgtgttatccatacgaatcaaggaccaacacagtatttcatagctaattttgcagggttctaactagaatgttacataggaacatacgtgaggaggatggcacgcagtggcggagacaaatttctcaagcctagggctcaattaattagttttcatatgcttgtgtttcctcttctaattttttaatttttggagtgttagttcaatggagatttagggctaggagtagggctctagctcatagctaccctactcatagttccacccccgatggcatgtatatgcctacatgccatcctcctcaggtatgtgcgtatgtaacattctagctagttagaacctaatgtatatgtatatgcctacgtgccatcctcctcatgtatgtgcctacataacattctagtcagacccctacaaaattagccatgatatatcgtttttatcttgatccggcaaccgcgagcttctctcccaagccgcatgtctctcctcctcaagtcgtgccggatctggtcacatgtccaaatggtggatctctagatctagtgatgactgatgtggccacaatggttacgatgatggcgctagactcttgaattttgtggagttttgttagggatcttgtatttttggaattctttttggaacttctttttttttggcaaaaaatcttttgaagttgataatcaaaacatactccattttcccaaagacattgtttttgaaagtcaaaaacatatgaagaaagaggttacaaaactattatgcccactaaatgcagagaaaaaataatgagggggagaagaagagaggaagggagtaataatgtttggatagctaaaatgagaagaaaataatgaagtggtattaagaggtccagtggaccccatagctagacaagtctgaaagattaaaaaaaaacactctttttggacgaagggagaacctgcctatgagccgcttgcgaaaatcaattttcgcatgccgtagtacgcccgtacatgaaaatcatgaattttcacatacgcatgcatccaggaaggtggctccaccacctgtgaaaaatgagttttagctgtacgtgagggaagttttagctgtatgtgaaaattgtttcggtagtagttaattccatttttcaaggaggtttaccatctgactttggtgatatgtgtcttagtttacttgttttgatatcactaatactactggttgggaaccccttatatttgccaatttcctacatggtaccaattttgatgaacttttacccattattataggtgctagttatatggatagaacgacacctatgatattcgaaaataataaaaaaacaattgtattataggttggatctaattcctaaccccatttgcaatttccccatccacattacagatcaacaagaacataagagcatatgtacacatcaacaagaaagaaggcacatcacagaccaagtagacaagaataagtacattacagataagaacaattcaccgatatatgttccaccatgtccaaccattacatgttcaatattttggactcacggtccaaatggattagccaccgccatcatcgattcctcgagccaccgccgctgctatcatctccttctaggccttgagcacgtgcgcgtttaggtcagatgtggctagatctagtgagccccgacttagaagagcctagatcgtgtggccccccaacctccatgcagccagatccgacggttgaatctgatgcttctgggaatggcatggaggagagggcgtcaccaaggagaggaggaggaggatgaggcaaacggagaggtaggaggaggggcgacgaacggggagggaggaggaggcaaggcgtgggcggcggacggagtgacggcaaagttgtgtgagagagagaggaggtgggagagagagagatagagatagagatagagatagagaggaggaggaggagaggataagacacacttctctcctcactaaaaatatattgctcccaacctactggctcggctctactagatttttatggtaccagtacctataatatattctaagtgtcggttttttaattaatcaatacatatagtattggtatcggtttttttctctagaacaggcatctatagtgctcaaaagtgttgattctatatttttcatcgcagggaggtgagaaacggttcataggtaccggttttaaataaaccggtacctatgagtcactagtgttggttgtcttcaaaaatcggtatgcactttccctttttcatatgagccatctaaaatatcatagttgtgaaaatcaatatattttgatgttctggaataaatgatttttaaaaaataaaatacatatttgcgccaacctgtttgaagtaaacaaacatgagttcgcattgccttctgaggacggtatagttaatatatactacttgcttgtgttgctcttctttccttagatcatagttaattaacaacgatagcaacttgtttttataatacctgaatgttgctcgtaatcgtcgatcgtacagcggaaagtttgacaaaatgaacttgtataatgtcataggtgtacggtgcttactcatatataagaactaagatatgaatgatgaactcatcatcagctatatatttactatataatgtatagtacgtaaaagtctttgttcaagtatactgtaaattgtccacccggtttaagcttttgatttgaactgattggttcatttgaatctatataataccagaactagtggagcagagtataactgtttgtttacacgataaaaacatataacccccttttttttaacctaaaggactgttaattacaagtgaattgctggtccttctgattaaacttttgtgtttgcatataactcaatatggacttttgcacatggttgctgcttgtcaccctcagacactgatctcatctatgtggtgatgaccagtcatctgccgaagcttctcatgataattaacaactaaaagtatgcaaatgaactcactctgacctgtcacttagcttgagccatccaaatcacaagtgaagtcaacaacggaatagagacctgttgcaccagaaacatctaattcagcatgtttcatatttactgaagacgtatgaaaaacggtagactgcagtataatccttttatatatcctttgagagcgtttaattatctatatgtgcaaatttgcttcagttagtttaattagttcaacgagcgtaagcttgatgttacttgataattaaccaatacaccatttggcatgctatttgagttgttgattaagctcatgaggcttgaaactaggttcaaaaccaatatgcttgtttgtgacttgtgagcacacacatgatacatatatatgtgcaaattactaaagagaacagagttgtccaatttactgtgatttgtatgacaacattgctttcatttcaccttttctttttttcctttttgtgcatgagtcctttgttttgcccaacaagggaatccaagataggaactaccataccatcactcaaagccctagccaataatgcatcttggtcctaggttctgccttctgtccctatctctccctaatcatcatcactgcatggcaagtcatctttcattcttgcccaactttagcttgcataaataaatatatactgtatctacaaaaaaaaatagttgtttttacctgtttggtatctagggaaggcagagctttgcaagtggctcaaatgtgaactttgaaacctgtagcaactagaaaggggctatccctgggcatgtttccattgattacatcctcatatcattttcacaggtaccagcttgacagagaaaaagatatgccaaactaaagctgcattcatgtcaccctgcatagtagtatagtacaggccacttacacacacagatattatacagtctctgactagaagaatgtccttacctgcatgtgtagttgtgagttggtagcttgcaagggtacttgtcatgctgagcttcagatgtccattggcacatgcatgttgacactaaagtccccttgtctaacatggacatggtcagattatgtagatcctagagcttcaaccttggaaaaatggtggtggttttgttgacaatatagcgcatccattcggtttatttcacgctttcgtagctgtttatgttgtgcttatttagcagggcaaagaaaatttctgctagggccctggactcatgtgagactcgttcagaactcagttgatcaggtcagcatgatcatgttgtgcacttgacaatgaccataatctaacagcttacaaacctatgactcatcactgacatgtggtcatcatcagtaaattatttcgttgttaatagagattatttgtgctgtagttaagcttctgttctgaatcagataaagatagaggcagtagcagaaatagcatgcttaaagattgcaggttgtgtgctcacactggaattcctacgacatgagacagcaaagcaccattgcaaatcctgcaaaattcatgcaagaatccaaaacatttgttaggtacaactgacctaaaagaggctggaaggtgtgcaccaccatcatccatccatacagcatttttccatctggacagctgtttcaacatgtattctagcattgctatacatctagcagcagtgtgcttgtgtactcccattagagaatcatgaaaggactagtttttgtaatttagtgttcatgaagcatataagaacatccatgctaattagcttgtacctccactaacattataatcaccaaaatgcataaaccatcttcctcagatcatttaccatgtgtttgttggattatcttgatgattcaactgcaatcaagctaaaaaatgcaagcatctttactgtgtttctcaaaaaaaaaaaatgcaagcatattccactcctatactaggtgcaatagctagccagctttaatattagaggagtccagttaataatcaagctgctatatatgaacatgtgtaaaagtatttatacgtggcatatctttgtgctgcatgcaattgcaagcttactgatgaactcttcacaatcttttgtttctaatcacccagctcatcccagcaggatatgatcgatgcagctccctcttaatttaatttctcacgtcttgttcatcaggaaaaagaaaaaggagagtgcaagaaaagtgaggcctccttctgcatgatccaagtacgtattccccatctcaccagtatgatggataatgacaccttggatccccattattacttggaataaattagggttcttcctaccatgatgtacatgcattctagaggtagaccccttgacttttgagaggattagtgcgtgttgatgtgattaatttgtgccaaatttagaacagtaggaggatccaacttgagtaatataaaggccgttgtagcaaaataattagagggtcgatctcgagctaaatttaaaattatcagagtattggaccaaagctgcaggaatgctgcacctgagcccaatcaataatgcatcatgaagataaaaaatcaaccaagatgcatgaaatgttaggtttaagaaagaatcgtattattacatatataaataaattaatggtaagggagtaggttcagttgtcaccactgatagggttgctttagaaaaaaaaatactagaggataaattaattgctgcaagcatacatataattgtttgtgagagaaatggacgtagaaaggtggataaactgtttaattagcactagagctaggagaaaaaattgtcagaaagaagagcacacaaatcattagatctgttatttttgttttaagtgaatatggacgcacataaatcacacccacactagcagccagctattagcctgtccatgtcattttagtctgatatgtaagagacagaaattggaaagagactgaagtgggcacttaatcaagcatcgacgtgcatatgtgcctaggcttcttctggatgatgaactagtagtagtaagacagcaggggttcaccaaattagatctccgatcagtgtatcatcaaataagattgttggaccatgatgaacataaaactgccttttaaactcaccagggtcattattgtagatcgtaaagggcctttcccaccccaaaagctagccattgaggtgaggggctctcccacatgtaacttaggtccttagattctttgtccttctacaactaatgtgggactattcaacaattttgaattcaaggtgatgccttttgggctaaagaatgccgtagctatatacattcgagggttaataaatatcatttttgctcacttgatcaggaattgtgtgctagtctctgtggatgatattttgttctatagcaagaacttggaggagcatctgagccatctaagggaagtgttcaaaatagtagcacatcatcagctttttgtcaaagaaagtaaatggtcctttgctcagcagcatcggcatgtgattggaacaacagggggtggcccctgatcctaacaaggttctagcggtaaaggattggccgatgactagaaatctcaggcaacttgtaaggtattatagaaagttcattaaaaaaacttcatgtaaattaaaaaagttcaacaaaaactcatcgttttgcttatgcaacactactcggttggtccattgaaatcgaaaacaatccataagcagcaacagctgcaggaataagtccactttaactccttcaatatagctcaaatctaactcgtaaccctaaaccacaataccagatattttgacctctcaactattaaaaccggtgtaatttgattctctaagcggttttagatctaagcggttttagagtacggttttgctgacatggggctttgacccagttcaacaggctgactcagcatgtgggacccacatcttaaaaaaagaagtcaaattacatcgattttaatagttggggggtctaaatatccagtattgcgattcagggatatacatattaaagatgagctatattttgagggagccaaagtggacttattccacagcagcacaagggccaactcatgggccgttttttctggcccttacactctgtgctgcctctgcctgtaccaatcctctttttgattttcttttaacgagttgtctttttcgacgcacagtcgtattaatacaccaactgaaatacgagtacaatttctgtacaatacatacgtacatacatacacgtattctttagaagtacatacatatacgaagcctttcagtttcaggtgggacccaccccgcacaccacgacaccgtctcgatccccccctcctctcctcctctcgccggcgacccctccgccgcttccttcgccggaatcgatcgatcccatcctgcccaagccgccgccgatttcacctcaccttggtcgtaagtactactatctctgatccggtcccgatccagatcggaattcttccgaccccctaccctaatcgcacgcgatttcttgatttcttcctctctgatcccaagctaggaggtcgccatggcggggaggcccagcatcccgaccaacagctctgcgctcatcgccatcatcgccgacgaggtagttacagccaccccccacctcctcccctttccgccttgctctttgcctttgcttggcttggctgattgtgccgcctctaccgctgctcttttgctacatctagtagttaccggtgttctaacatgctcttgttgattgaggataaatacccaattatgtcataagcctactgatgattcagcgaattgtgttctaacatgctcttgttatttgcttttattggttcgtttttatctttccgcgatgtttgctttcttatttgaactacactcatgtggagtgctagtttgtaataatgggctgtagctccacttgagcaaaggccgggatgttatattccattatctaaaaaaatgctcttgttgattcaggatacatacccaattttgttaagtctactgatgatccagcgaattgtagtaatgcctgagtccggctcagtgtgttttcttttacctgtgtacctgactgtcatttttcatccatcccacccataccaatataaaataaaagagagtataatacctccactttatcaaatccaatcaaatattcatctcttgatttactcccaatgtatccactacttttacaaactctgatgtaatggttgcttaaaaatgaacttattttgggacaaacgggggagagacaaaaatgaccttatcatgggatggaaggagtaattaggtagctacaaaccagtgccttctgttacatgtttgtgatgaggaaaactgttttcaacatcagatttgcgcataatcattctgtggtttctaaactctttgccaaatatgaatttacggcttgtcaaattgctcatgattaataattttggtggcatttgctagcttattgaatttgagtaacatgtaaggtttcaagcaggaaacaaatataaaaatgtaatgctattacatactgtttggtaagagcttgctgatgccaaatacgaggaatgaaagttagctgatgctcaagaaaaattacatcaaggacccttcgcaatttcattctcgcttgcttaaaatatactcctgatgggttaagtcaaggtagcaaacagtagtagctaaccagcataatttgatgagaactggatgactaaactgaatcctcttaattaacaacgggcataaaacctcatactatctttatcaatataaaacatatgtaactctctctaaatgtttccaggttccccagtaatttagccatgattggagtatctgacaggagtgttttgtttcctgccctgtgtttgcaggacacggtgactgggtttttgttggctggagttggcaatgttgatctgaggaaaaagacaaattatcttattgttgataacagtaataactttcacttgctaatatgcttaatttctctatcaatatcttgctgtttgttttgtcctgatttctgcctcttacaatagggacattgcatgatatcctgttgatcatctcatgtgcacaagtcatattatctttacccatttacatgttccattacctgactgccaaatcctttcttctaacttgatagctacaaatcagtgccttcttcatgataagacctaatttgttgagttctgccaatttttttactataatgctgcatatgctcattgaatcccaaggcttattttggtagggggtgttcaatcttcttgaatggttgtattaatcttgataatttcctgcttaatagagttattgacatgttccgtatttccacttggtagctggcatattatttgaaataaaataagaaagtggatctcacccagtcacatgtcagagacaattaatttcttcattattgtaggacgtgaatttcatccctgagcttatggtttcatctttatgttacccttatgcattttattatgttagcagacttcctaatgctttagtagtccatagacttcacacggctgaattttactctgacatgttacagaaacaacagtcaaacaaattgaagatgcgtttaaggagttcactacaagggaggacattgcaattgtactcatcagtcaatatgtaagtagcttgattgtatacatcaggttatttctttgtttatataatgaagtgataactgatcagcttgtcactaagtatcctggcctcagaaagtcacaatgattggaaacaaaactattcaattctaaattaagtcagcttgtcactaagtttcctggcctcagaaagttagtgactggaaacaaaactgtttcaattctaaactatttccgcttgtcactaagtctcctggccatagtcagccttgtttctttggagcgctctcctgagttttcaaaatggcatgtcccaggagcatatgatcaatgaatttcaatacaaaaacccatcaaaatgatgtgatttttttttaattcttatgtgatttatctaccaatttactggcctaaggttcctgcagctttgcattatacatttataatagctgaaatcgttaacaaattatgtgcagtctaaaatggttcttcgtgttcgacacaatcacacaacctgatggttttctatttttcatttggcaggttgcaaacatgattagatttcttgtggatagctacaacagaccggttcctgctatattggagattccatcgaaggatcatccttatgacccagcacacgattctgtcctttctcgcgtgaagtacctattttccgctgaatcagtggcgtcagataggcgatgagaactggttatgtccatgcaacatgggagagctactcggagcatttaccctttgaaattgttattcattttgtgcctattgtaaacactattttgtttcaataatgagatgtcgaccaaccagttgaattacagcaaaaataaagacgacgttcatgttgtgttttcatgtttgtgaatctgttcggtgcttctgtgattagtttggtgggctctgttttcaagtttgggttgacattaccacggtaaatataatcctgagtgacaaactgtaatcaattttggcaatcgcttgcaatcagataaatgtgcataatctagcataatctgaaggcctccataaagaaaagaggtgtttcaatttatgagttttgttaccacaagtccaagtgtttttcagatgatgagaagtccctggaggtgcaattgatgcaagtaaaacgtacagaaaaccaaagattcatgccaagtaaaaatataagaaaaaaaatcatccaatgataagaaaaaaaaaaccaaagattctcacaactcgatatgatccatgacaagccggatgacagtaaggaaagtctccgctacgaccgactagtgttataaaaacaagttaataaaaattgcacgtcgcaaactggagtcaacgattatgcaatttttcattaattatggttggaggtttaaaaatagaatttaataagtttgttttattttttttctattggtgttagtagtggtgtgtgcctttatcgatttggatgcgttttttatgacttgtttgaggtgcgattgtgtttggatcaaattttgtaataatggtcgtacctctgtgagcaaaggctatgattctattacattatctaaaaaaactatgattgaaaaactacttttaagtactattctcttcattccttaattttttgaaaaattaaaatttaaacattttgactaactgttaaacagaaagaaataatattttgacaaactgttaaacagaaagaaaatatgtgttgtgaaagggcatgtagcctagtggttacaagagactcagtagcacttgatgttttggttcgactccccatgggagtaaattttttaggatttaatggcgttgagatttcagtgataggcaacgtaccccgtatattagttactcttccgcatatttatatatcatcaaactagaagttaattttttcctaatataatgtcatttatattacatcctctttccataattttttataaaatcaaactagaagtgagaagctgaaaaatctattttttttaattctcatcagctgagcatccatcatttgtttatcagaatctcgagcttcccaaacaaaacgtagatgcacacaaattaattgctcatgcaacaatgttctcaacctggcttagcagtggatcgagcgttattacatattgtgtaatggatcgaatcgccccggccgatcacgctgtcaattgttcagttgtcacgttgatctagcgctggcctcgctctcctcgtggcaagttggcttcagtgcttgcgccttgggccatgaccaaacaaacattaaaaagaaccaatcctacttcttctattttaaaataaaccaatcccatcctagaatatgacatatcataatacaataaatatccatattcatggtactagtacgaggttgacttattttaggatggagagagtacgtacatacgtccgatatttggtacggcattggacactacaatccgtcgtactctgaagtctgaaccctgaaacggattgctgatcgagctgtagaggcactagagctggcaactaacccaatttggggtctatttggagagtttctagccgctgtagtttttttcagaatcaaaagttgtcccaaacggctcagattgtcatatagattatgagaatatgtagctatagaattcaaaaaataaattagaagctaaaagcttgaatttagaaacatcttctttaaattcttaattagaagctggcaaccaactagcagattcttatattattaagcttcctaaatagagccttggtttccattcgtggtccccattgtaacagtttgacatactcgaatgctcaactcatggccagcacaaggtcaaacctccgaagaacatacctctcgagtactatcacacatgcatatggtctggactagggacgaccataccagcattattgtttcaggacagatggagtacttcgtgtaatcccatgataccatccttattgtttcaggaggaactgacttgattgtttgctgcagtatccgtggtaagttaatgcacaataatgtcagctactgtggtccgagaacggatctacagccactgcttaagttataatcacattgccaactgtcctagtttaatactactaccttcgtttttttaaatagatgacattgttgattttttattatatgtttgacataattttatcactgatttgcaaatttttttaataagacaaatagtcgttcaaaattcaacggtgttatctattaaaaaacggagggactatcatggctcagttggagaggcgggagccggagctagcaattacccgaagcatgctattacctaggtaatagcggcatccaggggcgcgccataccgtcgcataaatgggcgcagcccccgcccctgtctcccttgattttacccatggctcaagctgcttggttgctttcctgacaacatctaccaagaacacatgtctttatggccacactctgcctatggctcgaacaacaactggagtattgctttaatagtattgtacaccttgtaccgtcaacattaatttttgtctagcactttggataacaaatataagctttgttcataatgcaaaccacatattatatgtagattttgtggtctattaactttagtgcttagccatctatgatcaccttaatgcagaaaattaaggtaactaatcgtaatttgacgccatggatatcatagtggaagcagtcatagcagtcgagctaacgaaatcactggcttgatcccgaagggttcgttggtgatgagcagcggggtagcgatagccttctggtcaccacttacactgccctagcatagccgcatgttttccctccaatacctcagtgatcgagtagagttagggttttcggggagaatgaatcgtgaaccagtatcccgtttcatggctggactcccctttttatctagcgccgtgggagatcgtgggcaatccaaataaaaggaagttattggcgcttccgatcattgcatgttttaatgaaggaaataatcgtgattcaatcgggttaatcacgcacgtcaacgggtgggactggttatgcgtgactctatctggtttccttgccgagagataaaaaatccccaacattataaaaataaacaaattctaattcgatattatttaatatataatttgattcttattttaacacttactattgggcatcttgtatctagggtggaggccactagtggtcgtcatcactaccgcgaaggttgattccatacccctgattgataaattgggagggagaatgccgtgctggaaacgatgtttctttagttcaacgggatgaaacactctagttaagtctgtacatttggcaatgcccatttaccatttaacagttttgcatactttgaaacaggtattcaaagaatagactggtttaggagagcgttcctgtaggaaggggatgaaccagacaatgtgagagagggtagcagtcgagtaaattggtaaacagtatgccatcctaaatgtttggggtgtttgggtattcttgaatcttgatctctagaaatttgcaagagccgttaggattcgatggctctagttcagctagaaagatgacattctgccttgggtcggcctggacttatcttgcactatggtggacaaacaactcacaactctttcaacatgcccttgaaattacccttggtgatggcgccaaaactagtttttggaatgacaattggttgaacaatacatgcccgaagacaccacccatttcaaaacttacaaaaaaaaggaaagaacaggagtgttcacaatgaactttcctaaaacaactggatcttttccttctgacaaatttcctcaattgaagaactagttcatctcggatatttgatgcaaggcatccagttgtcgacgaccatccaaaatgacataacctggaaattcaatgttcctgttgcttattcctcatcaagtgcctacaatctccattttttgggttcaatgccaaataaatctttcattcatatttgaaagaccaactgaaccaaagcatcttttttgattttctaaccctgcataaaaatctctcatagtcgaaaacctcattggccatgtaattggacccgcagcctctacacccaatccttcgaagctttgaaaatggattttcaatcagacttggattttcaaagcttcatgtgaagtcatgaatcctctacacagagcctcctaatcgggttttcatatatgtctctgctatcactatatctcattttatcttttcattgaacatgtgtatgtctaaatataaatcttctcagatatgtgtttacgtaatcaacagaattagccatatagtgtcattttggccttggtccacacgcacaggacaagttcatgcactaaaacgagcattttataaattcgtgcactagattgctcccacctgacaagttcgtataccgctgatacaatttactttatttctttttcttcttttgtttctttattctagtatgctaaacctttttctccttgctaatatattccgacagagctcttgccaccattccacatcaaaaataaaattacagtattgcttgcttttctctggttgatgactcactacttctagtttatagtttatatagtgtacaatctgctctatctcatcgaagggtatcatattaattgtttgtatggtactggattgcttgtataggtggttcctatttactctgtgttcgatcgaattggtccagttgaactctcttatctaacatccaatgtaaattttttaattataggaaacacgtattaacctctctaggcgatatctatgatcctcaagggaccatttcactatatacattgttgtgtgattagcattgggttcaaagatatctttcaggttttttccgtaatgaaaatagtttagatatctggcttctgccgctaacacgtagctattgagttctattcctgaaataaaaggagatagggtgatgggacaaaccccaactcccctactaaaatgataaccaacttaatatctgcaaaaaatattatatacggaatagattctagtaaacggtcactcataatgggataaaagaccatggaaaccgcgatgtcttcaattagtaaaatataaatatgggcttactacgtatgcaatatagttatgttttcaaataggcttatattatagaaatattattttgttatttccctccttaacatgcttgtttccgtgcggatccatagtatataacaatttgcgttggtcatctttggacttcattattcaatgagcgcttccacatgcaaatatacccatggatctgacctagagaaacacagacgatccagttgacaaaaatttttcttttgaaacacaatacaacattgtcaactcatataatcacgtgtgcactaatccctttgaatgcacacaagcacatcctatccctatgatcgcttctgaatattggactgatttatcttaagatttataaagttattatggacgtctagctatcgaccgaccagtacatgtggcatatcgctgaaacaataattagccgtaaatgcaaacccccatttcaagtttaggacttaaactctggtgaaaaggtttcaccatcataaatcgaatcagtcgagctacactcgggagagagaatggaaaaataacaggctagctaagggtgaggctatatttgacttcacagagatgcagcatggtcgagggttcggaactactaatagctgcaacaacatgcatatatacatgaggcatcaatctctgcccttggctggctttaagcatctaagctcagaaatcacagtagccaccagctcgtaccaaaatggcaatggatttcttccattatctgatggatgtttggaaaaaatggggtatccaaattcttgtcacctggagcctcatgctgcaggtcatcctcctcctcctcgcggggacacgccgccgtgacgcccccgccatgcttaggttcctcctctggctagcatacctgctggctgactccaccgcgatatacgcccttggccacctctccctcggctccgtggcgagcgatcactggctggcatccttctgggcgccattccttctgcttcatctcagcggcccggataacatcacagcctacgccctccaggacagcgagctctggcttcgccacctgcagatccttcttctccagctccttggagctagctatgtcctctacaaacatatcatcatcggcgacgtgactacgagaggacacgagccctttctgctggccaacgtcttgatgtttgtcgtcggcctttccaagtacggcgagaggatacatgcgctcagatgtaacaagctgagcaacatctggagctccccgaaggaagtatatcgtaataaccaacttcttcactacctgcaggatcgagatcataggattagagaagaagaagaattatctctgcagtatgctcactccctgcaccacatctgcaagcgtgggatagtcaactttgtgattgaggaaccattggatgtggagaaatctgaggggtccagaaccaagatattaatcaagaagatgctcaacgagaaggacaggaagacgcacataaaaatgtggaaggtgatagagatggagctgtccctgatgtacgacatcctctacaccaaggcgggcgtgatccacagctggtttggctactccatccgggtcttgtctccggtcaccatcttttcctccttcatcttgttcatcgtcagtgggaggggtggcagcagctgctgcagcaaagccggctagcagcacgggatcgacatcgccgtcacatatgtcttattggttggtgctttcctgatggagacgacgtccttgataaacgctctagcatcgagctgggcacttggcttcttatatggcatgccatggagttggctcgagaatatggcatttcatgtcagatggtggcaccggctccggcgatcagtcttggctcttcgccggagtgtcgaagcaaagacaagaggctcctggggcagatcaaggaagtggtcaggcagcattggccagttcaatctgctctacttccgcgccgcgcaggtcaaccaaaccaactactggctcagcaagtgtgctatgaaattggggttcggcattggcaattggtggaacaacacttgttactcgtggactataatgattccagacaaggtgaagactagatcggtgagtttggtctccaagagtgatctcaatacaatgggcttgctcaggtataagtggggcgagctggcactcaacaacgataaaaaaaggatctggcctgaactgcttcaaaaactgggcgatctgcacggcgtcgacttccatgagagcatcattatctggcacatcgccactgatctcatcctcctagagagaaaaaacaactactccggcgacagtaaaaatgccaaggaagttgaacgtgtacgttcaatcagggcactgtctaactatctcatgttccttgttgtgactcgccccgacatggtacctggacttccccaaaattggttataccaacagacctgcaacaacctcgatgaaatatgcgaagatcggcgttatcaactcctttcttcagctggcaaggccagtaacatcatcttccgagtgctcagggagctgttcagaggccataatgataacacagcgtcagttcggctcaaccagaccaacgaactcgctaaaatcttactcgagaaatataatcctacagaaaaatttgaccgctcagttcctcgcctgacgtatgcacgcaacgtagctcatatagttctaaattgggagtatccagatgacctgaaggatacaggcccagtgaaggtgctgcatgacttgtggatggactttctcatttatgcaagagtcttaagatgactgcatgcgacccactctttttttcacccacttaagtctcttcaagttccattctctccatgtcctccccccactccttttctcccctctcttccatagaaagtctttcaaacttcacgtgtagatttttataaatattaatataaaaagaaacaacatcatgaaaaaggaaaagattaattaaaatcattattattggaaactagttacgtaaatgttaaattaatcgtgatttttttctccaaatccagcacagcggcgcacatgcacacgcctccccagcatttccttgcattcagaaaaacgtaagtgggccggaacatgaaccgcgcgcgacgactcgcgatgacgtgggctgaaagacgcgccagatcgctaacacgtcttctttaattaggtgtagcggaataccgcatcgcactccacatgggcgtcgcgatcgtgcatcgatgtcgcttccctgagcccgagtcgtcttgccgggcccacctggcagtgggacaaatcagtcgcctgatgcacgcgatccgtattgcctccctacgagccaatcaccatgcgtcgcacacgagaaaagctaatacactaccagtcgcgccccccaccccccccatgcgactcgacacttggcgcatgtggagagggggacgaggggtggtggacggtccggttttctgtttattttcttttcccgtttattttagggttttttatacaaactttgtatatatgtgatttttttttctgattttttctttttttataatatgtaggtatataaagtatacgcatgtatacaaatatatatatgtacgtacataaattttatatatgtgtatacagtatacagagaggagagactagagtggagtatttttgtagtgtagcacgcgcgcaataccgctccccggccgccgcacgggaccattgatccacgtctccaccctcgccccgaatccggagatgccacgcctcccgccgccacgttgtccgcgttcgtatggattcccactgggccacctccatgccaagctgggccagctaccttgcctgtctccgtattgggccatgtcttgtctcggcccaccaagccaggtcgccatccgtttgctcaggccagctcgagttgggctccctgcctaccgaggcctgccagcccacatgcagccatgcacagcccctgtgcaagcccctttttcttctcctccgtgaacttgtgaaacccattatgaagatctcccgatatgatgtccatccactgtgtgtcaccttgtatccaatcacgtggcccaacatccttgatcattctgtatctcaacttctttctgagtcaaatatatcccgatcccgctgctgacaaagatagattccaaggatcttaacttcagtcccaccctgtcacatg

SEQ ID NO: 20925 - DNA, 21449 bp, Oryza sativa
tttttaggtatagatattgcaacttgacccacattagtcacacaaactcacactgacaatcgccaacattccaaatcaaatttatcacaaaaactaacccagggttcccaacttccttgccaattttccatcacaaataaactaaaatcacaaattatttccggacaaattaacctgttcacactgtgattcttcacaagatttattagtaaaaataaccagagtactgggcatatcgtcagactgttgtagacccctagacaagggtaagaaagatgcatgaagtaattgtatttctgagcgtaggcatgcactggcatttggagaaagcttggtaaagggaaaatttgattaatcaaaaactacatcacgagatataaacactaccagtggcaggatctaaacacttaaactctttatgaagaatactgtgccataggaaactgcatattgtttcgaacggaactgtagcttatgtcactggcgtaagttggaccaacaaggacacccaaagattcgcaaggaattataatcaggctgctgatcaaagagatgttcgaagggagagacatactggaaattctactaggagtacaattaattaggtatactgtagaaacaaaagtttcatcccaaaactttaagggtatagatgcttgggctagaagggctagaccaacttctacaatatgatggtgttttccttcagtagaaccatttcgcggatatgtatgtgggcaagatacatgataagagatgctgtcttttctaaaggaatgtatttttttatactctcctccccaatcagtctgcatagctataattttcctaatgaacatgcattcaactagtttttggaatgcaagaaacttatgaaaaacttcagatttaaatttaagcaagtaaacccatgtaaacttactataatcatcaatgtgtaggatcgaatcacaagaactaagccaaccagagagaggggggggggggtgaatggttggtatacccaaaaaccaaaaacttttagcggaaataaaatttaccctcgaaatcgatggatcacgatctgaccgaagtagtagcgctgaccgaagtagtagcgccggtctgaccgcctggatatcgtcggtctgaccgagattggaactccggtctgaccgccagatcagctgccgctagctgtcgccgccgccggtttgaccgctcttacggcgctagtctgaccgccagtatatcaccggttagactgccgtaacccgatgaaacacaaattgaagaactctcaaagtagatgacaactttattgcttctctatgtgtttacaaagtgcaccaacagcactccttacaaaaatctcgactaaactcgaaacactaactaaactagcaactcaattgctctaaaaagcgatatcgggaagcctcacgctccccctctatttatacatgaggtaagcagcctaaatctacgaaccaaactcatactaagagtcctaaacaccttaggaaaccctctagtacaagaaagaaactttacataaccaatcgtaccaaatttggactccttccaaattcgactccacatcccatacgcacacaatacctccatcgtatgccatatggaatctacatcaaccacgtgcatcaactctagtgttagtaacccgcatgatatctgaccaccacggacatcgccttaccaccaagccgactcccggtccatcaccgcaaatactctcccgaggcatcgagtcacctacacatgaaacaaacaaagaaaccatattccgagaccaagctatcaccaacttgactcattgttagcaaacaacagtattacatacgtatagtatccatctaaaagccataaccatgaaacaatcacggatatccaaacaaacaacccgaaaccgaaaccgacacagcgtcggccggtcagactgcgggcaagccggtcttaccgctcacatagcgccggtctgaccggcaaccactgcctggtctgaccgatcccaacaaaacagcaaaccctgttcatcacctaaaaatcaattatctccaaaaccacttcgataataatctctaattatcaaaaccaataatcacagatgccaattgttcatcacagaataagaatcaaaaacacgttgatcttacaatctccctcttgatgaacacattggcaaacccattaaaaatgttttggtgtttggaaaaataaaaacagcacacttcgtacaaatgtacacatcgtgctcaaaaattcaaaagaaaacttctccccctttttaaaagaaagaaattcccaattgaatcaaaaacgtgctcttctcaaaaactcttttcttctcccaaaactcatctcttctccccaaaacttatctcttctcccccttttgacaatgatttcatcaagcataggaattatgtttattaaagtataagagcttaacatacatatagcatatcatgtcatgtgttgcaataaaaagaagatgaatccatctataaaataacaagcatgcattaaagtataaccatgaaccaaagattttacaattaagcttgaatcaacaataaaaattcatgatttcatacgatttaaaatgcaacatcttaacaagcacataggttcaagaataaacactaaacacatatacctattgcatttatcactctttctgaaataaccttaagcacaaaataacaaagagaatttttaaccttttcttttcttgagcctttttcctcatatttttctcttttttatattccgggtacgtccctgtcgtcaagactgtttttacggattcggcacccattattttgcttacatcgaatacgtccttgtcgtcaagactgtttccaaggattcggtattcattttttttcatatttttattctcttttcacaatgagcaattaaagctatttgaggaataacaagtcaataaagcatatatatagagcatttaaaaatcaaaccacatgctagcatcaacattgcatatttacttaattcaagtgtagaatttaagtgtcatgcatcatctcccttaaaagcaaaatctaaatctcatgaaaagactagaatacatacaagctatgttagagacaaataaaccttcaaagtattactagcatgcacaagaaaataccatatgtataaacatagctctcttttctcaattttttcattgtcatattttttgcttgataaaactatgaggtacaaactccccctcaaatcatgctaaaagaaagtcataaaaagcactaactccccctcaaaataccctccaattctcccagaacaaaactcaagaagaaatcaaggattttgaaaaaaacatccaattaccaacgatatcaccaaaattctcaaatactagcatatgaaaaagctaataaacaagagagtagaccataattatgtcaatccaaaattaaagtgatgttaccttgctatacaatcgtcatctcaaagttaaacgcacatggggagtatgccgtcaaaatacctacaaatgagaagatgtcgaggcctccgtgttggggttagaaataagaaattttggaatccaacactgagtcacacgaccactagaaccagtaggtacatatgcactaataaaatcagaatcagacttaccagaaaacttacccttttgcttcacaaaagtccaatttgaatttcgcgtaaaattgccccgaggccggtctgaccgccgctgtgcctgcggtctgaccgggcctggcaaccggtctgaccgctggcctgtctgaccgactggtcagtgtcggtctgaccgtggtcttcgaattaaaacccgatttttgccaacgtcgttttgtaaaagcaatttctctttcctttttctttttatgggcaagtctaaaacaaaaaccaaccaaatgtccatcttttccacaaaaagaacaagtgtacatttcacgataagtttgtgaagtagatagttttgaaattgatggttttgcaacaacagaaggttttgtattcaaaacatttgatttcgaagaagatgcacttaaagaagacatgatgccagtagatttaaacacagtgttcttaagctcagattcaatcaaaatttcacctctcctagcaacacccaaaacagtaggaggatgtctagaattatgagcataaggatcaaaacctaaaccacgattgtgtgtgctaaccttagattgatcaagaatcatgttgaggttctttttaccatcagaaaatctttgcaaagaacttttcaaataagaaacctcctgagtaagaatagcacaatttttgcaagcatccaaaagacctttttgttttctacaagttgagcaagaaaacacctcatcttgtttaacaatttcttccatgtgtttaacatgccctaaagcatctttcaacttcatctcattcaaaacacactttgaacaatcttgagaaatcaaaacatcattgttttgttttgccttatttgcacatgaagcattgaccaaagaactcgcacagaaagcaacattgtattttttcaacacattctttgtcaaaattaactcatcaacaacacgagcatgtaaagcaaatccaagagcaaaagaagattccaactttttagatttttcaatctcaaattctaattttttgcaattaatagaattgacatctcgcaaagcattaatttcagaaaacaaaacttcacaagatttacattcatcatctttaggaatcaaagattttaatctagaaatttcagcatttaaaatctcaatagtgtgatccttctcatcaagtgcaatagaacatgtttgaagtttcttaccaaatttgtaagcagtatattctaattgatcataactaagcttttcctcattatcatcatcagattcatcaacatgagaaatagcattacgagcaataaaagctagatcaacaacttgcttacctttgccctcatcttcatcttcagatccatcaaaaacttttatgagttcttgaattaaccactgcatgcaatgcttcttcttctccttctgcttcatgttcttcttcttgttcacgtcatcatccttgactctcccatcatcttccttcttgcctctcccaagcttaggacaatgcgagcgaagatgatcaagtgcacaacactcaaaacaacgattcggttctcctcttttcctgttcctaacatttttcatagctcaagaaaatttgttagatagcaaaaccaagtcctcctcttcgaactgttcgagttgatcatcggaaatggcattaaataaagcaagaacagaagactttgatgaaaaaacaccaacatccaaagaagatgaagacgaaaccaaagcactagacttagaatcacctttacgagaaagaatattcatctcatgagttttcaattttgtgtaaagcgaatccaaagtcaaagtagtcatgttcacagactcctgaatagatgtaactttcatctcccaaatagacatgtcaagaccattcaaaaagtggcgagaaatctcagattgtggataattagcatcataagaagaatcaacagatctaagatcactcaaaattttattaaacctagaaagatagtcatccaaagcttctccaggtttcatctcaaatttaatgtactcctttttgaaaagatcacgatgaagttctttaatgttattttgtaccttgataaaaattattcaaagcaacccaaatctcatgagcagtttgaagatgagcaacacgatcataatctgaacgagaaatcctactcaaaaaaaatattgcgtgctttgcaatttagttcaaaagcagttttttcagcagcagtattaataacttcaggaatcacataaggaagagaaacttttctccaaatatcataattctcagccataatgtaagattgcatcctactacaccaatgagaaaaatccgttgcatcgaaaatatgaggcttagttgtaaacttattagaagtagccatggcaaaaactctagatcgataaaaatccaaagaagcaatcaaggctctgataccacttgtaggatcgaatcacaagaactaagccaaccagagggggggggtgaatggttggtatacccaaaaaccaaaaacttttagcggaaataaaagttaccctcgaaatcgatggatcgcggtctgaccgaagtagtagcgctggtctgaccgcctggatatcgtcggtctgaccgagattggaactccggtccgaccgcctgatcagctggcgcttgctatcgccgccgccggtctgaccgctcttacgctgccagtctgaccaccgcttgccgccggtctgaccgccaatatatcgccggttagaccgccgtaacccgatgaaacacaaatcgaagaactctcaaagtagatgacaacattattgcttctctatgtgtttacaaagtgcaccaacaacactccttacaaaaatctcgactaaactcgaaaccctaactaaactagcaactcagttggtctaaaaagcgatatcgggaagcctcaagctccccctctatttataaatgaggtaagcagcctaaagccacgaaccaaactcatactaagagtcctaaacaccttaggaaaccctctagtacaagaaagaaactttacataaccaatcgtaccaaatttggaactctttccaaattcgactccacatccgatacgcacacaatacctccatcgtatgccatatggaatctccatcaaccacgtgcattaactctagccttagtattccgcatgatatctgaccaccacggacatcgtcttaccaccaagccgactcccggtccatcaccgcaaatactctcccgaggcatcgagtcacctacacatgaaacaaacaaagaaaccatattccgagaccaagctatcactaagttgactcattgttagcaaacaacagtattacatacgtatagtatccatgaaacaatcatggatatccaaacaaacaaccagaaaccgaaaccgacacagcgtcggctggtcagaccgcgggcaagccggtctgaccgctcacatagcgccggtctgactggcaaccaccgcccggtctgactagtcccaacaaaacaacaaaccctgttcatcacctgaaaatcaattatctccaaaaccacttcgataataatctccaattatcaaaaccaataatcacagatgccaattgttcatcacagaataagaatcaaaacacacgttgatcttacacaatgaagctcacataatacttccttccccccaactgactagagggtaggaccccagacatacactataagacttaggataaggtaattgatgactttttgtcttttaacacacatcatggactgactgattactagactcactagaacatggcaatttataacttctgttgactttgtcgacaagtactgaggaaggatggcctggacggttatgccatctttggaaggacggcttggtgactccataaacatgtttgatcgacgactggtgtggtgaaaaagcaggtagaggataaagtcctttataaccgtgacaactaagcggaattctccacatggtatgatccttgataaagaaaagttagagtataattcaaggaaggcaaaattatcataagcatacctatgggctgaaacatgtttttttttttggctctaggaacgtaatgaacattattcaaatagagattatgattgtgggtcttaacaacaaaacatccaatatgactaatctccatacctgcaccacttgccatttggatttgttcagtgccattgtacttctcacggactgtcaatttttcaagttcaccggttacatgatccatagcacccatatcaagatatcagttagtatctacaccatatgatgctgctgtccctgcaaaaacattcatccggctcaaacaatttatcatatatcgataccaacagtccttttgtagcatagttgacatttgggatggttgtcgctattgccaccattgttgcggcctctagagttgtcatggccacatccttgcttattgttgttgaagccagcgcatccacgagcattgctacgcccgcgtgctgcgttccacagcccctgttgccatgttgacagatccttgagcatcgtttccgtgatgcaatgaaagcctctgctcaaagcttaagagctgagcaaaaggttcgcctagtgtaacccgatcttgccaccccacaatagaggagaccacgggttcaaactcctcatcgaggctagcgatgatgtaggagatgatgtcattgtcatctatatgctttttagaggcgatcatgtcatcgacgagggcgtgcagtttccccgaagtatgtcgtgattgacatatctccctttttaagcacggcgtgtgtcctggaagagaacatttcctcctcaatataccatgtggctgctactgctagagatactacaatctggactagaatatctctagacatggaagaaagtaggtatcctagtacctgtttatctttggctatccactcttcctagtcgggactggaaaccatgatttcttttgcgccctccttgatcttgatgatgtggtggaggctttacttgctccggtgaggtaaccctcaaggcattcccctctgatgatggcgagaacttgtgccctacgtagggcttggttttctttgctaagtttctccgagaccgcttggcttactaggatttacgatcaaggatttgaacgaactcgccatagtggcgttgctcggcagattagatggtaggggatcggtagaaactatttcctgctctgatctatatagaaaaataaagaggaaagcggtaacttgccctcggttcacctgcatgttaatataggatggaaatagcctccatcgtgacttacaaggaaagcatacaccaaccaatcaaaacaaccagcctgtatatgatatcatctaccacatgagacaattactgaatacaagatagagatatctaattaaactacgttatctaactgctgttgagatatctcggttgacacatgactaggtcccccatcatcctcagacttgggaaatttgatgtgctccacaagaagccacacagcagtgaggaactcaccaccagtgctcagctgcctggcatgtgactcctcgctgcagtggtgcgccgcatagcacaacatctcgaaccacaccccagcaatcaaccccagcatgttgggcacattgcattcgttgcgaagtaggtacccagcgactgcagtcccatcaaggtaaacctggccgtgttcattatctgtgctctcactgccaaatttttggaacaacaagcttgctagtttcttgctttttgagcggttgttgtctccaccctccgagctactggtggagtgctcctgccagagttcaaccaaacttgcacatacctttgggtacagacctatgcgaattggcccaggtagcatatccgggtgctgcagaaggaggtacaacatgtagttggagatctccttgatcacctttacaacaggtttctctgtatgttccacctcttctttgaaacaacataggtagacatcggttgcgacatgccacacaaggatgcttttttcaaagtcaatgtctaccgtgctccagctgagttcctcatccattttattctcatagaggatgcacatacgccgtgcattcctgatgtcccctcggcctctcttttgtatctcttttagcacaaactccttgatatcacttgaaattgaggttgtgtttgagtaatgcagtttattaaaccagttctcaagccccactttcatggcaatcctgcctctcagatccgtcatatcacgggtacagaaatctagcaagttatattgtccaatagaatccagccataatctacttcgtcctgctttcacaatctgacgagtaaacattacagaattgcagggccaatcccatttcctagtatgcaagaacgcacatgtccaagaagaccctacagtcctcagcaatgttgtgatctcaaggaggatagccccgatcaacaaagcataagtgacggcaaaatcaactatgtgataagcatctctcctactgaaatggaatagcagcagtgcagcaactgtggcaggtagtgaaaagactcgaatgcaacggccataccaggtgtgtataaccgctgccttgctgtataaaatgtcatacatgagggatagctccatctcgattaacctgtacatgtgctttccaccatcaatttgcatggcttactcgacagcacttctttggggctctgacatcgaaagagcatcaacgaataggctcttgcaaaaatcgaacatgtaatgagcacccaacagagcctgctttagatctctgttcatcctctcttttctggcctgctcaaggtaaggattgtgagcacttgaatcatctaaaaaatcaagagagcttcggatgctgtccatgttagcacacatgaatgcccataccctcttcccatacttgacaacaccgacggcaaacattaggatgatggcctcgaccaaagtcctactgccggcaatgtatctgtagagaacataagcaacacccaacacctgcactgtgaaagttaacaggtggcgcaaccagagctggttgtcctccaaggaataagctgtgatgttatccgggccacccaggtgaagtaagaggaatgttgcccagaacgcattcagcaggtgctcacgtgagctgctgcttgtggtcatggatagctggccaagcgtgtagatggcagtggagtcagcagatagataggaaagccataggatgatccttaacactttgtaacctttgtgtcgacggatccatgacaagaggtggaggataacttgtagagtgaagctgaggatgattagtatttgaatttgccactctttccagagttgagctagtcctccggccattgctcctcggctcaactgcaaacaacatcatattagtgaaatactccatctaaaaccagtcagccctatacccttccataaaatgctcactattccttgaaaggaaagaggaatatgggtactcagtaacattctagcagaaaaaaatatttttttacgagctttaagcgctaaagataaatatttcgtcaaaaatattttgcgaaagataacatctaactcaaaaatactatcataatattaaaagcttattattgtaatataaaattagttatcaaggatttataagttaaatattttttgtctgggtatataaagtactccctcctttttcatactgtaagatattttagttatgttctaaatcatacttaggataattgactaagtttaaaaaatacaccaacatctaaaatatcaaagtaggttaattaaaatctacgattatatatgtcttgataatatatttattgggcattacagaggtcgttcttatgtataatatatatttctctaaatttcatggaagttttaagttgacttaaaagataaccaaaatgccaaatgaggagtatatcaagataaactgctgactaccttgtcgttctataggtgttactaaataacaacatgtcgaaccaaatatatataggggtaaacagagcactgcactgcagcagcttgcacgagagctgataaagtggaaaccacaaacacaatgtcaaatcctactttcagaagcatatcggaattcgcagtatctaaattaaatgcaactgcagggtgtgagcaattgtgttctaagttaacaatctggtatatatgaaaatttctcaaagatatattggtctaatctcttgagatgtttatagaagtaggatgtgcgtatgtggatttctagaagtgagtgtgcatgtgttatgaatggttacgtttgtactatgacttttttattttcaaaaaaaaaaaaaatccatgaacacattggtagtagccaagcgaagtataacgattgttgtaaaatctgaatagatcctgcttcctgccccgatgtgtctcacactcttgatgtgtactaatatcagagagaccacactggggaataatcctaggattgatttgtacttgtctttcaccatggcctgaacagcccccagccccaatttacaccggtctaattaaccgaatttaaccaaacagaaatcgtccgtacgttggtgaatcgcacattcagagaaacaccaattggaatccaacaatataagagaaccgatcacaggcgcaaaagctatagggctgtcagctggcaaggcattacaaacgatcactgcaaacatgctatagatatgcagtagaagcgtagaatataatgttcatattcgacagaaaaatcaagtgaaacgaaactaagagaggcgagaagaaggcaatatacacgtaccggcgaacgggtctagaccaaaataatcgatgaatttaccggtccctctggcttgaactgactgactgtctcccaattaagctcctattatactggagtggagtggcactactggacactaagggtgagttcgagaggaggggaaaagagaagattgggaagatacgcaaaaagaggtgagccattagtatatgattaattgagtataaactattttaaacttcaaaaatggattaatatgattttttaaaacaactttcatataaaaatttttggtaaaaaacattccgtttagtagttcgggaagcgtgcgtgcggaaaacgaaacgaactaactcatggactcctcctgccgaaagctccctaaggaagcaagaagagtagtatgttaatttgaatgcatggcttaatactggagtggtggatcaatccattttaaattggtactccctttattttaggttataagacgttttgactttagttaaagacaaattgttttaagtttaacttagtttatagataaatataataatatttataatactaaattagtgtcatcaaatcaataattgaatatattttcatagtaaatttggctcggattgaaaatgttactatttttttctataaatttggtcaaacttaaagtaatttgattttgattaaagtcaaaacgtcttataacctgaaatagagataacctgaaacagagagagtaactaactttgggctttcaataagtctctgcatgtgctcactttattatcctttcgcaaggcaaggctagatgactgtccaagtgagctttgtatgtgctaacatgtgcctgctgctttaattcaagtgatcatcagaccatatgtattgatgtgatcaagaagcaactaatatttttttgttaagagttttacccgtcgtcgtgcttctagtcagggaacatggccaaacttcgagaaccgccgaacagaatccggtaaaaagcaaattaaccatggaggctaagtatatatgtgtcggttattaatttatcctagctgagttaaattagcctggtttcgagttaattatccaactgtcattaataaggttattagcgaatagattatcaaagtaattagtatattttatttattttatttgttgagtccgaaaaagacttcgtgtgggcctgcgtgcatccctttattagggttgattggctgtgtaacggagtttttttttttttttttgtcgttctgttgagagatcttttggaaagcttatggtgatcccctctgggaaggttggagaggaaactaggtcaggagattactttcttgttcttgctgcttggtacatgttagtgccctctcttctgctcttgttagaaaacagggtagaagattattgtatcccgggttcggtgttcaactatttgtaagccgagctctcgattatttggtttattttgctgctgaattctatttaatttacatatacaagtccggtttaatgcgtcaagttactcactggaggtgtgcattaattagtggcgatttcatgctgcctcacaattttagaaagttaacttgtttaattgctattggtaccataaaaagggacatattcgggtactcgctgtcggtgctcatcatctatgttctttgcaactgtaaacaaatatgggcatgcatagaatctagtaggtaaagaagtcgtatatataaaaagtgctagaccaataaggtgagtacactgaaagttggattaacccagttagaaggaaaagaatgtgtgttgctaatttattgacattggtccccatgctggtggttataaaatttttggccatcccctttgttaatgggtatgttcaatcttctaatacaataatgcatgcacctagggatttgaattatatcttatgcttgatcatctacgaagaggctcttgcaaacattgaacaggtaatgagtgcccaacagaacatttcgtagatctgcgaatagaggagagtcaagggatgacacagactgcgtgcagcttctcttttctgtccagctcaagataacgatggcgagcacttgagcgctcaaacatgaggacgatggcctcgaccaaggtagagaacacaagcagcacccagaacttgcatagcaggtggcacaaccagagcctattgtcctcctaggaataatctgtagtgttgtctgggccacccatgtgaagcaataggaatgttgtccaggatgcaatcagctggtgctcacctgagctgctgctcgtggtgatggatagccggccaagcatgcagattgcagtggagcagcagatacatagaaagccagaggaggatccttcacagtgtgtaacctttgcaccgacggatccatgacaagcggaggacgataacttgtagagcgcagcctaggatgactagtatttggatatgccactctttccaaagctagctagctctgcagccatcgcacatcggcttaactgcaaacaacatcacattaatgaaatactgaatctagaaccggccagccttgcatcattagctaaaatgctcgttttttttttggagctaatacacttgttgttccctgaaaggaaagaggaacattctagtagcaattttttttaaatcaaatcaaaataaagtttcgtgagctctgagcgatgtttgaaaagagaatccaagcgctaaagattaatatttccttaaaatttgaaaactttgtcaatccataatttattaaaaattttctattaataaataaaaagggtagaatctaagttgaaaatactgtcataatgttataagtttgttataatacaaaattaattatcaaagatttaaaagctaaatattttttggctggatatataaagtactccctccatttttatattgtaagatgtttttgttatgtcctaaatcatacttagggtaattgactaagtgtatagtaaaatacaataacatctaaaccattaaattaggttaattaaaatccataattgaatatgttttgataatatatttattgggtattatagaggtcatccttatgtataatatatttttctcaaaatttcagttaagttcagagttgacttaaaacatactgtaactaccttatcgtgttatcaatatatttttagaaggtgtcgctctaaagtgttactaaatgacaacatatgtccaacgaaatatatatacagcagcttgcacgagagctggtaaagtggaaaccacacacccagtggcacgccttcgggcgatcggcttgctgaagaacaccactggtctgctaccttcctggagcacagggcccatgtatgttctcgaagtctctctcgacgatgaagtccatgttgaagtctggtagttgaagcactagggtggccatttgggcttcctgtagtgcatggaacgccgttccgccgcctcttcccagctgaagaccaccttgcggagtagtgttgtgagttgcgtggcgatggagccaaagttgtagatgaagtgacggtagtagcctacaagcccgaggaagccacgcaccgcccacgccatcttggggatcagccaatcctagaaggccttgattttctggtggtccatcggcacacggagcctgagatgacatggccaaggcaggcaatggaggtgaggccgaatttgcacttggagcgtgcgaggtgggaatgatgatcctgcagggtttggaccatgccgagctgtagattaggatgtcataaaaaaccaacatgaaccatcgaaggaacggaaggagtatgtcgttcatgagcgtctggatggtggcagaggcattggtgaggctgaacgtgtcacgcccggaatttctatccaaaattccaaacgcttacatgtgtgtgaaccctcgtccaggaatcagccgaggcacacaataacaaattgataatagagtacaattattactctaattaataagcgaataaaatgtcattacagaggtagatagttcctctcaatcaataaagatctaagcagcggaaaataaataaacggcgcagacggctccactccacaggcagcttgaccaaggctacacctaatcctccacaccatcagcctcattgtagaactcttcctctgatgaatgattgcaaggtgagtatatgacatactcagcaagtcacgcagcaaatatgcaagtgcacaggataacaaaggatggcgtaatagggatccatttgcaaaagcagcatttagcaaacatttgagaatttaataaaacagttaagtattaattaagcaatattaatccaacgctatacaacataccctgttgtataggcccatccattctgaacaaccatcccggctgcacaggtctatctccaaaccaggaatgtaccattccaaaccaggagctaatcaaattattaccaatttaagcatcatttactatggtgagaagtgtgagactaatcacgaaagacattgttagacccgcccataaccgcgggcacggctattcgaatagttttactctgatcagaggtgtaccactgtacccacaagacacaaccccacatcatgtcaccatgtgcctcaataccaccacggtacctcggataggagttgtgacaatacccctcatacaacacaatccactgcagcgcaccttcctggatcataatcacccccttataaacaaggcatggactccccagcgacccccgtgggcttatctccgccacttctcagtctggtgccccgcaatgaaccatgctatacaaaagataaagccgttgcccatgctggcttgtggttggcacgataaatgtttcacaaccgaaactcgtgaaccggtccttaattgtcatgagcacgaccatcaaaaccatgtgctcacaacccaccattaccaggttttagttggcacattagttaattaaccaatcacgattgtccatcgtgaactatcattaagccatcattaaataatagtgagtcataagttatcccataagtgtgctaatgtttctaagcagggctaagcaattatatctaatatctagttgaaccaatatacataaagctcaactagtcaaattataataacccaaggtatcaaggaataaagtaatcaagaacaaaagggctataacaatgaataggttaattccacccaatgacattcgaaaatagatgcaatagttgaatagaaacaatagctttaaataggatcaacatgctcaaagggttgtttgggatctgtgtgacttgccttgctggccttggaactcttcaaactcttctccgacgaaaacggactctccggaaacgacggaatctaagcagaaaagagcaaaatcaccaaaacagcacataaacaagcatgaacagtacatgtggatatttttaacatgtagatctcaattttagaaaaatttagagacttgaaccaactaaatcggagctaagatgaattagttatgaatttttaaagattaaatcggattaaaacacttaaatcggtttaaattgaattatgacgcaataatgaattatttttgaaaaggaaaagaggatttattgcgtcagcgggctagggtttcggtggaccgggcacacgggcggaggttcacgcgaacggacggccgagatcgaaccaatccaaaacggacgaccgagatcgaacgggtccacgaccggctcacggcggtcgaccccgatgacgtcagcggtgacgtcaccggcagcggcggcggctcggcggagcaaacggctcgggcggcgcacgctcgccggcgaacggcggcgctaggacgcaaacggagggcaccagcacgtagaggacgacgcggcgaacacaccggtgaccaaaacggcggcggaagaacgacaaacgacgacggcgacgaggaggaaacggcggaaaccttcgggttgacgacggcgacgaagctccggcgatctccggcgacggcgaaggggcggacgaggatggcgatgcgacggcgaagacgacggcggccttccagagcgacggcgacggctgaaacgacggcggcgcacggctggagcggcggcggcgacggcaaagctagggcacacggcgctagagctcttccggcgacgagaggcgaaggcgagggtggcggcgggtagaggagacaccgggggtccttttaaaggggctcggaggcggcggcaaaggcccacggcggccggcgacgaggaaggaaagatcaggaagaacgaatccgagacgaactcgaatccaactctttccaaaacgatttagccaaagattccaaaggagaaaaggtagaggagatcccgaggatcatttcccctctatcaattcggccggagaaggaaaggaacgtccggatttggaaggagacggcggcggcggcgcgctagggttcggccgggcgacggcggctcggggaagacgaacctgacaggtgggacccacctgtcagcgaccgaacgcgcgcgcggcgcggctgtggactgggccggactgggccgaggagagagaagagaggttttgggccgactttcggtccaaagccaaaagaagactttttaaaacctttttcaatttaaattatttcttaaatgcaattccatttattaaaaatactttcttagctcaaataaatcccagaaaaatctaggaattatagaattaagcaaagtatttaatgaaattttatctgggcccattttatattggaatttattaattaaaattagatcttctctccaagactttttaaaattatttctaaaaattccaattaaacaacaatttatatattttgaattttcagggtgtgacaaacctaccccccttaaacagaatctcgtcctcgagattcggaagaactggcgaacagatacggatgagctgacttcaattcatcttctggttcccaagttgattcttcttccgagtgattactccattggactttgcaaaaacggataactcgatttctggttcttctctcattgatttccaagatacggattggtttctcaacataggtcagatcctcttggacttctatctgttcaagattagcttcttcagtaggtacccttaaacactttttcaattgcgacacatggaacacattatggactcctgccaaagattgaggtaattccaactgataagcaacctctcctcttctactaatgatcttataaggtcccacaaaacgcggtgccaattttcctttggtgtgaaaacgatgaacccctcgaagaggcgtgacacgaagatacacataatctccttcttcaaaactcaaatctctacggcgattgtcggcataactcttatgacgagactgagccacacgcaatctttcttgaatgatctttaccttttcttctgcttctcttaggatatccgtcccgaaaacctgacgttctcccgtttgatcccacaaaagcggagtgcggcacttccgaccatacagtgcttcgtaaggagccatctgtagactagcttgataactgttgttgtacgaaaattctgcatagggtagattcttatcccaacttccaccgaaatctaaagcacaagctctcaacatgtcttctaaaatctgattcaccctttcggtctgtccgtctgtctgcggatgataagcagtgctaaagttcaacttagaacccatctcttcctgaagtttcttccaaaaatttgaagtaaactgactgcctcgatcagacactatcttcttagggacgccatgcaaacacacaatccttgccatatacaattccgccaagcgacttccggaataagttgtctttaccggaataaaatgagccactttggtaagtctgtcgactatcacccaaatagagtcatggcctgatgacgttctgggtaaaccagtaataaaatccataccgatttcttcccatttccattcaggaatcttcaaaggctgcaacaaaccggcgggtttctgatgttctgccttgacttgctgacaaacatcacatactgctacgtattccgcaatttcacgcttcatacttgcccaccaaaatctttccttgagatcctggtacatcttagtactaccagggtgaatggagtataaagtatcacgagcttctttcagaattgcatctttcaaatctttgttgtcagggacacaaattctttcacccaaccatacagttccttgctcatcctccaagaaaccgatagcttttcctcttctcatattcttcttgatctcttgaatatcaggatcattaatttgggcttctctaacttgatcaattagagtgggcttcgcttctaaggctacaacgaaacctctattgacaattcccaaatttaatctttcaaattccttgcataattccaatggcaactgtcgtccttccgtagcattgcaataacctttcctgctaggagcatctgctacaacattagcctttcccgggtgataatgaattcccatgtcataatccttaattaattccaaccatctccgttgtctcatgttcagatccggctgagtaaagatatactttaaactcttgtgatcggtgtacatctccgtacgagtaccgaaaagataatgacgccaaattttcaacgcatgaactactgcggccaactcaagatcatgagtagggtagttcttctcatgcggtcgtaactgacgagatgcataggcaaccaccttccaatcttgcatcagaacacaacctaacccaagtttggatgcatcacaatacacctggaaacccttctttggatcaggcaaaatcaaaataggagctgagattaagcgacttttcaactcttgaaaaatctgctcacattcttccgaccacttgtacttcacatctttctgaagcagtcgtgtcatgggcttagcaatcttggaaaaattctctataaacctccgataatatcctgcgaggcctaggaaactgcgaatctctgaaactgtctttggttgcttccaattagttacggattccacattactaggatcga

SEQ ID NO: 20926 - DNA, 3629 bp, Oryza sativa
cttctgccaactcatgggctgccattcgatatggtctcttatggatcggagttgttccgggtaccaaatctattctgaactctatatcccttttgggcggcattccaggtaaatcatcggggaacacatcggaatactcccgaactataggaatctcttccaaagttatctggttcagtcttgcttaaagactcagaagacaatgcatgaacagttacaactcgaccatcattgctggtgagagttacttttctgttagcacagtctatcacacctttatgtctggctaaccagtccatccctaggatgacatcaaggtctttggattctaacaagataagattggccagaaatggtactcctttaatttctattctgaccgaggggctacgttgcaaagaaagtgcttgattacttggggtactaaccatccatggacatctaagatcttctacttccatcccatgatttcccgcaaaactcatagataagaatgaatgtgtagcaccagaatcgaaaagtactgttgcaggaactgagttaataaggaacgtacccaaaatcacatctggagcatcttgagcttctgcagcagcgacatgattgacacgggcctttgatgctggtacggtagaattgctctgggcagggacaaccttcacgcgatggggcttcggacacttgtcagcataatgtcctgggtctccacagttaaaacacaccacgggattgctgccttgctccctcttggcaggctgttgctgtgttggagctgcaacagggcgtggagcttgattgcggatgttgttgccagcattgttgttgaagaactgacgctgcggacgaacaacagacgaagaacctccctgtggcataggctggggtcctaaagtaagacgcggcttctgattactcccctgttgtgccttgaagtgagcaatccggcgtttcttttgctccatgcgattgttcttgtcctcctgacgaatagccttatccactaacttctggaaatcaggataatctccagtcatgagtgggtaagaaagctcatcattaagtccttccaagaacttctcctgacgctcttcatcattgcgcacatcttccggagcataacgagcaagacgattgaactcgtgcagatactccgtaacagagcgagatccctgagtaagcgacctgaactccttcttcttgagagacactactcctgatggtatatgcgtctttcggaaagcagcggtgaattcaagccaagtgataggttcagcagtagtcctgttaaggcggaagtgatcccaccattcagaggcagggccatgcaactgatgtgatgcaaatgaaaccttctcctgatcagtgcactgaagcaaatccaacttcttctctatggcatgcagccaatcaccagcttcaacaggattagtggtactagagaaaataggcggcctcacacgaagaaattctgctaacttgttctggggaggtgcatggttatttccctgattttgctgattctgaagttgttgcatcatcatgttcataagctgagtctgttgagcaagaacttgagcaagagtgggattctctccattgttattattggggttattgggaccattcccgttgctgcgagtattcaccatctggcatggacagggcacaagaagagaaaccggggaaaactacttaggacagagaattactttaacttttattgatcttaactgagttttattattacaaactgaagactctcacacctctaaactcaccaacttcctaacactcaaaagcaaacaaacgcatgcacttacatcccaccactgatgtaaatcacatgcaagacccacacacacaaccaaacttaaagcaagcaaactaacacaacgatctaagacaacgacttaacaagtcactctagttcttccaagcatcggaggtcgattgaaggttcgttcggctcgtcttcatcatcttgagttgctacccactcaatcttggaatggttgcgcttggattcttcttcttcatcatcacttatgatgatgactggaggatctgctaaggctggggcaacttctttctccaccacacggacctttggcgccaattgatagcgagggacaaatagagctctcttccttgcggtaagacgaaccctggccttctgcggcggcgcttctcccttcaatgcggctagttccttctccaaacgatccaccttgtcttctagcttgcaaatcttaccacgattccggtcttcacgatcttgagccgctaacacagtctccgcacgactttcatccatagcccacagcatctcaaccaaatgccttatggtagcatcattctcaattccttcagtctcaaggtagctgccacggtcacttccctgtggttgacgagggtggtagcgatactcagtgtcggccaactgatcactgtagcgatcacggagctctcctatggcgatccttgccacctcctgacatgcatggatgtagtttcttcctccagcttcgaacatcactgaggggatatcttcactattactgttcaaggtgactttgactcggcacttctcttcatgacgatcatgaggaatctgggcataaaaaggggcagtcccaaatccaatgacaaaggacatcgtacgcaactcctggacaaatccctcgacaccaaacaggtactcaggcttgtagcgcggcatctaaatacaagtgaaaggagagagttaagacatctatccaattaacagcacaagtttttggattaatttgaataaagtttagaaattcaaagtaaaaggtatgtaaataaagtaaaccaagcttgcaagatgagttgaaatagttgaaaacaagtttacaaattttgtacttttgaataacaggtttcaaaagaaatgaaggagaattttaaaatcatcatgctaaatttattttattgcagcaagattaaataaaacaatattgtaaaacttttgctgataaatgagccattagtacagtaatagatgtacagtactaataacactggaataaattttgaatgagaaccattaaaagagattatgaagtgcatgtgccattagtttggtttaattaaaagagagagggaggagaacagttctacttttccaatattttagagggcttctatgggtaaccatttggcataacctagggtcaaggaggctctgataccaacttgtcacgcccggaatttctatccaaaattccaaacgcttaaatgtgtgtgaaccctcgtccaggaatcagccgaggcacacaataacaaattgataatagagtacaattattactctaattaataagcgaataaaatgtcattacagaggtagatagttcctctcaatcaataaagatctaagcagcggaaactaaataaacggcgcagacggctccactccacaggcagcttgaccaaggctacacctaatcctccacaccatcagcctcattgtagaactcttcctctgatgaatgattgcaaggtgagtatatgacatactcagcaagtcacgcagcaaatatgcaagtgcacaggataacaaaggatggcgtaatagggatccatttgcaaaaacagcatttagc

SEQ ID NO: 20927 - DNA, 876 bp, Oryza sativa
aggacgacgcggcgaacacaccggtgaccaaaacggcggcggaagaacgacaaacgacgacggcgacgaggaggaaacggcggaaaccttcgggttgacgacggcgacgaagctccggcgatctccggcgacggcgaaggggcggacgaggacggcgatgcgacggcgaacacgacggcggccttcccgagcgacggcgacggctgaaacgacggcggcgcacggctggagcggcggcagcgacggcaaagctagggcacacggcgctagagctcttccggcgacgagaggcgaaggcgagggtggcggcgggtagaggagacaccgggggtccttttaaaggggctcggaggcggcggcaaaggcccacggcggccggcgacgaggaaggaaagatcaggaagaacgaatccgagacgaactcgaatccaactctttccaaaacgatttagccaaagattccaaaggagaaaaggtagaggagatcccgaggatcatttcccctctatcaattcggccggagaaggaaaggaacggccggatttggaaggagacggcggcggcggcgcgctagggttcggccgggcgacggcggctcggggaagacgaacctgacaggtgggacccacctgtcagcgaccgaacgcacgcgcgcggcggctgcggactgggccggactgggccgaggagagagagaagagaggttttgggccgtgtcacgtcctgataaattcatcccgaattaaaaatcattctctaaaaggaataatagaattaattaaaattcgaaaagaaattggcaaacactaaaaatacgtacaagaaaaattcaaatgtgacccggagaatttttgttaaattctccttggtctaaaa

SEQ ID NO: 20928 - DNA, 3756 bp, Oryza sativa
cagcctgttcaaggtcgcagggacgcttcagtccgcagcgtctgtgcttcaactgcttcgagcccgggcactttgcggataaatgcccaaagccaaggcgtcagcaaggccaagcgcctccccgctccaacaacggtggcaaggatgtcattcggggtcgtgtgaatcacgtgacggccgaggacgtgctgacaactccagacgtcatcgttggtacgttcctcgttcattccatccctgctacaattttgttcgactctggagcttcccactcgtttatatctgtgccattcgtggggagaaatcagttgggggtagaaaggcttagaaaccctctgcttatcaccacccctggaggggttatgacagcaaagtattatagccctgccgttcctatagaaattcaggggattccttttccctcggatctgattctgctagacaccaagaatttggatgtgatccttgggatgaattggttggcccaattccaaggggtagtggattgcgcgaggcgcactgtcactctgtaccgagggccagaacaaccggttgttttctttgcacctccaacctctgtcagaagttcagaacttcatcagataggactgtcagaaatccccatagtcagagagttcggagacgtgtttccggaagaactacctggtatgccgcccaagcgagagattgagttccggatagatcttgctccaggaaccactcctctgtacaagcgaccctaccgtatggcagcaaatgaactggccgaagtaaagaaacagttggaagagttgaaagaaaaggggtacatacgtccgagtacttccccatggggtgctcctgtgatttttgtggagaagaaagacaaaacgaagaggatgtgcgttgactacagagctctcaatgaagtcaccatcaaaaacaagtaccctcttcctcggatcgatgatctgttcgatcagcttaaaggtgccactgtattctccaagattgatcttcgttccggatatcaccaattacgtattcgggaagaagatattccgaagaccgcattcactacgcgatatggactgtatgaattcacggtgatgtcgttcggcttgaccaatgctcctgccttcttcatgaacttgatgaacaaagtgttcatggaatacttggataagtttgttgtggttttcattgatgacattctgatatactcacaatcagaggaagaccatcagcaccatctccgtttggtattgggaaagttgcgggaacatcaattgtatgccaagcttagcaagtgtgagttctggttgtccgaagtcaaattcttagggcacgtgatatctgctaaaggagttgctgtggatcccgaaacagtgaccgccgtcaccgattggaagcaacctaagacagtcactcaaatccgcagtttcttaggtttggcaggatactaccggagattcatcgagaacttctccaaaatcgctcgacccatgacacagttgttgaagaaagaagagaagtttgtgtggagcccgcaatgcgagaaggcgttccaaactctcaaagaaaagctggtttcctcgccagtgttaatcttgccggatactcgcaaggatttcatggtgtattgtgatgcttcgcgccaaggattggggtgcgtgctcatgcaggacggtcatgtggtagcctatgcctcacgccagctacgacctcatgaaggcaactaccctacacatgacttggagttagcagcggtggttcatgctctaaaaatctggcggcactatctcattgggaaccgctgtgaaatatatactgatcataagagtttgaaatacatcttcactcagtcagatctgaaccttcggcaaaggagatggttagaactcatcaaggattatgatgtgggaatacactatcatcctggtaaggccaacgtggttgccgacgctctaagtcgaaatagccactgcaacactctcaacgtccgaggcattccacccgagcttaatcaacagatggaagccctgaacctaagcatagttggtcgcggattcttggctgcgttagaagccaagcccaccttgctcgatcaaatccgtgaggctcagaagaatgatccggacatgcatggactcctcaagaatatgaaacagggtaaagccgctggtttcacagaggatgaacacggaactctatggaacggaaatcgggtatgcgttcccgataacagagaacttaaacagctgatacttcaggaagctcacgaaagtccttattccattcacccgggcagtaccaagatgtacttagacttgaaggagaaatactggtgggtcagcatgaagcgggaaattgcagagtttgtggctctatgtgatgtgtgccagcgtgtcaaggcagaacaccaacgaccggccggacttctccaacctctccaagtgccagaatggaagtgggatgaaattgggatggatttcatcaccggacttccaaaaacccaaggtggatatgattctatatgggtaattgtggatcgactaacaaaggtagctcgattcattcctgtgaagaccacttatggagggaacaaactagcggagctctacttcgctaggatcgtgagtctccatggcgttcccaagaaaatcgtatctgataggggaagccaattcacctctcacttttggaagaagctccaagaagagctgggtactcgattgaatttcagcaccgcctatcacccgcagacagatggacagaccgagcgtctaaatcagatcctagaagatatgcttcgcgcatgtgtactagatttcgggaagacttgggataagagtctcccctatgccgagttctcctacaataacagctatcaagccagcatacaaatggcaccttatgaagcgttgtacgggcgcaaatgccgaacaccgctattgtgggaccaagttggggaaagccaagtgttcgggactgatatcctgagagaagctgaagctaaagtcagaatcattcgggataacttaaaggtggcacagtctcggcagaaaagttatgccgataaccgtcgccgtgatctggaatttgcagtggatgactttgtgtatcttcaggtcacgccattgcgaggtgtgcacaggtttcagacaaaagggaagcttgcacctcggtatgtgggtcctttccgcatcattgctcgacgcggagaagtcgcttaccagttggagctgcccgcctccttgggcaacgtgcatgatgtgtttcatgtgtctcaactcaagaaatgtctccgagtgccatccgagcaagccgactcagagcaaattgaagttcgcgaagacttgacctatgtggagaagccagtgaaaatcctggacgccatggagcgcaggaccaggaaccgagtaatccgtttttgcaaggtccagtggagcaaccacgccgaagaagaagctacttgggagcgcgaagacgagctgaaggcagcccatcccgatctcttcgccagttcttccgaatctcggggtcgagattccgtttaaggggggtaggtttgtcgcgtcccaaatcgactctaaaattcatcctcaaaattgtgcaaaagaataagtaaaattcatgtgaaagcctccaacaattaaaatgtgcaaagataaaagtcaaatgaggcttgtaggatttttgtatatttcctaaaagcctaaaatgcttaaataaattttagtggaattttcagagcacaaataataagtgaaaaga

SEQ ID NO: 20929 - DNA, 2447 bp, Oryza sativa
tcctgcagccctgttaagagtaaaatccactgggagcaaacaagttcaaaagttacccgcaaaattaaataacagaaacaaatgctgcaaatagcaacaaagaaaaactgtgtcctcataccaacaaaccagccggtcacattttgtctctcaacttcataggttctcttcctgttggcaaattctgtacgattggcgatatcagttgttgcgtccaatataacatcgtggaaacatatcagatgtccgtcctttgttgcaagtatgtcagactctatgaagtctgcaccttcttcaatagccctctgcaatacaaccaatgcatatctttgagtttgcattaacaatcttcagagaatctctcagcaaaataatattatgcacatgatctccaagatagaatttttaaataaatttatatcatggcttgtcttggatattgttagttaacaacgttaatgcaatcaagtttcacatgtcactaaaatatgcccatgcctgtacttcttgtcacttgtcatttcgttaaccttttgtttttgcggatacaaatttattgtaattttattttggaagtggtcactcaaatttggatacaaagtaggtactgagaaatagattcttatttaccaggtaggcagccgtggtctcttcgggtatttcaccattggaacccctgtgggcaatgttgtaaggtctgaaagtttgaagtggcttcctgtggtttacatccagctgactctgctgagaggcagctggattggcattggattctccagaaagtagtacaaggacaatgatagagatgagccctgtcaagacaacactcaattaacagtactagacttgaattgttcaagtacgctgaaaagttggaagtttcattcttgatcaaggaaatagagaagtgaagaagccaattcctttgatagttatcattccacgagaaagatgcattaccatcagtatcatatgaactgaagaacatatataaggtagaaatgcttcagtgctaacttgaagaaaatatatgaattactccatgagagctacagattcagatacctagtatttcataaacatacatcgaggttcatgtaaaaagatgctgccaagaggagcattggaaccacagcatgggacaggaaaggaagatgtgaagcacacaggaggtgcatttttttcctttttgaataaacagaggtaaactattgtcaatatgaagaggaaagaaatgcaactgtagctgaggagaagagaaggattttggtcttacagaaggcagccatgcttctctctccttcctcttcctcctgcaatagtctgagctaaaacctcgtcttctcaaaagaggagcctttccttctttctctctcctccctagctctcttgaagagcttatggctgatgagcttttaagcagaagcaccctgcctgcgaatattccttggagttgacatgttcttttgtaagttgcagttctattcttcctctgtgcacactctgcaccagttaagagtctagaaaataaaagaaaggagagtatatgtatatcctattcagtcagctgcacatagcatgagcttctctcatattttactgatgaggaacgaagctgatggaagatggtaaatttgcaacttgcaaatatttccagcaaaactagaaagcttattagcacatgattaattaaagattaactgctctaaactttaaaaatggatttatttgattttttaaaacaatttttatatagaaacttttttcaaaaaatacaccgtttagtagtttggaaagcgtgctgacggaaaacgagaaagttgaagtatagaacggggtaagtaatgaaatgctgttacaattggcatagttcttgaccaaagctgggccatcaccatccatttcaccgaggactatgtgtccccaaacttatgtcagcttctgaagaaagttgagacgcggttttcatttttgtcaagttttccagcggtcaatgatcaacgccgaaatttaaatcccggccgtgtgattcgagtcctagaattccacttgcattgggtcaagtcttcttgagggaccccctccctgtagttgaagtgtttaagagtgatgaggctggaccagcaataatgcctgactgagacagtgcactagaaagaatggaagataatcctaagctaatgtacaatatccagggaaaaacttttgtgtggtctaagtcatcggattagctttgcaattcatcattatgacaaaacaatatatatgaaattttgtaggaacattgttctgaaagatgatgcagtatattccttagtactgtgtttgtataagtttgcttttgcgtgtaagtttgctggactggatttttgtatagcagggatgaagtatgaacatgacgcgtaatcgattatcaagtgccgaaattacgccacaaataactagtg

SEQ ID NO: 20930 - DNA, 5377 bp, Oryza sativa
ttctgggagccctgtttagccgggagttcctgttccgcgcgtacgcgctaggaacggaggcggcgcgcactttcctggcgtccctaatagtgtcgttctttttttttaatgaaaattcgccaccgtatgtttctttcttttgtttagttgactgaaacaaactttcaactcagatttatccaggatgtggaaacttttcaactaagatttgaacactctcaagtctagatttgaacacagatctaaaatttttcaagtcaagatttgaatactttcaacttaaaattaaaaattttcaactcagattttgaaactttcaaatcttgatttaaaaattttcatgtcagatttgaaaactttcaactcatatttaaaaacattcaactcaaatttgaaaattttcatccaaaacttaaaaactttcatcgcaaatcttaaaaactttcaactatttaagtccagatttgaaaactttcaactaaaatttaaaaactttcatctcagattaaaaaacgttcaactcaaatttgaaaactttcatctcaaaactgaaaaactttcaactcgaatttaaaactagcagaaattaaagatgaaagattcaatttccaaaataaaaaaaacacggaaaaaaatcggcaaaaaatatttcagggcctccccggctccccacggtggaaaaaagaagagagaaaaagggaaaaaaaaaggaagagaagagctacttgagggcgtgggccgtgtgggctagaaacacgcgccagatacgctaatagcgcgtacgcctaattagccattaacagccacatcagctaaaacatggcaaaatactgccttaaaacctcgattacgtagatgcttttttttttcggtttaaggacgcgattgaaattcaactccaatacgagagacctaaagcgaaccttttccttttccaaatcctatatatttcttttgtcagcccatcaaggagcttctatccgaatccaaatttaagttaaacggagcccaacccaaggcagctagttgggcggcccaggaggagataaaacgtattgccgcatcgtctctccgcaaagccgagagaactcgcggcggaacagaggaggagagagagcgaaagtgcgaaaccctaaaggcctaaaccctatacttggaggtctctcggcgcgagcgatctgctctccgatctgagatggcgtcggcggtgttggagatgctcaagaacctgtgggagtcgcaggtcaccgacgaggagaaccgcgcgttcaactatgtccgtccaccctctcccctctcccctctccctgtcataaacttttttttttacctcttcctcgttgtcgtccaaggcgtaattgtttgtgtgggtagctgctgcgtggtagtatttgttattcgaggctgcgattttcttttaaaaaagaagggaagtaattttgctgttcttggaatttggtcgtgcgcgcgggggagatcatcacggggtcaaagcacttggaatttactacttgtttagcctttagattgggtaaattattaattttcttggatcgctggtggtcaatgtgcgattgattaggtgtaaaagagcagtggtttcaatgatccaatctaggctcgatttgctcaatccttctaattgtacgactaagatttcaggggatttagttatttccactagtttagggttggcacctatttagaggtggcaggttccgaaatgatcaacatacttttatctgtcttcggctccacatctactgggagtctggaagttcagtgctaaatcgataagaagcaagttgaaagcaaatctaatctattttgaaacattcagcaaacactatataactctctttgtcactatgaaattttcagttatttttgtagcatctactaatgtaaaaaaaaaatgttgtgcttaaaacgggtgcaatgtacgtaatcctagttaccaaatcacctgggggggtaatccaccctgcgtggtatcaagatccttctgttggctgttgtacgctaccttccaatgcagtttttgagccgggccagttgcctgcaaggttactatttttcttatacatatattttgtcctgtggttcactttgacgaatgatggacatatgttttgagtttattttttaccgcaatataaaattttgccatttttaagctgggctgcttgcctgtaagatagtttttttttttcttttgatattttatctctgtggttcactattgacaaatgatgaccatgtgttgctctacatgccttgcattttatttttcattgcagtataaaattttgacagaaactgtcttctgtctatgtatttctgaatgttggttgtcagttgtaaagtttttaaaaagatacaattatttggtgatttctcttgtatccgtctaactaatttaaattggagctagaatagaccaaacatgcgtgagtgatgagtctggattctggaagcaaaatcatccaactaaacaggagattttagggggggatcaaacatgaatatttttttgttacgtcaatcatggtccttttttttcctggtattattcgcaagtgttttgtggtgattaatgcttgctgcttttgatttccagaggatactaaaggctgtaggtctttttgctggatccatcgccgtgatgcataactttggtgaactgatgaacatataaggctgttctgggtggttgagcagggttccatcttccatggcatcattataagatgtccgccttatcatcaggcttgtcgaattttttgtttacttagattgtttttagctttttatggttcaagcacttattgacattcacaacaggagtatttttctgttggatagtcagtgtcaaatttagctgcaataccactgaaatatagtactatcatggaactttggtagacctgtcctatcagaattcattcatctacttctgaatattgctgttctgttattctgagtaatgatgcctactgaaattaggccacgtttattggtgattgacagcagatctgacgattttcagataaagggagctggcctcgtttaaatcatgcatttttgccctttcctatgcaagtccagctgttggatgagaacataagtaagatctgttggttgtgtatagataattgcatattggccagcattcctttgacgtcactgttccaatggatcccatcggaatatgctacagttttccgtattgcatcgattgaatcatgcggcaagaaaatggcgaatgactttttttttttcattgtctctttcaatgagtagttggcatatgacttaagatacttcctccgtttcacaatgtaagactttctaacagtacttccattcatttagatgttaatgaatctagacatatgtactgtgtttagattcattaacatctatatgtatgtgggtaatgctagaaagtcttacattgtgaaacggaggaagtaaagaaaatcgtagaaaatctgagaaaaaaaaagcaaaacatctatcccttgattttcacttaaatcagtggatctttaaataaatccaaacacgaaaagtgactatactgttccacctctccttccatggtatatatatgtacgtacgttagtacgtaactttttttcttttcaatgtatatagttgagacaattattattactattattagtgataataaattttaaataaaagttactttacaaacatagaataatatatcagcatataactcttttacaagtatacataaatgaattagctctacaatacttgaaaataaagtttacaccattatattatattatgtacccattattttagattattttattaatgaaaatatttgtccatttcttttgttaagtagtcatggttggttttacaaagtttcattaatttttgtgatataaattatagcgaacttattgattataatttacatgacaaaactatattgttaaccgtattatataatagaaataaactttacttaaaaaacttcaaaatttataagtaaactatacatactacttaaatctatataattatggtcttatttcaaacaaatattgtttcaaagaaaacaatcgaacatgcaaaagaagaaagaaattagcttcaaacaatgttacattttgcactaccaagccaagcaattatgtaggtgtttgtgtgcaccaaaacccttcaatgttctttaaaactatagagaaaatattgttgaacttatatagagaaaaaaaaaatctaacttttaatctacccttgatttgtttgttatgtgccttcacggggcgattcaatcacaaaaactttgagttccttgatctcataatttttgcttctagccatattttacacagcccatgtacaaattgtatgcttgataattagctagtggtagtttaatatttacttgatacaaaagttgtatgagcttactatcttctattgaaaagtcaatgaatggtttttgagatatgctaaaacaaaagaaccctcgatatattttaaaaggacattctccgactatatacgagacaattgttgaacaaactataatgttacccttcaacaatataaatgcccgcgcataggcgcggctaccttcctagttgtgtaagtaaacccttgcagtttctcttgtatttattctgcatagattctctctatctcataatttcattattttggtagttgcacatttcagttgttctttttgttgatttttgtgctatctgtaacaaatccaaaaatgctatggcacccataatggtcccatgtactaggcagcattaactgcactacaacatcaaactaataaattggccatcgagttattcttaaatatagatttcattctctcttcagttaatttgtttttaatttattatgtatgcctcacctattgggtaggagatatagcatccgttgagacttgagatttaggaaaaaggggaacatattactcttttaaaaagaggaacttctttatctttgtctatttcctcacatgctgtttcaaccagaagaggtttgggatttcttcctgcgaacaatcacagcacaatatacgtataccccaatacgtaacacgtttcttgtaccctctatgtatcaagcacaagtgagattgcacgtgtttattgtgtactgtttattcatgtgatggtatgttctatacccacccttacttcagaccttccttggctgcatttattttgccatgtttgtgttactccctccatccaaaagtcagacctatttcatttgttgatttttccaaaagtttaaggcctatttgtagtctctatgtgctaaattaaattgttgacgggaacccaagaagctatcttag

SEQ ID NO: 20931 - DNA, 2462 bp, Oryza sativa
tgagccattgaattagtcagcttagatttatttaatcaataagttcttacataaatggagagacatataattggcgacaatttgttaaaaatatattgagaaaatttgttcaaaaaaatcgaatggttggtggcttcaagttgagtatagcttctaaatatctagtgaataaagttaggaaaagtgcaaatgaaatagttgaaaaggactgtgtgaccgaacatgggtgtctgaaatgtttcttcatcattcgtgaactcctatttttgaatatgataagcttgtccagatagcttttttgtcttttgttcatgtgtgcctcatctggatggtcatatagctattagttttgaaatggctgtgtggcaactgtccattgggatattctagattttagcagtaatgcttattggatttaaatctgaagtagtcaattcatgctgctaatactattctgatatatccacttgctaaatatacgtgacatttaaagatgatttgttgctttgtgcagatatgctattgctatactgatgaatccatgatgcaaccttctctcagttggagtgacctgctctgagtggcgtgttgatggattgatttgtgatgaacaccagtccaaactgtggcaccatcttgcttgtcaaaccttcttatacaagttaaaattcccattcttgttctccggtgctttacttgatcacagaaatggcatatcaaaaggaactggtgctggtcagctccatctgtaactctatttctcctagcaagcagcgatgttcatacttcaaccaggctgactctactaactaaaagctcacaaatataccggaagaaccttgcagtaacaagcctttgctgtactctggtcattggttaactattgtgtctcattagtttgctttgtggatatatgtcagcggtttgacagatctcctgatgctctgtggtggttggcagtctccagctacatggccactttattggccatcagttatatattaattgttgttaaattgctgcgttagttgcttggttgcaacaacattgtagtagatttgtaccatatgattgatgattcatttggtactgggtgaccctgtagattatcccggcccttctgaattgcaaatcataccttttctgtaaactgtaaaaagcaaacagtgacagttgtgaagaacagttatcctcgcactttcggctgtgcatttgttttgcctggatgcgacctggtacaggcatcctgatcctgccaagttgtgtggacttcttgtggatgttggcaagctgggtaaacgctttctgtgtgctttgtgataggtgggttcatggttgcacctgacatgtgtgtccatcttatccatttgcttgcttaggagtgaggttttctccactctctctttattttatttgataaattcctgcaacatgttattctccaagtacaagtggaaatatattatttggaaataagcaggcattgtaagcatagctagttctctattattttagttatattgacggtcgaaatttgtcggtaacgaccgtcaacatccacccaaatcccttataatatggacagagggattacttaacaatggcaaacaaacaaaaatagttgaaaaagtgattagaaattctttagaaatgacttgcatttaagaaagagttgagaatttcaactacttgcatttgaaattggatgagtaatataacataaatttaagaaataacattgacaagtgcccaaatttcaagaaatatcattgtgtctgggttacggataaaacataccttatatcctacgacttatggaatacatcgataaggtataccttcacgcacacggatcatttccatattcaccatttggaattctttctaaattacagaaaatatctctatgagtcgaacgatttccaaagtcctactcggaagggatagagtttttgttataccgtaccagatcaaatatctccaagccttacttaggagtcaagatgatccacggtataaaagggacccctagggaggggtgcagggcatcgaatttcaccgcctacacacccaccatagttcacgaagccggagtacgtggagccaagtcgttgggagatctcgtcgaattcatcgactacgatctcgtcgatatcgtttgtttcgtttacttcctttgtaatctgtgattccccatcatcaatctcatatgaactagactaggactattacctgacaaggggcctgaaccagtataatcctcgtcttttgtctgcttgatgtcgtgctatgtagaccctcgttctaacgtaccccagtactcaactcatctggtccacgagtatcactcgtcgacacattgtatgcctttgacaagcgctcaattccaaaaaatacaattgacaagtaagagtttcatgaaatgccatcgtacatgccactttgttccaaaaatgccatta

SEQ ID NO: 20932 - DNA, 6912 bp, Oryza sativa
ttatggaacttgcactcgtcgatgacatttcttggattttctcctaatagaaaatatgtgatattatgatatttttttcttttaacactgaatttgctcctaccttgataatagagtgaatctactcagtatcacagagttcgtcacaattcaacaatatgaatctgactttgtcgacatccataatataccatcgcctttcccttaacctctaaatttaccatcatgaccacagaccgttaatttgcattgaagacctagagtgattgattttgcccctctagttgacagaattgagagaaggctcacctccagctctatgttcctgccctatggagggagactaacccttgtaaactctgtgttatttgctatccttacatattacatgtgctcccttcaactaccagtcactgtaattgaagcaattgacaaggctatgaaaaactgcttatggagagggaatgatcctagctcgaaaagaaagtccttagcgggctagcataaagtctgtagaccgaaggaaaaaggaggcatgggtgtcattaatctagccttgcagaacatcgctctccttctcaagcatttggcaaaattttatcaaggggctgatctcccttgggtaaagttaatctggaattcatattatcagaccaaggttcctcacagagtttttaacaagggttctttttggtggagggacattatcaatctttcagattacttcagaggaattgcaaagtgtgaggttatctcaggtaacacagttttgttttgggatgacatgtggaatgaccaaattaggagcatcacttacccacatctctgtggccatgcaattgtcagaaatgaatctttggctgtcacctgtgctaaaccttttgaggactgctttaagttgccactaacccaggaagcttacacagaatttctgcagctaaagggagagctggatgctctgtccttagcaagtcagcaaggggataattggagctttatatgggtcaggaacaattacacctccaaagctttgtacaagttgaattttgcagccatgcaaccccccatacctttccgatggatctggaagaccaaatgtgtgatgaagataaaagttttcatatggcttcttttctctgataggctgaacacgggagacatgttggacaggagaaaatgcgcccccctaaatgctgatcttacttgtgtcttatgccctatgcatcatagagaaactttgtctcacctattctttcaatgcccttttagcagaaaatgttggcagaagctaggaataacttggaacacttctctagaattctttcagatgctggtgctagcaagattgagatttcagagaaaaggattcttggagatttgtttcattgcatgttggcacatttggaagcaaaggaatggaaagattttccagaatatagatccttcttttgacagctggtggaattgttttaagcatgagattcttctacatatgtgtagaatgaatgatgatcttagacaattggtttctgattggttacaaactttatagtttccatagggggctgtagccttttgtaatttttctttttccttgtaaatacctttttggcttctataaaatacactactgggccaatgcctggtagtacttctttcaaaaaaaaaaattgcattgaagaaaggacaaatatgcccttaggatatgtgaagaccagtagcactgagaccatgccatgtagggcactaagagcaataacaattgagagagaatgtacaatatgactacacatgtgaaaaatatctttatttatacaccatgattaagaataataatgagcacatattttaggtatgaataatgtacaacacgtgtgcaatataaaatgtgtacaactaaatcatatgagatctcacatcatattagcaagattataggacaaaatagagtatcagtgaggggtttgcaacaaaaatcatccatgaaaggtgcatagcacaatttgacaaaaaggtgcataaaatccaatgtccaagtttggcataaccaagttcgatcttacaagagctaaataaataagttaagtggcacagatgttacaagcacatatcccaagatagaaaccacaacatgtaacatcaatctattaatttcctcttgcttctacttgacatggatgggttagttgatggcaatttcttcttgcttctagttgacatagatgggctatctggtagtactgttatggggttagtattctttttccccttggcctttgcttttggtggtggtgtgctcgcttctgttacacaaagaagggcacattggctttgtgttttatttgggccacttgaattacaaggaaagaagttcatgcatatattagaataggcacaacacaatcacaagaaggaatatggataaaaaacatttgaagtacgtatacctcactgatgtagcatttgcatttgcagaagtaattaaattacaactagaactatctggtgcatctgtcctcttctttttgctgcaccaaaatgaaaaactagttatcagatttaggaaattgaagtgcaaaggagtaccatgtgatcagatttaagttatagtagttaccttggtgggccaaccaaagttggagttggagttgaagtgccaatgagtaatgtattaacagcacatgtacttgaatttgatggtgttgttttcttcctcttttgcctagatcgatttatttggcaacaattataacaaaagtctcttatagcaatgtaatgaatgcgaaaaatcaaatagaggaagaaaaataccttgtttttgctaaaagagcatatgcttccttagcatctagatcagctccttacatgcctgccatttgtgaccaaagttgtggcaaatagggcatttttggctacctggcctacctttactagtgtctttcccttcagctccactcttacaccttctattcctatgtctccctgcactcctctttaaaattggtggataaagaaagaagccatgtgtactctctggctgttgtggcatgttagtaagaccaggaatacatggagcatatgcagttacaaacttggctacactatagcattcatctacaaacaagtctatatgcaaacccctcactgatgtcaaggccggctctacattttttagggccctaggccaactccatgacatgggcccttaggcatacacacacacactctctctctatatatatacacatatgcactttggatttttaaaagtatacttttaaagcattcatccgctaatcatgctgaaaataaatattgataatatcctctatatatgttgctaaaaataccaaaagagcagtaaaatggaattactatggttaccttgaattcttgactaaggatcaagcttcagggacttcattaataatacttgataaaacaaaagatgacagacatccatttgcttctcataaaaaaaatactcctttaggcatttcttgatgcaaaatcattaatgcggtatcgagatcaatattatccaagacattcttctcaatgcagcacataaccaagccatttaatctttcttgtattattacatttaaacattgtcatcaaatctttatcaaaagaaattgtgcgaaacagattcaaagcactatcaaggtaccgcattattacagtttcatctatgccccatgtatacttttcacaaatgtcaccaacaaagtcattaaaattagttgtgttagaatcaattggccagtcaaacacccatgcacagccaaatctattgcccgcgcgaataattctcactatgaaaataaaagtggaatatggatccatcttgtggatccacacattgtaaacaaacataacaaccaactggaaatgcacaaacaaacaagcttaggagaggagaaattactcatcttggatgtcaatggagggtgcaacaacggcaattggcacgacctcctttgaggctacaacatggagtagagcatgatttggtgactgttgagaagcatccgtaggttgcactaggaacaacagcagctctctagcaagggagtcgtgcccccttggttgcgacgatggcgttgacgatgacgacagcatcaactctcttgcaggggagccatgtccccttggttgcgacggcagcgctgatgacaacggcaacatcagcagcagctctccagaaggggcgtcatctcccatcggttgtgacaacgactctttaacaggggtgtcgtctcccatcggttgcgacgacgttgaggatggtggtcaggccgccgctggggacgatggttgggtgatgaggacacaactaactcagatatgaccatgactaccttatgtgttaatcaaccaaatgtgtaaatgttctatattagatttatagcaaaaatgcccgtgcgttgcaacgggtaaaaataatttacctattccaattatagtgacttctactgttagattgatacatcatagcaggctcaaattataatggtatagattgactgaatatggtgcttctgcgtgagtaagcgatgcggatgagaaaaaaggtgtcctaagcgcacccagctacgttctcgtgcacacacgacactttatcgagtcggactcgaacggccacattatcatgcacacacgacacgtcgctttatcgagtcagacttagacgatgctttgcctttatatgccaataaagcacttgctacagccctctctgcccgagccatattctaccctgatgcgggcatggaatccttccactgcgttccaaaaagacgtacaaaatttccccaattagactcttgatgagcatgcgataattcataatgacacacaggaagctaagatgacacatgaccgatgaaatgtgaacctgtgaacgagttataaaccagccaaatagagaaagctgtcctaacaaaacgacaactactacattgctctagtggctagatgagcacagcatgcagcatgtaccctaggagacgagagtctgaatcccacaaagacatgcatgtatccctgaattttgcataatatatagttcggattttataagtgtttaactcggatgacggacacaaatttagatgagtatgaaatcatcttcaacttttataatatataaagatttctatttttttaaactctagatcaatagatttatggcgagaaaatttatggttggttatttgtgttttgatttcgttgctgggagtatctatttattgctatgggatgaatcatgtacaatttggaaacgtataaacaaataccgacatggatgctaagtccatgcatgaatctaattatgattggtttgttatatctttacactgcttaggtgtttcacatggtttcgttgctgagaactattatctgtttcctacactatgaccatgcatggatatttatttctatatcacgtttccaaaaagtatcatgtccgtttgttttttcctttaatttttcatccgattgagaatccgggtcgccagtagattttttttcccggtccgatccgtgttttatacgtgtttaactcggatgacggatgaaaattaaggtgagtatggaatcatcttcaattttataataggtaaagacttgttatatgaacaaacgttgctacacaatgaatatcgtgtgttttcatttgtagaggtacttgtttgggtgaaggaaaagagatcgactgtaaggaacgcatggatgatcaaaaaagttgattgggtaccaaaccaagaccttctccaagtctactcctacctcaccatgtcacttttggtccatagaaggcaatagataaacttctatacattttggattcggattcggacctcctaatagcattgacttcaaacagacctagccgctaatctagaaggaatctcggggcccatgagtacttgctggaaagcttatgttgtctactttcagatggttttggtcccacgttaaaatttccaccaagctgtcgggaatctgtaaaacaagccacgtactttatcctatccgaatctgatttgggtcttaggctttgtaattgtattgtgggctaagcccaagggggtgtgcgccctagggcaaccctaggacgtccctaatcatgtatattcagtagttgttattgtttagagtcgggttttgcttagattatttctgccattgcagttttgccgctagatcggtttgtggaaccccaaattcgagtgcttaatcatttatatgcaattgtgttgcaatctatcttgttcttgcttgtatttgtcgattcgcatgcagggattagcctccttggcgaggtcaactgggcagtgcacgtttgataaccagaggagacgtggtgctgcaattgtagggttcggatcgtgtgtgtgaaatttccaccaaatcgagagttatcaataccttttggaagatcgggacctattttcctcatcatcgggccggtgcaaggaatggaggcactggggacggtggtcggggctgcgttggggatggcggtcacgtcgacaatggcgagggagacggctctccggatggagtaggggcggccattggttacagcggcacgggggttagtggggcagccggggggaagtgggaggggtccgggagacatatcaaaggctcctccggcgagggcacgcatgcgatggcgtgcggagatgcggcatggtggcggacggatatacgacgtggcggcactgggaatgtggtgctcaaagaggagaaattggggcgtgctgacttcatgctaaggttagatgactcaaagggtatttggtcattacggaaaaataacagtataaacggcgtatagctgacagaccgtggacggtgatagtaaagtgtagagattaagggaaagccgatggtata

SEQ ID NO: 20933 - DNA, 10998 bp, Oryza sativa
cttcatgtggctctacacatgtcacctcctctgaatgatcaaaacccctggatctgaactctgagggcccctttgaatcatatgaatgaaaaaacggaggaatataaaaaacatagaattctgacaggaatgtaagtgtaaaatagagaattgtaaaacacaggaatgatcgtttgattggaccacaggaaaaacacaggaatcggataagagagatagactcaaatgatttttaccaagaggttggacctcttgctaagatttctccaaaacctatatacaacaagccattccataggaattttatagggtttggaaaacttgaatcatttaaatcaaagagctatataggaaaatttcctgtaggattttaatcctatgaaatttctttataattgctttcattcaaagggccctgaactcggaacaccggcgacgtgcatgcacatgcagcattttcagttcgtctcctccccgccgtcgacgcacgacaccactctgcagatcacctgaccgccggccgttggtagggacgagaccaacttgtttgactagctagcattaccagtaattaatacttcctccgttccaaaatactcatcgttttaagtttttatctgtaatgtttgatcattcatcttcaaaatattatgaaattattatttattttatttatgacttgttttattatcaaaagtactttaagtataacttatcttttttatatttgcactaattttttaaataagacaaataatattgcaagaaaaagttaaaacggtatctaatttagaacagaggtagtactcaccttgtttacttttccagtggcccgtagagtagcttagccaacgtgcatgttgatactcattcgtcccataatataacaatatagaattatcctactattatgaatttggataggtgtttagattcatattactgtgatgagtcttattatttgataatagattactatattttaggatgagtttagattcgtagtactatgatgagtcctattatttgatattagattactatattttatattttgggacgagtgagtaactctacagtggctagagggaaaaataatagtcgatgtttatcggctgccaatcgccaggcagtaggttatgatcaaatcaccggtatttagggatgctcgttatgtcaactttactattatagacgtacgtggaacgcaactaaaaagcaaactctcgggctgtgcttaaggtgagtgttaagaaccttttctcctgacatgagaaaaagagtgacgcggattaatatatgattaattaaatattatctaattaaaaaaattaaaatcagttaatatattttttttaaaaaaacattatcatagaaattttattaaaaacacacattttaacagtttgagaaatatatacgtgaaaaatgatggagtagaagttagaaaagtggagagaagaataaacctttaggctgtgtttgttgcaaaggattcccaacccctctcgctcattgtttcgcgcgcacgcttttcaaactgctaaacggtgtgttttttgtaaaatgtttctatacaaaagttgcttaaaaaatcatattgatccatttttgaaaaaaagttaataattaattaatcacgcgctaatggaccgctccgttttccctgcggagggaatgagttctcatctccagatccgaacgcagccttagagagtttcttgacatagaagagagagaggagagaagagaaaaacattgttggtgagaacaccgagtctaattttgctatatgagggtgaggagaaagaaagaaggataataaagaaaaatgttttggtgcacttcatatggtagtccattcgaatgggtgtcttttatcattgttttatatggacttgttgcataatgatattaggtggctgaatagaatattaattgtcaattgactatatatacatcagattgtgaatgctctaaaccgtctgtgcatgtccttaatcactccatcacgagttatcattgtctatgtgagatccttacgatgaattaatgcactttattccctcaatccttaaatgtgtttaccccgaagaaatttcaatgtctaaatttggttgacattgaccaaaagtaacttgttttagaatatgtattttatgtaacatcaaatctttattgctagatttatgataaactgggttgcaccttttaagcacctatatcccgcaagttagccagaaaaaaatgatggtgattttcttttagataatagaaaatgaaggtgatacttcgatcgatcagttagtaatcccttcatttcatattatattataaatcgtttgatttttttctagctagtcaaatttttattagtttgattaagtttctagaaaaatatagcatttttaacataaaataaatatattcaatgttagatttaatgaaattaattttttaatttagatgtttcttaaacatattaaaaaaaatcaaatgacttataatataaaacggaggaagagtataatatattcgtgaaggtagaagggttcaactaatccatcacgtactgtcgagatatgtacacagaatacaaaaaggaaatgatatctgtccacattcaaaaaatatcttggggggtctttcggtgagaacatacatcgatggacggatgtataggtacgtagtacacaactacacatgcgtagcagacgaccggacaaagaactagacactttggtatcttattatgcttccaaccacctttatctcatgggcgaacaagattggatgttacttctcttctttcagaattcagatgactgaattctagaaacatcgaaaggttacatgcgctcaatcctgctgcatgcaaacacatgagagtccaaccattttaaactactcttattaattatcaaaatgtctagatcattaactcgtgaaaaaacttattatactaattaaggtatatatgttccctaacacaattatagaactttcacttatatcaaaatagaaagaatttagcagcacttaagcaaacaattttaacagtttgtagtagcaatccactcactaccacagaaattaatggtcataactgttgcctcatcattacagttggttttctgcccaaatgttaattgtaaatcttgatgagatcatacatcatcaaggttgactactgttttatttggaaccatttacatgtctaaatgtgcattatatataagttctcagctatttgaatgatttcttttattgttttttcaaacgaagttctatataaaaattatagacctcgatgagatctacaacatcttagtaaaatatcgtttcatttggaattttttatatgcccaaatatttgtttgtattacatgcctaaattttaaaaatttgcaaatgactctggatgaagacaagctttataagaaatttttgtgttgatctcaacgtgaaatctacaactttgttaatgttgttctcatttgaattcatttttagtgccaactacgaattataagttgtggacacgaatagtcaaaacttaaaataatagcatgcgaatttcaaacaagaagatctatattgtagggatggtaaggtggttgtgtgtgaagtgcatgtgaggtcttgggtttaaatctcacatccatgtatgtgtgaatcttgggcaaaaattgtatggctagtgaaatttgctagtggtagtggtagactggtatgcatagtaaattagaaatattttttcttgaacttcttttgttcctaaaaatttcaaaaaccgagacaccactccgctgtcaatgatgtatatatatatatcggttcataaatcggcagtgatgcctttttcggtggtagtggaatatactctctccatttgagatgtcattttagatgcagcagtcgaaccttaaaaatattaattactactacagtagtataagaaaaatattatgatttgacatgtaaaaaatgatattagtttatttgccacaacaatactttcatgcagtatattttcaataattttttaaagtgtatgactagaaaatgcatttataaaaaactaagatgacgccgctgactttttgtcacgcttttgaccattcgtcttattaaaaaaaattatgtaactataatttattttgttgtgagttgttttattactcaaagtattttaagcatgatttatatcatatacatttacataatttttttttgaataagacaaatggtcaaatatttgttcgaaagttaacagcgtcatctattaaaaaaacagagggagaatgtcactagagattcagttgatttcctgaacgacgtctagttgaaaagaaccagaggcagtattgaggagaggaaaacacccattaataaaccatccatgggaagtcctaaaattttcccctatacctagtattgcaagagatcacaggttaatcagagacttcgagagcacacgcttcaataatgctatggagctactatgtcccataaaaaataaatctaatccagaacgttacacattccactactaagaatctgtacagctttcttactagatttgtattactacgatgtatcatagtttttttaggacatatgaagtagacatgatggtgcgaagcaacaagagacaaccagagccacactgatgagggcatcactaactcggatataaccatggataccttatgtaatcaacaaccaaaggtgcatactttctattgttgacacgaaaaacacacactggcctgggagatctgcttagctccagtgcaggtccaaagctttatgagatgcaggcgtgccagtcagtttgatcctataactgacaagatatgcaaatagcagatcaatgagccgatcggctgacaagccgatggagcaatctcagccgaggccgataccagtcgatagcgatagggtcttgagctatcggctatatatccaatgtagataatgatataaaggcgatcggctgatgatgataaataacaataatatagcaatataatccagtagaaaccaataagctaacaatataatatactacaacaagattgatccgaaggttaaagcatacatcagctggaggtccgatatcataaaatccacaagattagatagatcgatgaaacctttgttgttatcggctaaatccaacttatatgtatatgcaatcctataagccgatgcaacatccagataacttatcggctagcaccccgataaaacactagcatgaacctatcggcttataaagatttatattatcaacaacaatctaataagtcgaacctaaccaatgcagcacgagattgtatatgataatctaatactcgatgagccgatagatctgtctaatgtgatggatataacaaatctatttacaacaatattgtgaatgtagagatatatcggctaagacagaagatcggacctaaccgagatagtcccaagtaaaccgatgcgtctctaaacacaatgcaattagagatagaattgagatatcaggtaggcaaatagatcaaccaaactagagcgatccaagagatcgaagcaatgcaaccttaaacaacaccaacgtagccgatagattcaccagggccagcggaacataggacttaccccttcgctggagatcaaactgaaccgatgcagccccgcgtcaggtgccaaattccgccggatgataagtaaaaacctcggtaaagagggtagcgatgcgccaagagtagttgtattgatccagagatatttacaatgaccccgggtgtacatatttatacccatgggaagatactagtccttgtaggacaaaactttcctacagataaaagaaaaaagtctttattggacactaaacacactttcctaaagataaaggaaattaacaaactatttctaattaatagatacaattgccttcttcggactcaatccgcacgtggcaatcctcatgaagcacgtcaactcaatctgacaatggttccaatctcaccttgccagaatcggctacatcggcttaccttgtccgattcggtatctgccgatgcagtcccgaagccgatttatactctgtttctattattgatttccttccaaatccgcttcggccttaactccaaatctgatgcacgatttaccaaatttggtcgttaacatctatatacgatttacatgttctatatttaaataaacgatattgcaccatgagttttgtgtgttttcgtttacagagatacttgcttgggtgaaggaaaagagaccaagcgcaagaaatatatggatgatgaaagaagttgattggggataaaaccaagaccttccccaagtctactccaacattactatgtcaaaattcctaccgagctgtctggaatcttcaaaacaagccttgtacctcatccaattcgagtctgatttgtgccatggttcttttagttgtgtcgttgctaagcccattggggtgtacgttctagggcaaccataggatatcccttatcaaatttattcagtatctgtcataatttcgagtcggcttttgcttagattatttctaccattattgcagtttcgccgctagttcggtttgtgaaactccaaattcgagtactgaatcatttatatgaaattgagttgcaatctaccttgttcttgcttgtgttcttcgatttgcatacatagggattagccttctcggcaaggtcaattgggcagcgcatggttgataaccaaaggagatgtggtgctgcgattgcaaggttcaaatcgtgttgatcggaagtcggatcgtgtgtgtcaagattccaccaaatcgagagttatcagtacctatcggaagatcgggacctagttcctcatcacacacacaatgtggatggaatattgaaataagttttttttaagaagaattgtgtaggtgatatggctacgatatataagacacctgaattgagtttagagttttattattccggctctaatgttagccgagaacacaacatccatatgatcttattccatttcctcaattccatgccaattgggccaaccattatatatgaatcatcaaacctcaattatagattctcttcttaactccaacacctctctaaaaataccaggtctcttcttcaaggtttaaattacccatcaccttctcttcctgaaccctagctacgcacttttagtaatgattaaggtgcacgggcggtccttaaacttatagcggtgtatcatctagatccttaaactctcaaaatgcatatccaagtcccagaacttgtcatagtgtgtcatctaggtccgaaatcaccacagccccttcaggatcctatgtggcgctgatatggcatgtcccacggatatgacgtggcataattttgactgacaaatgggaccgttttaaaaattttctttttcctttttttcttctcttgtattttcctttcttctcctttctctgtgacccgagcagaagaaaggaaaaaaaaaagaagaatgagaagaaaacggaaaagaaaaggaaaagaagaaaaaaaaaaggacacgtcatgtccatgtggcaggttacatcagcgccacataggattcaagaggggatgtgtcgatttgggacctagatgatacgctttgataagttctaggtcctacatatgcattttgagagtttggagatatagatgacacactgctacaagtttaaggattgtccgtacactttactctttagtaattatgtcatctaatacttaaagagggagtcgcccttcttcctccctccaacactttatcctaaaaacttctctcttcccataaaaatatctatcctgaaaaaccgatttcttaaaaaaagaccatggtataataaaccgaacagctcaccctatccaaatccttccacgaaatttaataaaaataatggcttataattaactagtatattaaaaaataaaggtagtaatcatcaagcttagcttcctttcttatctccagcacatctataaataatgacaggaggacggaggatctgataataacggttagcccttaatttattgtgtggccacgatggcatacgaacttctattttttcctgataaatataaaatcgcgaaaatacttagtgtcggacgtctgccgtaagatgaaaaattggatgagaaaactactacttacatccctgtctaccacacatcggtacacactatatgattttcaaaatattttttcttctgaactacgtatccaatctatgatatgatcacactattatatttgttataattaaatctttacaacaagatatcacatcgttaaattccgataaaggaaaaaatatatgtttcaatccgttaaatttaatgtttcagacgtgatagcaatatatttcaacatgtgtcttcattatgtttcataaaaaaatttaaatgtttcaataactgaattttgtgtttcaccacgtataactcaatgtttcgctaatgaccgaaaaagtgtgggacgctcatgtccctactctctctctcctgccattctattagctctctcaccatgcatgcatgtgttagtaaccttaaaaatattttttcttgtaaactacttatccaatgaatgattcgatcacaccgttgaattccttataattaaatttttacaacaagatatcacatgattattggtatttcttaatgacattactagaaatataattcccagcaatggcgcagaaatacttctggtatattatggttacagaattcatccgcaagcgcacggatatactattgtagcatttcacctgagagtattccaaaggtatcgtatttatcttatcccgtaggaagatcatgtagggaaaactcaactaataatttatatattacttgtgataatcatattctaagaaggggttaagataatccaagagtagaatgacacacaagcatttaactactcatcctcataatatattatctaagctaagtggaaagaaaagagaaagagaatctattcctatacttataatatacatagtatacatacattctagctaactgacatactagctaataccccctatccgatgccctcctggtacttcgagaagccacccctgactaccgagttctttacgacagcccgtcatgacccatacaatcggggctaaatacggaggagtaccctccctaggaaattaacttaggattatatataggcgcggaggaatacccgtactgagctgtcaccatcagcggcccacctctcatccgcaatatataaccccaaataatgatatcccgtaatctagacaccacgtctaaactaccagatacaactctaatatcatcgtcatgacatagaataattgcataagcaaacattatacccgcaccaaagcttcacccagataagctagccgtatattcagtataacaagaacataatgtaaagtaggtactcatatactcggagagtatttcaataccataaatgcatgtagaagagtattctaataaaagtacaaagcttacaaaagaggaaagaaaagctgctagagccatacccgaactcttccgaaggcttccggactcctgactcctattctaattctattccaccagctagatactactaaactaaacttgagagaaatgagagagctattgtttgaggtgtgtgagtgaagtgagaatggcaactccttttatagcctcccaatgacggttgtggcggttggaatggtcgaaaatgccctccaaccgtcattgggggctaatccacaccgtctaggcaaagccctggatcagatggcgctaaggagggttcggccgaacctggggccggcccgatccaatccaatttcggctggcggcctcctctgttgcttctctttgcagacttgtgaattttggcccagtttgtcgtgtcaattctgagttcttggcccattcatgcataagcctggttctcgacatctcttattgatttatcgttggtgttgatgtcgattctcctccactttatgatcattctctgcaaaaggttagtaaacctaacactagtggaatattattattctaacaaatatatgcattgaaagcatcactagttctctcctgttttagtaatattgacggtcgaaactgatcgataacgaccgtcaataatgattatattctgataaaagaaaaacatatgtttcaaacaatacaaatttattgtttcatacgcgatagcaatatgtttcaccatgtgttctcattgtgtttcacaaaatttctaaatgtttcagaggctaatatttctgtttcaccatgtataacttaatgttgcaccaacggtcaactgaaacatttgaccgtccgatgtttttacaccatcggacgtccgatctatatctctccttgtaacgcatgagcctataactacttcctccgttttataattttataatgtaaatcattttaacatttcacacattcatattaatattaatgaatctatatatatatgtatatatgtatatatatatatatatatatatatatatatgtatatatatatatatatgtatatatatatagagagaatgtaagtcattctagcatgacttacattatgaaatggagggagtagtatattaaaaaacaaaggtagttcttttcttatctccagcacatctataaataacaggtctcccctccttgaaagtactcatcgggtcatcaccttctcctgattcctaaaccctacacacttgtagtaacttgctttgaagtaaaaaaaaaatggtgtccttctacctcgactccaccttcctgcctctcctcgccaccaccatggccagcccactccacgcctgcctcctcctcgccctcctcttcctcgcgctcgccttcttccaccccggcggcgtcgcgtgggcgctgtcgtcgtccggcggccacggcgccgccgccatccctggcccgc

SEQ ID NO: 20934 - DNA, 4660 bp, Oryza sativa
cacggcgcgggagatcctcgccggcgcggcgttcgccgaccgccccgtgaaggaggccgccgcggagctcatgttccaccgcgccatggggttcgccccgcacggcgggtactggcgccggctgcgccgcctggcgtccgcgcacgcgctcgccccggggaggctcgcggcccgccgcagggcgatcggcgaggagacggtgcggcgcgtggcggccgccatggcgcgcgacggcgccgtcggcgtgaggcggctgctgcacctggcgagcctggacaatgtcatggcgagcgtgttcggggtcggcctcggcgagctcggcgcgggcgccgtgtcggagctggaggagatggtggggcaagggtacgagctgctcggcaccttcaactggggcgaccacctgcctctgctgcgcctcctcgacgtccatggcgtcaggaggaagagcagggcgctggcgtctagggttaaggtgttcgtctccaagatcatagaggagcacaagacgaggagagatgccaagtacggcggctgcgacggcgacggcgatttcgtggacgtcttgttggggctggaaggagaggagaggctggaggaggaagacatggtcgccgtcctatgggtaagtacactgatttaattaccatgtgtttgtatgcatggcacgtactttagcaaagcttagtactccaataagattcagttagtaagattttagatttaaacaaagaaatttcttgctaggattttcttgtttcttgtaaaaaaagctcttactgtcatgtagacatgttgtaaggaaaaataatatggaaaaaatgttttcatctctcgaggaaacatccatcatttctagatatcacctaaatagttataaaaaaattaaaaaatttacaaaatacattaatatgagatatatcattccacaaatatacaagtttaaattcgactactataagttataacaaaataataaaataatatatgtatactagttttaggtgacatacaagaaacaaggatatcgtctgtaaagtgatgaaaatccatctccaatttaaaagagaaatcaattaataatttctaagttatgttaatactttaccctgcaagttggttataaaaatttacaataaatccgcagggggccaatgtccaaaacatcacttttttttactcctagttgactaggagctagctacccacatatacacaggacatgcatatgagctagccacaaataagctgcatacgtacgttttaatataagtaataaaacaatatgcctggtcaagtagtcaacttatagtcgtgcatatatagtacctttcttcttgtagtctacacatcggcaagaccatatagtttttttttttctgaacttgatgtgatgggccacatattaaccctttttttttgcgggaatattaatcctttttattattaatattttttgtgcgcctgagtcactgtcaatgagtgagtgtgcatgatctcgtcagtatcttgttcatgtggtcatttttctggaatctgcgatacaacataaggtcactgtcccttaatggatgagctcaaactagctaagctctcactacacgattaatttacataaattaaattgcatgtgtccggttgattgaagcaaattgttttagatgacattaacgtaagagtatatttattacgtactgatcatgacatgcatgtatgattttgacttacatatactaatctgagccgtctgattttttttcttgttcactaattaattagttaactagacttgcatatcgtatacactagggccaattccctacatgcccatgtaatttcacctaatctcttctacgcttcttaaatttatttgatctcttatatacccctgagtttttatatatttggatcccttacatacccattctgttaatttaccattagtttgaccgttagttatcgtagaaattactttattgtccttggtatattgttaaaagctagaaatgttttatgtgtaaattatttgatttgtgaaaaccaataaggaataaattactaaatatttgttatgaatttttaaaaataaaacattatttcattaaaataaaaaagatttattgtaaaaaaagttctgcataaaatttgaaaattatttttcaacaaatatttagtgaaaaaagattcgttgtgaaaaaacaaaggggatataattagtttatcacaaattagaaaacaaatttaaaatttttaaataaatttcagatcaaatttgatgaatttcgtatatcttcccaaaaatttaaacctaaatatcatttagtttttgctcttaattttctagtgaaactaatgtatagatttaatcataatttttaaaaaataaaaaataataagttttattttttaagttgggcattaaatgattatattgctagtattttgtataagttaattttttcatatgaaaatttattgggtaggtaccacatatgtataggatgggtaatataatcattttaaaatatttaacggtcaactaatggtcaactaacggagatggatatagaggagatcaaaatgaaaacttaggggtatataagggatgatgtcaaattcagggatatcgaagggattgagtaaattttcaggggtatatagggaattttctctatacactactcactccgaccataagtatttaacactgttgatttttacccagagttcaaaattataaaatgaaagcaaaaactatttaagtttgatcaaagtttgctcaaaattttaaattattttggaccgcaatatttcaaagtatcgaaaattttgtccatatcgcagtgcccctgatatattaaaacatactttcaacatgaagtttgactattcattttattaaaacatatatgtaaatatcatttattttatggtatttcaaggtgacttatattttttacatatttattctaaattttaaaataaaatgaatattcaaactttacggtgaaagtcaaatgtgacaactattatcaagtactcgctccattccatattatatgtcgttttgattttttttcctaatcaaccttatatatgttttattatatttatataaaagtatagtagcaaatctattctacacccctcccctaaaataactattctacacaccccccctcccatgggtcaaacccacctcccccaccctcccaagggcccaaaaccctcttcccacctcggtcaaagcgtcctcccgctaatcaaacccgcccaccactccctcccccgtcaaccactttgttgttctcgtcttgcaggaatcgtggagtaacaggacggtcatcgggtagtaacaagacaattttcttgcagtaacaacttcaaaagattgtcatgatggatctagtttcgttaagcgttttttatgaacgtcgtggtgcaaacggattagaaaaacaagatatgatatgagagatattgctctctaaagatcgagatgtacctctttttagtcctcgtcttactggaacatcgtagtaacgcaacagccaatctatagtaacacgactgctttctgcagtaacgacgttaaaaaatagttatgatggttctaatttacgaacgccatgatacaaatgggttagaaaaataagacatgacgtatacgttcctactttctaaagattgagatttaaaatattttaactctacaaaaaaattactactgtagtgccactgttagtatgcatattctctgttacttcaatttttgtcatgttgttactgccaaaagtgcagtaacaacctattaattttgcagtaacgtatcatgttactacccttctatgataatattattgttgaattatagtaacaaggtataattcttgcagtaatataaatgatttgttctcacacaatttgaacacacatgcaaaacatacaaacaatgttttttactcacataacatcatatggtgaactggataggagaacttgccacgaactataagatcatgagttcaagtcttgatttcaccaatttatttttaatttttctaaaaaaagaaaagaacaagaggaaaaatatcaatttatttttaatttttcaaaaaaaagagaaaagaacgagaggaaaaatgatagatgggagggcgagaaaaaaagaagaaaaagaaaaaaaagtagaagaggagggcaccgggaggagaaaaaaacgaaaaaaaaggggaaggagggagagggatcggggctgagagagaaaaaaacgaaaaaaaggaaggaaggagggagagggatcaggatgagggagagaaaaacggaggggggaaggagggagagggattggggctgagggagaaaaaaagaaaggaaggagggagagaaaaacggagggggagagggggtcggttggaaggagagaagaggaagggtgcgcgacacgagagggaggaggagggccgcgcgcgcgagtggggatcgggaggactgaggagggccacgcgcggggagggtccaaagtatagtaccattttttaccaaaacaaaaatattaccaacatatatttaatgctacatttaataaaactaatttggtgtgttagatgttaatttttttataaattgatcgaacttaaaaaagttttgatcatgaaaaaca

SEQ ID NO: 20935 - DNA, 6229 bp, Oryza sativa
catgttctaacctatagatcaattttcatgtgggtgcttggttagaacttgaaataatcccaaggttttgtagcctgttctttatataggggtttttttttttcatgctctcgtgatgcaagtatggggtgtggtttgttctctgggagacatgagacgctaataagatgattattgtacttttttaaaaaaatggctgtggaccatatgtcatatatttgttttttgggattatagttgcaatgtacctttacatgttggagatttatgtttatgttccattcttttttttcaatttgccacttctttgataagccaatcgactatttgccacttttcatctcatatgaccatgagaccatcccacactttcttctcacccctatagtatgacaaacaaatatttcttcctcctccgatacttatttacccctaaagtggactcggccctttatttgcccctaattctatatacctatacaatcaatccccactatatgtagtcaataggattttgcaaccttctcatgcttccgcatcatcctaattgttcttcgatctccatcctatgacaggcaagctgtctaggcaatactaggaatggcgagaagctcccacgtcttcatctaataggccaaatcaaagactagcccaactcatccgacctactgcctaatggatttggattggatggccagatccggccttcctcatctctgactacggcctcccctgccagctgttccctagtcatgactcctcgccaactgtcggagccgtgccgcccgctgccaaccccccatggacgcttgctgctccacctcgcgctggtcttcgtcacctccccttcccaaccttcgtcgcccctctccacgtttgatgtggacgggatgaagcgaacatgtgccttgctaccgtcgtccttggtcgccactcagttttcggtggttctctcaagcggtggcggggtggaggtaggaggaagggtgtcggcggtgctagggtgttgggcgccgctcgtgtcacccatgcgggagcgacgcgagggcctctcagtatagcgattgactaggggatgtcaatgtcccacctggtgccacttgcaccggcaaaaaacattaccactaggatcataacatttggagtgaactaaatacggagagatatcactattaccgctacgtgtgaccggactccctgtatttatagcgctttgggagttaggggcgattccaaataggatttgagcttctctgattgttcgcaacgagcgtgcgtggatggcagggtagaccgtacgtgttccccatgcgactaggttagctatcgattactacaagaagaacccaaaaaaaagttggtgaatcaatagggaagtcaactaaaaaaactcccaataaataacgattgtcccctaaagtactaaaattattttctggtaatatgttgttttgtgacctatacataagacgtaatgatataggctcatgacacaccgttcggagagaggcttgatgtttgttgttagaaacgacaaccgcatacgtcgaaagacgtggttactcaacagtggttaagaaaaagtaaagtatattgattagagaatttttcttgggatccccctattacctggccctatgggactatttatagcccctgttacatgttcttactattagggttttggttatacagggaaatttacatggttatccttatgaaagggacatttacatgggtacatagtgtaacagaggttcatggactcctgatgggccgttaggcgatcgtcggcctaatggcccctatgcttgataggccgaaaaaggcttcttcggccctcgcgggggcgagcttgctttggtgaagtcgtctcccttcagcatatactcttcgccctgcatccttcgcccaagaggcctctggcttggcagagtacccgcacgatcctccgcctctcgccgtccttgttccatagtcttcgccagggggggggggcttcgccccgactaactttggcgtctcgggcttggatccccactcctcgcatagccttcggcagattttggtcgaagggcctcataccataccgccaacaagcccctcatgggcaagggtgagattggagcttcggccgagaccgtgcaaaccatgtggtatgtggtatggtatgtggcgccccctttcgaccgatgctcctgccgaaacctacattgttcctgcaaataaagtttgttgtctgtgcggctggtattgctttgccgctcttcgcctcctgcggacggtgatatatattttttttatttttttaccgggccaaaaggaacagtaatgggccttccctttgtgggctttttactgtgcagcttggtcgataggaatctaccatttcgcctaccctcgcgacacgtggtgctttattactggtgggtaggcgaaccgtcgccttgttgggctatatatgctcccccgttatcttttcaccgctagacttgccactttcaccgcccgcgttctcttcctccgttcttgctttcacggccccccttggccctttagatttctcgctcactccccttgttcgccactgcacacacccttcgcgacttcatacgtccatcgtcatggctccccgcaagcctaacccctcttcggcgaaagggcccgaccccggccggattgacgacgacaccactgcctatttggggatttctctcatagacgacggcgagctggcaaagttggtcagctctagggcgttagtcgagggacaggctttcaccccggggaaagccgttgtaccgaaactcgtcgacaaccggacagtggtgttcgccgtgtttttttgagacggggctccggtttccgtgcaacgcgttgttgccggagattcttcgccttttccaggtggagctcccgcagttgagcccgtcggcgctggtctagattgctatctttgactgggcgtgccggactttggggtttgagccaagcgccgaactctttggcgccatattcttcaccaccgtgaattcgaagacgatgattaccccagctggaacgaagaagacagtgttcgggagcgtaaactttaatgttcgccccgagcggtccgatctctggccggtgaacgccgccatgtcgaagtggggccgccattggatggcgaggtggttttaccacactatccccttcgaggctggttctgactccgcaaaagcccttcggtgccggtgtagggcgattgagccgaaccgaaagcccaagatcgccgtggacggcgctatggaggcgcggttcgctctactgcgtaaggtctgctctcgccttagctgccgcgacttggtggaggaattttgcatgcttcacatctttcccctctcccagtcgtggcaagtcacagttgagcaaggcgaagaggttgatggtttgttgaagttggttctccatgaaagaacgaacggtaagattgctctttcacaatgcagtcctgcgctttgttattttgctttgttcgacgcttaatgtggctacaccctttatttttgtagtgttgacccttgaccaggctgacgccgaagcccgtaggatgatcggcgacgtgtcggtcgtcgagtatagccagctgctaacgcgacaagcggctggccgggcgaaccgggtttacaacggtgaattgcctccccgggcgaacccccacaaggccgacgacgatgcaggaccttcacgaaagcgaacgcgcggacaagtaaagcttgcgcccaggaagcgaagggttcctgtttcgttcgattccgacgctaacgacgaggacgacgttgaagagcgtgacggcgaggaggaaggggaggaagaggaggaggttgaggtcgtggtcgaaaaggccgcggacgaggcggtcgaaaaccgcgtcgacacccctggctatactcctactccaagcccgggtcacaatgagaccggggtggagtcgaatagctccccccttcatcgaaaggagttggatggggcgaaggcgctaattgcgttttcgacaggcaaggcggcgaagggaggtccggtcaaaaatatttccaagaagaaaggactcgtcgatgtcgctcgcgtcttcagcgacgacgagtcttctgacgagactccgacttcgcccgctgcccgcagcctagacctttcgaccgtccccgttctttcacttggcgctgatggagtaggcggtagcgccgccgccggggcttcagcctccacggaacggatcgtgacagctgcggcgagggtcttcggtagccctctgcgtcagccggttgtttcgccgctagtcaaggcgaaggggaagggtgcggccgtcgaaatatctgcttcggagtattcccttgcggcgccccatttcgcccctagcgatttcgagacccgggtagaccttattccctttgtcgagggagtaagcaatcttgtcttacctgccagcaccccgagcctattcaccgaactgaatgagttcgatgagaggtgttctgctattaaaagcttagcggttcgggtatgctttttctctattcttggttttcctcttcttttttacatgtcccataattaacatttgctctcttcgccattcctattttgcatccagattcttgcagctcactgttcgacagagcgaaccgtgcaggcttgtcttgacggatttaagaaccgtcttcgggccatggatgacgaaataggccgcaagaacttggagatggaggccctcaccaacaccctgaaagaggcgaaagccgaaaacaagcggctccaattcgagttggagaaaggaagagaggctagggccgaggtcgatcgcctcaaggccgaactggagaaagggagagaagccatagctgaggttgatcgcctccaggccgaattaaggaaagaaaaggcccattccgccgtgctgacggattattataaccttactgagccgaagatggaggctcttcgcctggaggtcagcaaggccgaagcgagcgctgtggagtcgcagcggttttcgcgggagatggtgaaaactaccgaatccgcaagaacggcgtgccaaacgcttcgcctcgcccttactgacatgggtgcaaaagtgcgaggggtccctaccgaagatgcctcggccttcgacttctccgagtggacccagcaggctggtggttcggtttcggactgcgccactacgtacggtgattgctgtgcgcgtgtatcagcggcctttactatgggtcttctgcaacagttcggctgcgagcacgtcgccgagttccctaactatgtgaagggggactgggagattagcgcgcaggacatttcgcctgcacttcgtgcgtggcggaaacaattctggcagaaggacggccggtccaccaccaaggcgcgccttttggagcaactagcgaaggcagagacggcagacctttgcgaagaagaggacgcggcggctgaagggggtggaggcgatgcccaggtgtgaggcccttcgccctttccttagatttttgtagttttccttcttctttttgtgttcgccaggagtggcgaacgatgtgtattcggcgggctgccgctaaccctccttattgtagccaaaaaaaggggcccttggatattttgaatatatatgactcactcttagccactttttgatggtcgaagtctttggcgtatttatgattacgcccatttcacattatgcaatacatttttcttttttcgcctattcttactatgcaattctccttttgccctttttgcactttctaccagggtgttcgccgaaagttgtgcattcggcccccttctgggagttggcgaaaccaaaacgagaaatttgtggcattaaaagatttgccaaaggtgcgatgcccaattcggcctatttatcgtgaaatggtgataaacggacgcagctataaggtttttaaggttgccgggtggcttcgggcgcaccctaggcgaaccttagaagactacgatcttgttcattcaagatgtttggaggacatggctcgcttttggcgaaaccatcagaagactgatcggcaggaggcgatctcccagcgtcgttacagtctagtctgtatttcgcccccttctcctcttagggttgtgtatgatattagtagtgatgacaaacctagttcgcccaatcactccttagagagagagagatcgcgggggcgaagatgtaatttatctgtaagcc

SEQ ID NO: 20936 - DNA, 5682 bp, Oryza sativa
ttttcgatccattttgttctacgttataggaagcactcgtgctttcctttcgatcgagtgtaacggtgttcagctaattgttctccgaaacaagctgttgcggtttcaatcgttcggcaagtgatgcttcggccgattcgtttcgcccccctggcctttttcgctgatcaggcgtttgccttggggtttttccgcaaattatcaatcgcacaaacaagtaaaaagaaggtagaggacacaaagattttatactagttcgggcctccgtggtggataatagccctacatccagtttttttttttgtcttttttcattttcctcttctttttttcttttttttcttttttttcttgccgaaaggcttacatagtgtcgaaggtcttacataacgatatatacatttttacaagtttggcgatttgggtgccacccgttctagacatagaaacgcttgagagaggcagcgttctaggaatggtcgaactcttcgccttccagtgtcaccagtcgaaaggatcctgtcctggatttgtgcttgatgaggtacggtccttcccacttcgattcaagcttgccaatggctatcgggttcgcctttttcctcaagacaagatgaccaggcaacagctccgtcggtcgaacttttttgttgtaagtttccgaagtgcctgtggcatacttttgcatgtgctcgagtgcttcgactcttaccccctccaagagttcgagcgacaactcgcacccctctgttgcccccaggcaacagagttagcccctagctctgttggggtcattgcctcatcgctatagagaagcatgaacgggctgaacttggttggtctcgtgggggtcgtccgaagggcccagagaacagatagcatttcctctggccatttgcccttcgctgccccctcaagccttttctttagtgcttctaggattttaccatttgtacgttcggccactccgtttgactgcgggtgcgtgactgatgcaaacctgatttccaggttaaacccttcacatatttctcttaacttgttagagtcgattgccgttgtcagtgatgaacttttttggcacactgaaacggcaaacaatgcttttccatacaaactactgtactgctgccgaagtgatcgcaccaaggggttcggcctcaatccatcgagagaagtattcaacggccacaattgtgaacttgtgcccgtttcgcgccgccgggaacggcccaataatgtccagtccccatctggcgaatggccaaattggtgcgatgggctgcaactcatactggggcgcggtttggcttcggccatgacgctggcaactttcgcacttcttgatttgctcaagacatactttcaacacagtgagccagtaaactccttgtctaaatactttggaggcaactgttcttgcggcttggtgcgcgccacatagcccctggtgtatttccttcgccatttcctcgccttcggcgaaagaaatgcagcgaagcaacggttgaagtatcccggagcgatagagctgacctgagaccatcttatacttcgtggctctgaattgcaagcgctttgcctctgcttcgtcttccggaagccagccagtttcaaggtgcttcacaaacggggttcgctagtcgtatgggtctttgctcaatttgacgtggtcgattgccaagacctccaagctgtccatgggcacgcttggtgcatacaggacctcaaaaaggatgccaggcgaatgtaggccaccacaagcggcagatttcgccagggtgtctgctttctcgttctggcctctaggtaaatgttcaaccgttatgccggtgaagcacttttccatagaccgaacggcatctaaataccttttcatcccttcttcttttgcctcaaaagacttgtcgacatagcccgccaccagcttggagtcggttcggattagcaggcgccgaatccccaatgctttcgcctttcttaggcccaaaagaatggcttcgtattctgccgcattattagttgtgtcgaactgtagccttgcagcataccgaattggcacaccatttggcgaagtgactactgccgcaccgcccgcccccttgtgcgaccacgaaccgttggagtacatcacccagggctgtttgacgagctcgggttcaggggcgaatgccggtgtccatttggccacaaagtcggctagcacttgggacttgacagcagtgcgggcaacaaaatgtaagtcaaagggggatagctctgctgcccacttgctaagctagccagtaacttctttaccccggagtatttcgcccaaagggtactgtgatggcactatgactttgtgggcctgaaagtaatgcttaagcttgcgtgaagccatcattagggcgtaagcgagcttttccatttcaatgtatcttgtcttcgctccttgcaatgcttcggagacaaaatagaccggtttttggcctaaatccgtttcttggacaagagcaacactgactgccactggcaaagctgctaggtatagtagcagttcgcttcctgatgctgggctgatcagagctagcgggctttgcaggtcttgctttagctcgtcgaacgctgcttggcattcgggagtccagttgaattttcccgcgccccggagggttttgaagaagagcaaacctctttcagctgcctttgagaggaatcgacttagtgccgcaattcggcctgcgagcttttgtacttcacgtacgctcgacggaggctttatttgctgaatggcatcgattttctcgggattcgcctcgatgcctctttcagaaacaaggaaacccaacagcttgcctgcgcgaacgccgaaaacacacttctcaggattcagtttcatacccgctgcgtgcaagttgtcgaaggtctcctgtaggtcggacgcgtggtcgaaagccttgcggctttttacgacgatgtcgtcgacataagcttccacgttttgccccaactgcttgtaaaggaccttgtacaccagcctagcaaaggttgctccggcattcctcagaccgaaaggcatcctgaggtggcaaaaggtgccaaacggtgtgatgaaggctgtcttggggatgtcggctgggttcatgcgaatctgatgatagccggaatatgcatctaggaagctcatgagttcgcagccggctgtcgaatccacgagccggtcgatccgtggcaaggggaaatcgtccttcggacatgctttgtttaagtctgtgaaatcgacacacatgcgccatttgccatttgacttccgcaccagcactgaattcgccagccactcaggatgatcgatctcttgaatgacccctgccttgagcaatttttggacttcggcttttgctgcctcctgacgatcagcggacatcttgcatagcttctgtttccttggctttgcatccggcttgactgccaggtgatgcatgatgagatctgccgaaacacctcccacttcatcagggccccaggcgaagatatcaatattcttttttagtacctctaggatgttcttagcttcttcttcgcccatgtcgccccctcccagtgatacgagttttatggggtcggcatcatcaatctgcatcttgattatcttgccgtgaggggcgggctttggcacgtgcttcgctcggtcatgcggttcggcctcaacattgtgcactgctttgttgattatggccaaatcgccttttgaagcagccgaaggatgaagccccttgatcacgatcactcctgctgggccggacatcttgagcttgagataattgtgatgggaaatgacttcgaacttgttcaaggttgcacggccgaagatggcgttgtagttgtatgggatgtcgacaacgtcaaataatacttgctcttcgcgtctgttttcccccgtgccgaaggctactatcaactgtgcttggccaagaacttgaactgcttctccgccaaatcctcggagcgatgtcggtgctggggtaagggcttgggtagtcaaccccatcttggcatatgcttcggcaaagatgacatcggtcgaacttcctccgtcgaccaggattcgccggacctcgaaaccagctatctcggctgagatcaccagaggatcttgatgcgggaacgttactccttcggcatcttctggcccaaaaaagatttgctggttcaaatactacggagcccctttcgcctgccgaagtgatattgtggatcgttcgcagctgcatcttcttctgtcgcttcgacagttggatcggcgggtcggccttgtaatcacttggatcactctgcgttgcgcatcttagcgctgttcggctgggggtgcttgttcttgagctacttcacgagttgcatcggccgctgctccctgctgcgtccttggatcttgcgcgttgccacgttgccaaatatttcggcattgctccgtggtgtgcgaagagcgtccgtggaaggcacagtagaggtcttttcggaccttctttcggacaggctgctgatggttgcttgcttgctaagcgtcgaactccttgcggagggcttgcacttcttcgacagccatcacagccttgcccgctcggtcgattctgaacttcctctaggtcatgggggcttgaccttgccttggcggttgtgcttggatcgccggctggggctggcgaacaacgagaggaggtggttcggcaacttgaacttgttgttgggcttgagcagtggtgacggaagccttatcgtactcaacttgtattgcttgccatcgcttggaatcctcttcgccccttgtgaacccgtcaatgatgcgaagtaggtgttcaagcgtctgcatctccttgttggcgatttttcttgtgagttcgtcctcgagtaaaccagctgaagtggcgtttatgactgatgcctcaattatgtcttgaacttggcacgggcttgcgagaagcgacgcatgtactcccttatcgactcccccggcctctggcgaatgccgagtagatgctgctgcgtcttcggcccctcataggtgcctcgaaagttaaggacaaagacatcgcgcaattgctcccatgagtaaatgctattggctggcaaattgaaataccaagagcgggcgatgccgtctagggcgagatgtattactgacttggtattttcgtcgccatgagccgcttcgatcgcggattcataaatggagaggaattcctttgggtcagtttcgcctgggtagcgtgggacgggtgggaacttgaattggggtgggattggacgggtcttgattcccccactcagcggtagccccttttcgccccctgccctgttcacggcaccttgctacgggtatggcgtggcgaagggcgaaatcacggcttgcgcgtgaggttgggccatagcattcggctgcccagccccgattggtgatgcttgctgtgccgccatgaatgggtcgaaagttggctgtgaccatgtcatggtgacctggtttggtgcttggtttgctccgaagcctggtgttggtgcttgcggccgaacggttggcgcctgagcagcattgatagagtcgaactacggtccttgactccacggcgaatccccagacctggctgattcgaaggcaactaacgaggcgcaccttgacttgtattcccctccgggcgggccgaaggg

SEQ ID NO: 20937 - DNA, 21076 bp, Oryza sativa
attcctgcagccctgctgttcttgcatttggcgaagcatgtcttagagtcgtgtcatgtactgtcgcatggcttccatggcggcttcggtttgtgtctcggggtcagagttgacttgggcttgcacagcggcgagcgcagttggggctgctgccggctgcgacggagcggcttggggcaccagtagttggtttgtcgaaaggatctccgccctggtctggagtgccctcgccgccgcagccgccttcgccatgtcagccgcgttcggcacctgcacagaggtagcaggggccgaaggcggtagtgatggcgcaggtgcggaagcagatggcgctcctccatcttcggcgacaggcgccgaaggctctgctccctcttcggtggccatatccgccccggcgtcgctttcctttcgccttgtaaccttctcctttacaaccttcttcggtggcattcgctctcagtggtttcgctcggaggtccccacggtcggcgccagctgttgtcgaaacgacaactgcatacgtcgaaagacatggttactcaacagtggttgagaaaaagtaaagtgtattgattagagaatttttcttgggatccccctattacctggccctatgggactatttatagcccctattacaggttcttactattagggttttggttatacaagggaatttacatggttacccttatgaaagggacttttacatgggtacatagtgtaatagaggttcatggactcctgatgggccgttaggcgatcgtcggcccaatggcccctaggcttgatgggccagaaaaggcttcttcggccctcatgggggcaagcttgctttggcgaagtcgtctcccttcggtatatactcttccccctgcatccttcgcccaagaggcctccggcttggcagagtacccgcacgatccttcgcctctcgccgtccttgttccatagtcttcgccccgactaactttggtgtctcgggcttggatccccactcctcgcatagccttcggcaaattttggtcgaagggcctcataccataccgccaacaatgttgcattataaactatatgtatttactcttgctacctgcatttttttctccttgttaaacatcgttaaacattgcgttgcaattgcatgttatatgattatatctaaatcataaattaatgtaatttataaaatacaataggaggatagatatatatggacttcttttgcgggagcctttgggcacatatatgccccatgtgtcacccaacaagttgtactacttgctcccccaaacagatatggattctctgcagtactgcatttgcagtagcggtggctgacaggtggacccggttccacatgtcagcggctgctactgcaggtgtagttctgcaaaaaatcaccactgcccccaaacagctctagcctgccaacaacaattattttttaaaccgccccttaattggtagatcttcaggaggaaatcatctaataagctgaatccaacggatccaaaccactatccatctaataatatagtgttttagattaagatgtcaagttgaagcttaaactttcaaaagggaagcggctgctttcagggagacatgaagcattactaaccacaaaattacaaacactcccccggggggagttgctagcatgagaagcttcgttttggctcaacaaaataatatgatgcctccgcaacatgtcagtatattgagtattgacccatctgattatgacatacctgctatttttcagaacccaagaaactgttctcttctttctggatagtcaaattgcacgagtcacgcgactaattgagtgccggccttcactgatgtgttgaatattgttcagtttgtcaccagtgaaccgtcatcttcttaacatggacaccgaggtctgcaccagtaacatcaggtggggaattgagacgattttaagaatgattcatatgcaagcattaccttagttgttaaggataatacaattttgatatgcatggagttgtttgatttaatttcatgtcactgtcgatcaatctgagcaccaatataatattgtttcagtagcaaattgtgccaatttcatgtcactgtcaatttgagtatcaattttgatactcaccggactaccagagggtgataagttagccagtgaatttgaattctagcacagtattgctttgctgatgcaagcaatgacaaactggtcagggattttcttcagcacacgaaacataatacttcctccgtttcatattataagactttctagcattgcccacattcatatatatgttaatgaatctagacatatatatgctagaaagtcttataacctgaaacggagggagggagtatggtataaaacccagatagaagtcaggtcatccagtccaagacttggactgctagagctcaaatttcagggttgacaggaaatttgttgtatggccagttgaccacgagatctcaagaacagaccaaacccaaaccatagctaaagggcgtagatcatcattctcttctttaggacaggtttgcgtgaaaaacaaaccaacatagaaacagtaagatttggaacaacactttagagtaaatttcacaaaactacacttccaatgtgaaagctaagaaagaactacactatcagctaaccctttacaaaattacacttcagttgctttgttccaaaaaatgtaaatggtttccaacgaaaagcgtagttatgtttaactgcttagaagtgtattatttgatagttgccttagaagggtaatttggtgaaaattattcttctatagttgagagtaactcatggtagatcaggtgactgattttacatcgtcttgttgaatcttaaaagacaacagtataacatggcagaaagctaacttatttgcttagccaattggctttcaacatcaggttcactagcaatgcatgtatcagatacttagtttgtagattgcagaaaattcagcgtataatgaactttagctttcagaaaacttgctctatttgtgcttttgcagtcacatgatttccccatttacattcaatgatgcaatctaggaacaagtatatccatcttaccttgttcaaagatctataacaaccaactaggagcttattttggacccaagtacatatgtagctccaatgttaagaggcttttctttttgtctgaaaagggaattagatgctagtcagttagtaataaaaaacattgttgggcaatagatatgcatactcaccttcattgcacagtagcaccggcagcacaccactgcgaagataaattgataactgatagcttaattatacaattggtaatctggtagaatagtggagttgcagtgaaatatataattagcatccatctgttctaggaaaaatttctgacacccataatcatgcacatttacaacaaaatcttaacccaaaatttgacaatacagatgtgttagtttatcttgaggctattaccctgtgttaaaaaataaacctagagcctgcaggttacaactagttcttctaaataccaactccagttaagagcagcagttcccataaatggtgcttcaagaaaaatcaccagatgtctgtaggtttttccctctattgaaaattacatgcctctgcattttctttgttcactccacatataaaagctcactctctgatgaatcctctgtatgtatggaatcaggaagtgtacggtattccttctctgtgacgaatctcactccaaactgttcactggttggatctgctctttctctgggaaggaaccctcgttctcgtgcaagtaaccactggtcaatgacaccacatgtaatagcatgtttcattgcagtatgcaagtaatccttgtcagtgaccaggtgagggttaattgccagcatcttcatcagagctgaagaacacattaaaatgtcatcagagctagttcaagatacacaaacaaaataaacatgaacacaaaatgaagtgtcactaaattattatcatgctggcatctgatgatataagctataaaaggctgaagctgtaatttttttaaaaaaaaaaacttgtatacagtgtttgaaagaacggatttgctatactagtgtcgacagttaacaggggtgaaaactttcaaattttaagccatctaatatgctttgagatttgtgctggtgaaggaaaacgggaaaaaaaaatcagacgcgtgcagcagggatctaacccaacacctccaacttggatgtttgttcaactaaccagctgctccatcatgcttttttgagttacactcgatttacatatcagttacatattagttacatagtagttataatgcaattatatagtagttacatttgaaagtttttcatcccaaaaactgtcgacagttctatagctactcccaagaaagaatttgtatgttcctgctttatgaaagtagaacacatatgtaatgatgcatttgctatcctttggtgtcattaatgaaaatggcatatcctgcagaagtagaaaaaaaaaagaacatcagatgcagtacctgcaacaatggcgtcacctgattgtgacatgtcaccggtgaaaggagtaattggtgcatcttctgtgccacgaacccagccatcatgctcttttgtgtaataatgaatcttagaagtgccgtttgtcacaaaaaggaccttgagattttcatgccacaatttcgtaacaacttctgggctgtagtgagtgaatttggatttatcattatccttcgtaccaaatttctcagatggtttaatgccacacaagaactcaagttcctgcttagtgatttcaataatatcagcagcttcccatgcttccttgacaagtgacttggtctccttactggacgaccataatggcagtggaagattgagatcaaagaatgttacaccaccaaatttcttggaaacctcaattgctttcgacaatgatgatcgtgtcgtgggctcaagcaaagctgaagaattgtagtaaaacatcttagcctgcattaacaaacagaaacaactgatttttacataagatataacacataagtggacagtattttcttcagggattgtagatatctttgatttacctaatttcagatatggcctgcccatagggacctaatattttaagtagttgctttttaatgttcatattattttgagtttgggaattttcagacattcagcattagcaaagatattatccaacaagttccagtacagagcagcttgtagtgccctaactgctaaaaggttttttacaaaaaattaagatcattatggtacaggtttatgtgtcttctgactaaaaaataaccatgctaagtgcaaacatgtagaaaaagcacagttgtgaactgaaagtgttttatttacttctttttctgaacctaccaaagcacggcaatgaaaacaggtaaacctcccatttgtttatagtacatagtatcattttgacacattcatggtcaactaatagatagcaagtttgaattgatagaaatcgagttgagtaatttcctcttattatctttttggacaagtacattaatttagcagtatagccctagttgttccttaagtcttttgatataaatataatgacttctgtattgcaaacaatgttgcaactgaattatgaattgcacatctaaacagtataatatgccatcagctgaaagcaacttcttcactttagcaagctcttcttgtgataaagaaaaatagaatctttctaactgtataaggaacagaattattcaacaaaatttgcttttatgtggtaaaatttccataccagattaattataactaacaaaacaatgtgtgacatacaaatcttctgatccgtgtagtactctttcattaactaatcatctctgacaaaagaaaatgcaccacaacataatgataggtcagcatagtaaaataactttaccatgtgaacatttaaacaatttattgttgccacaatgtgcatggcacaaacaaacttttctcaagaccaatcaagtgtgcatacagtttatcattaaaccatgtagtaatagataatattgtagaggataaggtgtaatcaaaatattgtttgatgtactcgtctttacctcttttaaaacagctgggttgatatcagtttggacaaaacaatcctctgcacaaggtttagcacagctcattttcaagctacccctacctgtgaccttcatcaaggacatggcagtaaacgctgaagggtccattttaattgcccgagtttgaactccattgacgttcaagtgatataatgtactttgaccataatcatcatcgcctagttttcccatgaattcaacccggccaccagaagctgctaaagcaagagcaacattggatgatgatcctcctggtgcccttacaaattgatctggagaccagaacatgtctttcattccctcatgaatttcatgatctatcagcctattagcaggtcttccagaaggaataaatgagtacttagcaggcccaaagcagcacacaagagggattaaattgttaatatcattatcatcagtatcttctaatagcaatgctgctattttactttctaggtcatttgctgaaattttctcctgcctgtcattggagggcactagatcttcacccagatcttccccttcattgtcactcaattcctctacagtcttaacttttcttctgcccctcttctttggttcttttgctttgtccttctcttccgatgagcttgcagtagttgcagctgcaacataggagagaagtcatgacttgctaagggtttacgataatttttttcttaagttattgaaggaagtactctactgaaaatatgcaagcaagatgtacctttcttgcggcccctcctttttattttcttagtcccttcaggggattcatcttcttcagtgctcacttgaccttcttgtgtttccccttctgatgcttgtatggtggctttctttcttccacgtctcggagctcttttcttggtttttgatgtctcgccgtcactctcatcatcacttgaaccttctgctacatcttgagagctcttctttgccatggaacttacgtttcggttgagcagcctcattttagctttaggcttagtcataatgtttcccaagaagtggggcttataatgtaaatggctcctgcacattacacatcggaagcaagtcactaataactgttggaatttaaaccataatgtaagtagtgatgtgttaaaaaataaagaataagtgaatgtaagatagaactaatgttatcacacgattcaaatatgaagctgctaccataccacgtgggagcatattcagacaaggctaggtacaagcggtatatatatatatttcatcgagtacacatcacaatttgatgacatattgttcatcttgtaagaatcaaatagttgttatcaaaaaatgaaacaaaacatagacccaagatctattggaaatttgggaccaaagaaagatgccacaatctccactccatgtgctgctcctttcccttccctaacctaggatccatatggtggcgactcaaacaatccgaaagagatcgccacacgcactcatatcagctactaccagaagaagaagaagaagaagctgcattacacagaaaaatgaagcattacatacctgattgagttggtactacaaggcagggagcaaagaaactgcggggggagaagaagagaagccattcggtgcatcaatggagaggagaggattcctacaagaatcctcgcctacgcctcttccgcctcccgggagaagaaaatccctcaaacgaagaagctcagagctgagcagaggagcaaaaaccccaggggagaggggagaagaagattgattgctgctgcaaactaaaattacatacatgcccttccatctatctcaagataaggggcagaagcgtaataaataatcgcatggtagaacacgtacttggggaatacgcttcatccatgggtttacgaacagataataatacgctagcactctcctctcctctcctcttcttcccccgggagactccgccgccgtttatcgcctcggcggcgcggaatcctctctcttggttcgcaaatggcagccgcacggggtagcttatagggatcttcttgggagttaccctggttgactggtccgctcattcatcgaatcaacgcatcctgcgccgtcgcctcgcctgttcttcaatttgccgccggcgccggcttcggcttggccatggtgctccggcctcacgggagttcttgctgaatgtttatcatggtatattaattgtttcttttgtgtgacaatgtgggaatctagtattctagtcgagtcctactgccgttctttgcaaccttctccagtttgtggcaatgcgttgcggcgctgtcagcgctatgcatgtttgtggtgatttgtggttcttctccgtttcacattataagttgttttatttaggtttgatcaaatttatagaaaaatttagcaacatctacaatactaaattagtttcattaaatatattttgataatacgtttgttttctattcaaaatgttgctgtattttttagaaattaggtcaaaattaaaaaaaaagattgattaggaaaaaaagtcaaaatgacttataatataaaacaaggtcgtaatggactgttaaaattgctggtttccatagcactttgcacgtcatatgtaccagtaattgttattcattcagccattgttccttctcatttgctccgcaacacatagtctgtcaagatagaaaaataatactataaatctacttattcagataagcttgattttttttttttgaggattggaacaaaataattggttgattccgtattgtactgtcttttttacttctattgtgttcttttatttctgccacgtcacacatttagtttctaaacacccattgctcttccattccggctatcagcttaaggactgttttatgttgtaaaacagtaaaagtactgttcctttggtagattagccctaaaggaagctgtttgttcagataccaattgagaaccttttcttctgtaatatctgcctaaaaggttgacttgtcatgaaatcttcttatattccgtaatatttctgtatttttttctcatgtctgaggttgcctgatactttgcaggcaatgtagagctgttcagcaacatttttttttttctggacaaaaatcaaaaccccaaaagggcattccaaccatttagctaagcatgatatatcctatggtatcgtgtactaaatcccatgttctctatcaaggatagagttaaacggctaattcctgctgcccaatgctactacttgaaaggaaaaatgctcagcatttttgcaacagtgttccctcatgtttctttaataaggtgctgctgtacccatgtcagcctgtttgttgactcacagaaatgcacaaacaaatttctcaaggtactgttctttttcaggaatcaggataatcatccaagacaagatcccaagagcaagcggttgtcatagctttagggagcaatgtaggtcacagaatcagtaactttatacatccctacagctcatgagagattcatgcattatcattacaccacatgcctgcttgtataaaactgcacttgcatgtgtcactgatgaaccattgtttcaaaactccgttgttaagagggacaataaagcttggaccacatgaattactcaggaagctgctaagatatgggccacattaaacaaagcttgagacagcaaagaaattgagaaggagttgggccactgatggaataagatatagtcctgggccaattgatttggatattattttctatggtaagcaccagataaagaaatggtgaaagaatagttcactttgtgctcaacatcacagttgcatatggttagcgctagacaaactctgaagttttgatagacatgagaggctattgttatggctctggtgatgagtcttccaagtttgaatactgaaactgatattggtgcaagttggcatccactctcaaaatgcagagatgtcttcgaactcttggagaatcttggacgacagcccttgattaaaaggcaaatactaagacggggttgcccatcggtagtgcgttgtttgattggcaaagagaagtttcatagcctcatgggtatacttaatatgaacctgatagttcaagtgatcgagcgaagtttcaagaagtagacgatgctattctcaggtcaagttgctattatgtgatgatgccccttgcatagtaatacatctgagagaggatccctccacaatacatgttatcaaattttgaattaaggagatgtttgcaagcaggtggccatggaacgatactcaagggtgtaatggcacagaaatgacacacctccctttgtggagaatgattgttgacaccggaattggtttctcaaaaggttctgaatgtttctcaaaagatgagtaaaagaagcatcggtgcttcacaagtgccaatgttagttgaatgaccatccatgaaaatatttctaggtgaaatatgtgaccacaccgatcccatcgaaagaatttcagctcatgctgcctcatctgcaacattggttggtcaacataatcaaagtgcacaatgccagatttggtgttggttctgcaaaaatatgtgacacgttgctaaagcagagtaaaactttggactttctaataacaagattaagcataagatcttttgaatttttcatgaaatccagaatataatccaaatcaattcaagtgtaggagttcatgtcactaagagactaaataaaaatgaggtgatcttgagctatcctctgcaatcgagctttaccctgctattttgattggcattcttctaaattgaattcaatgtgctgtctacctgctcaacatataaacatattcaacaacaaaattaaatacatgtgtttgtatttcttttagctttttctacagatccattattgtactctcttatgttagcattccttgtgttccttagatttgctctgtttgagtgaacttttgccttaaatctcaccaaaatactaatcacccattcctgcttggatgaaaattattccatattgctagatatgaactctgcactcttttacttctgcccatgtgtaatggtgtatgtcttgctccgtgcacaatgtcagtccagtcagtgattcccaaatccaatagtctggggaatatgcaatgcatctgcgaagtcttgtacttgtttcatcacatgggatgccatcatggcagtgtgccagtgtgtgtacatcatctgagaactgagatagtagagaggaaagtgagagaggcacatgtacttggcatatgctttcttctgttcaaccatgtaccagttcttgagtacagtgtcacgcttgttcatgcaacgtgtgtctgtctctacctgtagctacttctgatcatttatgttgtgttgcaaagatatgtactgccagaaactctattctgtcagtgcactacagagtggagtgtagcaatatgcatgtggctttgttgctgcatctccgtcaatctgtgcatacatgactgctgtaatcagtattttttttttctctttagttgttttcttgtgaatgtgaaagcatctatctaatccaggcattgcagttggcaatttattgaggtttgcaaaacaatgtttttgagttatatttcagttggagttacacctgttggtttcagaaccgtgcattgattctggacactgcacttcaggtggaagagtatgttatatacattatgctcacttggtcttacaagctttattacattaacttattgtagtagtaattaaagtgcaaaactgtttcaaatagatatagttgatagctcatgtcccatggaagtttatttccattttcaggtttattttttcattgtgacaattgagcataatgaacttcaagggcttattaatcttgccacaaaataacttgacaggctacttttattccaatatacaactcacctgagctgtgtagtcttattttagacatttcatggtgataaagaacgccattgatctgaattgggggtatcttccagaataaagggtgtttttttttaaaacgaagaagaaaagctataacagcaccacaaaaaagatgttttggtagtaatgtttatgaaaaatgtgacttagcagaactactagtttggaattggtactacaagttaacagaactgcattgtgttttttgtatcatttcattctttacttgaataccttgcatgccttacctagggttttggtagtccttcatttagaggggaatttcagtccttgagaaaatttgcctgtagcaatctggaaatgttgtccacttgtccctttgtataatctttggtatgatgaattatataatttataaatggtgtgggctggcacctctgtgtttacacaatgtagtttcgtgtcctatgaatagcagcaacagccaacagtgacacttctggatttcaacaactgttaacatctcctgtactagcaatcaatactgcttttcagtatgttgaggtgaggcaagttcttttcccgacatcaatatattgtccaaccaattgaagcatcccctgttcattaacatgagttccttggtatctatagggaaaactgagagccaccattgaagcagtttacttgctttagcctgttcattgaggtacacctttactgttcctctatcagtatttcctcttttacatatttcatatttctttcagttagtggacatgagaagagaaatttgaagtcttcatccctgtttctatgagaactcgtgtatcttgtcaagtcttcatccatgtgttctgttcttatggacagctggtgtctattaactctctatcatgttcagaagcatagaagccaaatgacacttctgttttagttcaacaattgatggaccaaaagaatacaggagcatctgatggcaatctacattagcttcctaatggtcctataatgcctatattatctctataatattcctattttcatggacatatgttacaagagccaaacggctgttctaatcctgtcatcagggcagcagcatcagaattgcactcttattttctatctgatttgaattcctatctaacttcgcaaaatgttccaggatcagtaatcttgaacgcggatatgtaacccgttgggagcttcaactcgggggaacttcaatattgtgttgttaccttcttcctcccatctgcaaagaaaagattaacaccatgtcttctttgtcagtaaagaaccagacatattctaagcaacagaggatttgacaagatgaacaaacctgtattgagtcacgaaatagtgaaggaatgttgcaatttctacggtgcctacttccttccccgggcacattcgactacctcctccaaacagcatgaagtgtggatgtgattccatgttcttctcctgttatcagtaagtattacgtggttagaaacttacaattcaatcaatagtggtgttattggtgtgctagtggaaattacttgattgctgttttacttaccagccacctccatggattgaatgtcatgggatcagggtacaggaatggatcataatttatttcccttgtgtaaacatatattctccaaccttttgggataacataccctggaagaaacaaataagcactgcattagggctatccaaagatttatcaaaaagatgctaattgcagcagcgtatatatcatgcatatctcaccattcatttcaacatcttgggtagttttcctcagcagcccattcacaactgtagctaatcttaatgtctcgaagataacctgcatagtaaaagtgcccatgagttcatcatgatcagactacactgttactgtggctgctttctgagtttatcatcatcaaacttacagctcgagtgaaggtcatggacttgaaatcattccagtcgatggcatcttcgggcgctttacctttcctgatatcaaaatgttctttctgcagaagtgaacagatcatcagtaaactcgaagtgtgaaatggttttcatcatgggattcaagtggtttgttttcagattatctataccctgagttgctcaagagctttgggatggtctgacaggtacttgacagccatcatcgaggtcgtcgacatggtttcatatccagagtatataagggtgatgatcaggtcaatgatctgctcatctgtgagcttctccctggtgccctcgacaccggtcaagagcgcatccagcatgtcgtcgtgtacctgaccggaggatcgccgttccgcgatcatctgctctagcattgcaacaagcttcttccttgcctgaaaaaaaaaagagtgccttgttagagtagttcttcagtgcatgagttttaactgaattaccatatcagtacaattctgcagtcagctaaccttgaagccttggtagtagttggttccaggaaggttgatgggcagggagatggtgccaagcacaagggtgtagagctctgccttgagagcgtcagagagtgggccagcggagacgccggcaatctgcctgagtgcagatagcaaggccatctgaaagtgaaacattggtgtgagctgccatgcaagtatgaaattcagcatgccaaccaaaagcaaaccaggtactcatacaatgctactgctactttaaaaaaaaaaaaaacaagttccttaggcatttgagacatgtgatggccataattatggatagatttcactttggaatgaatatgtactacttagtactaagagagtgagagagatgctgtgtctggtagagtgtcttttatttctggctgaggaaagagctcatgatagatcaatctctttcttttgttatccagcagtacaagtgttctagaaaagctagagattccccttttttgggggtccagagaggaaagggggatcttccttctcccctcctttcctcttcctttgctccattccccattttgcaagaggcaccatcattctgtctgctgccattgtactatcagcagtagagtgcggtaaagaaaggtcaaaaaggtaattactgtgtgcttcctactgctgctggctgctagtggtgccacccattctttgttgccaacttgcagcatcagtggaaccacagtacagtactagtgctaactaatgtcaacagttgagattttcttaatgcagggtagtactcgtagtagagaccaagattttcttacggtgggccccacacaaattaccaccctccccaataatttactactcattactgctactaataaccagacagatcgtaatgcctgatactgctactgttgttgttgtttcagaaagcaagaaaagaaaagaagacgatgatatccatgcaaggagaaggagaagtagaagtagaagcagagagagtacctccttggtcttggcctggatgtcgacgacggcggaggaggaggaggaggaccaggcggcgaggtgggagcgcatgaaggcgtcgatcttggggaggagggaggagcggatcatggcggggcggacgagggagagcatggcgccgcgcatggcgcggtggagggggccctgcacggcggcgatgttgttccgccccaggatgtccagcatcgactgcgggtagcccgggacgaacccgcgcccttcgctggccagcgcccgccggttcagctccgcctccatacacaccaccgtcgggcaccccaggatgtgcgtcctgaacacgctcccgtacctgcaaaatctttcgcttttagtactactgctactattgctgctactgctagtggtattagtgtttgattagttttctcgttgataataaaaggaaatggaggaatgaatgattgtgatggatgaatgctgctgctagtagtacagattctgcaacaaggagaagaaaaacaaatgcttggtttgtgctgtggatgttctcttttagttgatcattgaagggagaaaagtttaggagggggccaagtggggatggatgtaattaaaaaaaatcgctccttttttttccttgggatgaaaaaaaatcatatcttttgtgtaagagtgttagtgtgtgtgtgtgttatgagggtgggcactttttggtggactggaagggagagaggatctcccagctggaacagtgatgagtgtgagcttttgggggacacagctccgaggtccctcccttcctccagatcacctcctctctctctctctctctctctctctctctctctctctctccccacatcttcatcatcatcaccatcatcaaagcagcagcactgcagcagctccttcttcctctgcctctccccccatggccaaagcttcaagcttgctattgcagagcagagagcagagcatatgatggatagatagatatacacacgcatgatgcagagattgcaggggaaggaatgtatggcgcgtcaggtagcatgtcaaaagaagcagttagttgttgtgttgctttggtttggtgcttgtttcatagtggagtaatatagcatatacctgagcctccgggccttcatgaaactgggtccctgcttgaggaactcggtggtctcgccgaagagcggccaccccattgtccccggcggcaggccgcgcttccggctgtaccgcacctcgttccaccgcagcagcaggctgctcaccaccaccgccgccgccacaaccaccccaatcgccaccaacaccatcttcttcttcctcctctcttggctactctctgagtattctctatatgtataaatatattttatctatagatgtatgtgtgaatcttcttctcttcttcttcttcttccttctgtatgaggttgtgaatgagtgacctctccctcctctgctcccctgctctgctgaagcagaggaagaaggaagctgtggtgggttgcttcaagctgcttgcttgtgctggaagaggagaagcccctccctccccctttatataggcgagccagccagccaccaccacccccagcacaagaattattgcctgtgcctttttcttcttcttttttttaatttacttctcccctctcctaactttggcagtgtttaagttaccttcaaacttccaaaaattccatcacatcaaatatttagacatattcatggagtattaaatatgaaaaaaaaaatcaattgtacagtttgcatgtaaattacgagacgaatcttttaagcttaattacatcatgatttgacaatgagacgctacattaaatatttgctaatgacagattaattagacttaataaattcgtattgcagtttacaggcggaatctgtaatttattttgttattagtctacgtttaatacttcaaatgtgtatccgtatacttaaaaagattttggcacacgaacggcctttttttgaaaaattactgcttctactctctttttttatatgttgtactttaacctatctaaaggagaatatactatgtattgctattaataaacctatttactactctcttcgttacaaaacataaacacttttagattctttaatagagcaaaaaaaaagaccttgatacctcatattaaatgtgagatggttaatgtgagagagtcgtttggattaagatgaaaagaattaaatgaaagatgattgataagacaaataatattgtgtagtatctttcctgaaataatttatctttagctattgaagcccaaattaagatgattgaaaaactatggtttctgatgagatcaaggaacgaggtttctcatcaaggaacggggttgagaaacgttgtatgcttttttgcgtgaagtttttaaaaagtctggatgaaaatgttctttcgttctccggacgtggtggacgttcccgggccaggaacgctgccttgaacctgtgctcctgtgattatgatcaaaatgcatcttatacttggtaagaagtattaaaaaataaaatttgtttatgacgaattataaagattaaaaataaatttattttgagacagggctacttcctttgttaaaagcaagtttatttttaacttctttcatttattataaaataagtttcttttaaagaatcattacatcaatatttatgaaagtaataaatgtattagaagtaattaaagtaggcaagagatttgatagagtaataacgaatgagatgggtgaaaaataaatttactatacgagagtagcatttatatagaaaaaatatgtattttcatgttctgattaagggtccacattccaaggcaaggccttgactatgggtatgtgtcgagacaatggtcagatgccttgcagctgcaccgaggaaaattagttttttcaaacaataaagaaaaggggaattgaattctagggtgttagataggcataggtatggatggcaacggggcggggcggaccgggttgggctggaacgctccagaccccgacccccaacttcactcctgccctgatcatggatgcgggtcaaaaacaacgctcgtccctgacccctccggggccccacaacctgaccagagccccgtattagattctattgttatgttatgtgctatgtactaccaaatctattaaatatacacgagaaaattgcgggcacagtttcattcacaaggcacagttggaatcttggagatgtagcaatacctctcactatctgtgaatcgccacctgtgcataggtgaagctcgtcgtgaatcgccggccgccgccgcgcccgtgcctgtgcgctgcaacctcacgcggccgcgcctgttccctcgccatacccttgtttgtctcgccggctgccgcaacctcgctgtccgcgcctgttccctcgccgtgcccttgcctgtctcgcctccccgccgtgccctgtgcgccgccgccaccccttgctgactccggagggagaggtagagctgtggaggggacgggattcgtgaggccggatgccgaaggggagactggagaggaggggaggggagatggtggccagcgacagcgagatccagtgcgccctgttgcgtcgtcgcctgtgtgtctcacaggaggggaggcgcctgtgtgtctcacgggaggggaggggatatgggaagaaactgagagagagataaggcagaggctagggtttagtagctttttatggtgggttgggctttttgggccttctatgcgctatattttgagggtttatatacatccccatgcccccgagggtcaccgtcggtaaaatgtctcccccgtcccctgctcgcccaaatgcggggccctatccctgacacccctgcgggtcgaaaatcacacccgcccccacccccgcccaggccctgtttggggagcttctagctgcagcagcttctcccagaatcaaaaactccccccaaacagtttagcttttggtctagattctgagaagttgtagttgtagaatccagaaaatgaactagaagccagaagctgggaaacccagcttttctagattcttataagatggctaccaaccagctgcttttcagaatcttaagctccccaaaacaggcccataggtttgcttggagaagttttggatactcaaagcatgtacaataacagactataagttaactataagcatatgtgtaggagataagagaggagagaagagaagtgggctatagatttgtagccagttgcagcacggactctaaaatattgtgtgtatatgacatgtaagaccaattattaataatgtagcatatatttgaagttaaccattgtataaattagctattagattgactatagatgatttggagctagtagttagctatactattaaacttgctctaaacaagcatctaataagaattaaaaaaggctagaagattcggtttttgacttctaatttatctttgagctctacactacggtttaacaaaatttgattgaaaagctcaaatgtttatatgaaacttctgatttgggataaactgtagctatcataagcttcataaatactccctacatctacttttgatagtcatatttcatcttgacacatagaccaagaataagtaattctacttatcatccatttaaacatgctactagtcattcctcgtaaacaagcgattcattaatatttatatttttaatgcccatgtagccagtcatgtgtggaagaatggagagtcacgcattaaatccgagaaagttattaagatgataggttgttggattgaaatatacttatcaaaaataaatttttcagatttgaaaatatgactatcaaaagtagatggagtgagtacaaatgtagagagaagcattactacggacagggttcatcaaatcttttcgcatagggttatcatgatggttatccacatggtttatgtggcttttaaaaactgagaagattaacaggttggtaaacctagccacgagattcacatcctctgtcataatagcgctatcattatgaacactgacttatagggcaataaaagaataaaacccacatacagatgatcataagagcaggtacaatagcagactattagccagctataaacatattttaatgagataaaagatgagatagaagagcagcaggctacagatttatagccagctgcagcacggactccaagacgtaatgtgtgtatgacaggtgggaccatatattaatagtatagtaagcaactattgtatgaattggctattaaatcggctatagatgaattggagctactagtgggctactccctctatcccataatataagggatttttatattttgcttgcactgtttgaccacttctcttattcaaaaaatttgtgcatataaaaaacaaaaaattgtgcttaaagtactttgaataataaagtaagtcaaaaaaaataattccaaaattttgttaaataagaccaatggtcaaacaatgcaaacaaaatgtcaaaatcccttatattactc

SEQ ID NO: 20938 - DNA, 10369 bp, Oryza sativa
cgaagtcggagtcggagaagaaaaagttgcggtccgcccccgagacgacggagtgctgctggatcccccgcgagacagggggctgctctcagccccccttctgcgcgaccagccccgagggcgccccaagtgcaagggggagcggttgttcctctcgccccccacttcgggccctcgggtagattcggcctcggcctcgggctcgggcccgcccgcagttttggcctcggcctcgggctcagggccgtctccggcctcggcttccgggctgcgacctccctcgtcccccgctcccgggtggcgctccgcatggatccgggtctcagagccgccctcgggagggacgtcaccgccgctatcgctcgcggcgggtcgagtcccggctgaggtgaacccagggtcggactcggtgtgcggcccgtgggccccgccgggaggctgtgaaggccccgcggccctggatcggccaagtccgggccgctctgatcgttcggattttgtcccctgcaaagggtcggacctcgagatccccaggaaggaatctcactacaaaataaccctgatcgcgttaacgaagaaaaagaagaggagggaacaagagaccgagatgagtaaaaagcaccgaagcgggtgccggcagtcgtacctgcggggagggcggttgaaagtccacttcgggggctcaatgaagctcccccgacacggctccgtttggcctatcttccagagccgcttcttcttccgtccggcctcaggcgcagtggggcgcttgtggcccgccgacggtcggtccgccccgcgctcggcgccccctctgtgtgggggagagggcggtcgagattcggacatcttccgcttccctttcgggtcgctggccgagtcgaccccgggtccgcggctcgggccgggtgccctggagctgccacccccgctggggccgcttgtccgactcccgcctgtggtcaacccgccaccacccacgccgatagcgctaccaccggtgccgccccggcgggaccgactcctgctggcgccgatggccgacatcacagccaagatactctcccggtcgcggtcgctacagaggggaaggatcccgtctggaatcagtgtttgctcggcagtgtccacacccagcacccgccgaatcaccgtcttcgcgtcctcctcgccccagtcccagcgctcgcccacatgcgtgcgcatggggtcgttaggtccagtgtactcccacgcgccatgggatcgatcttggagaggcgcgatacggcggcggaagtagtcgccaaagaccattgcccccgtgaggccaaggcttcgcaggcccctgaggcgatcccgcaccgcgccgtactcttcgcccaactccgaaaccgctagccatgtggcggatcgttcgggagggccagcgggaagccgaagtcgcgggtggtccagcagcgcggtgtagaaccagtccttctttctgtcctcccatttctttcggagatggctctcgatgtattgccccgctgtgcctggccggggctagaagtaacatccccccaccaccgcgccttgcagcagctgccggacgaagaaagactggaacagccgcatcgtcggtcgcaccccgatgaacatctcgcacagatgcgcgaagatggccagcgtcatcacggcgttgggtgcgagatgcaaggcatggatctcatataaatccaaaacctcgtggaagaatccagagaatggcgggatcaaccccgccatagcaaaggacaggaggtgcacagatcactccgggtaccgcggccgcggccgcgactcccccgccatcacggcggcgccttccgacatgatcttgcgggggagactaaggtgcctatccgccgtaatgcgcgatgccggaagcactgcgtcaccagcatcttgagccatgatgaccggcggagaaacggtgaggggcttagcgtgcggggtagcgtggagtggcgagaatgttagggcttagggaacgagtttgcgggtgagcagttggcgaaaggaaggaggcaaagtccccgcctccgtatccttttatccttgcctcgcccgcactcgcctcctcgtttcacgccctcacggttgcccccacgattctcgcgcccgcagttgcctaatcgtttcccgcgaccactcatcacgtcgcccactgaatccacgccccgcattcagtgcgcctgtcagcggcacactcgataaagggcgtgcgacggtcacgggcgcaatctaggcgaaccgtcaccagtaccgccacatgcgtggcgggcgagggagtcgaggtgtggtatagccgaccccctaattttcacgccttaagcatcctcatcatcagcgcggtcagtggcgatcaaaccgctgttgtggttgatacgccgacctggccactcggcaacatccgcttaggttccctgccgggcccgcaaccccagcttgggaagtcgtgaggcaccacgtcagaccgacctcaggaggccaatgtccgatatggtgccgggggctactgtcggagatatgggctcgggggtatgcgaagtgtggggaatctaccttcccatcctgccatgtgtccctacagcctggtcctgcccccgcagtccgcgaaccgcaggagcggccgggggggtcggggcctcggggtgccacgtcatgcccctcgggcccttgcaccgctttgccccgaggccctcgcccagccaccatttggcggggggagcgagcgaggtgagggcccaggctgagcctcctttaatgcgtgcaacgccccaactgccccctgtcacatttaatgtagtgggggcagacgtgcggcgtgctaaactgacgcgccatagtcaagaatgaccggtctgtgaccggcctaacgctggtcacgtctgactggaccgacaaccgtgctcccacgtcgcatctgcttctggcggagtagaggtaggtatgacccgtcccatcggagggtcattcggacggcggccaccacaagtcttcacccattaatgagggaatgacagggctgtcccccgtgtcatgcgagggacggcgctgagccccattcaaggacaagctgtggttcaggttccaggcgaaggcacgggtcgagttccggtcaagatagggtgggaccccacccgaaagaagagtaggtagaggcggtgcatgtggtatccccttgagatataaaaggagaaccttgcccaccgagcaaagggacgattctcaactaacttgggctctaggagaagagtgttctcccgagtttaggaacccttgtaactctcaatctaaatcccaaacacaggagtagggtattacgcttctcagcggcccgaacttgtataatttgattgtgtgcgagctagctaggggccttagggatggatacgtttctagaggcgagtttcttcccccggccgaactcacgaaaggggggtttcacgacctcccgctagagaggatcatccctcgacaatctcccaatcacgatgtggttgtgctgcataggttttaaacttttgaggagatgttttctcattgtttacatatcgcatattaattaataatatagattaatatatatcgcatattaattaataatatagattaatatatgatacaagttaaaattcgactactacaagttcaaaaaaaaaactatagttaacggttaaattcttttctttatgttgttgcaacttgtaaaggttaaatttatcttttatgtttgtgaaataatctactgatctatcacatattaatcctatattgttgatttttttcagttttttcataacaatttaaatgatatttaaataataagtgatgtccctaaagagctccttataatcatttcccgtacatcgggaggaggatttgtacagcgtcaggactcacgacaacggcgtgcagaagcagatcacagttgcagcagtttctactgcctggcagcaggataaactcccagcattaacatcacatctaggcatctatattgataatagtttctttttccagggaatgcgcacaaatatgatgcctggaacagatgtcattcaccaatgtgttacatttagctggttactggtcagagaaacaggagggagggagggagggaacatttggaattttttacatggagagaactccacatggaaaatggaaaaaaagaaaaaaactccatcgagacaatttggagaggacttaaagtgttccttcaagagacaaactatgaagtgctctagatagatcgctagtcctcagtacacattttcctcccagaattttcattcctgtcaagcagcaaaacaaaaatgttctaataagctacagtagtaaagaactaaatcacataggcatgctgtcaacactacagtaaagcctataagcaatagactgagatgtaacactgccaaacatctcgtttgagttttatcttttttctctttgttattttcaaaaccggtgtttcctcactactcaaatatgaccaaagtatttaacagcacatgtgattattctgagaaaacggtagacatctcctaagccaagttttcttaaaaccaggtaatttgattcctttgaaccataaactgtttttaatgtcaattaaaacgtaatactatgaagttcattgaagataatctattccagtgaataccatcatattactatcattaaaagaaaagaaacagttggttgaaaggcatttttaggatactcaccccaaaactttgcatcattttcgtcagtggataacagaacctcatggatctgacagtgctctatgactcccaggctccaaaattgattccatcggatcatccatcctacccacagcaacagatgaaggtataaatagatgttggacagattcaatttcagtagttcaaagtacacctcacctctctcaagtaaaaactgattatcaaccaaatacaccagagtacataggctagaggaaaatacaaaatagaagagagagagagagagagagagagagagaggaagaagaagcaattaatctggcataccctgtaagatgtgctggaaattttggtggccagatcatcagcagtggatatattctttcaatatccccatcctcgggacagatttcgtaaaccttggtcatgttctttgcaacgatgtccaataagaatatagaatcatccagctttagaaatgctgacttcccagcgtttgcgattccgagaatactgacatgggcacacgattctccagcctctgtaacggatgcttgaagtatatcatcccttgcaacagaatgagataatgtccatgtaatttgagacaagttgtgagtccacacttgaagttttgtggggtggagacatacgagagtaaactcatcctcgagcttgccttcgcacagatcaacctcatcacaatcttccaattcaatctcatcagtaatattcactttggtcaactccagagtcttgcaatccaacacaatgatgatgctgaagttagtgaggagaaataattttccaaaagcatgaactcctaatggtatgaccagctcggcctgttcatcaggtcctgggaatgaaatagtgtcggacgcacgaccaacccagatgccatcaaccaaatgaaacagataagctatcatgcacttgcatttgtagcctaaagccagtcggtagtactctctcccattaccaccatcctcaggaagaaattcatggaggttgtaggtgaaagaacgatctagccacactttcagaggggtctgtgggtagacagaaatatcagcaggcggaagaagaggactatgcaccgcaagtttcccatagatttcgacaagcacacgcccatttctggaatcccacatgctcaagggcacatcgctccacgcatcgaagtgtcggctggcgcggccgaggagaacacctagctcaggaggatggccttgcagggctacgaagcgagggcaagagagtaccgaggaatcgatgtagaaccccagcgtcggaggggggtggaggctgcggaagcggcggaggaagaccaggtcggaggcgttgcggagccaggacttgcagacgagggaggcgcggactaggcagtggggcaacgcgacgcggacgaggatctcgcggaggaggtcgtcgttgtcgaagacgctggaggtcgccgtagccgtagccgtagccgccatggccgtcaccgttgctgatagggataaccgcgccatcccctccgatgcagcaccatcacccagctccccgacggccattttctcttgaggggaggggaggagagggagtggaggttgacgagggagagacggggaggaggacgacgacgacgaggagtaggaggagaaaggggaaatttcgataccccgccgccgccgccgcgccgcttgatcaaccaggggaaattttcgtttctccgtgcacagtgacttctggaaacttcgggaatcccgcggagacttctggaagcagcaaatagattctggcctcctgtgtcacttggaaaatttacacgcaggaactaggaagtactagtaggagactactagtcattcccaatgaaatacacaaataaaataacaggatcgctaaccatcattcggcagacaatccacctttttaactcttgagaatttcggacaatccgaatgagaaaacatagaaatagaaaaaaaacatgattttgataggaatataagtgtaaaacagatgattgcaatacacaggaaaaacacatgaatggtcgtttgattggactgcaggaaaaatacaggaattagagaagagataaagactcaaaggaaagtttccaagaggttttacctcatgttagaattcctccaaaacttgcatggcattaggcaatccataggaatttcataggattccataagatccattcctttgattcaaagagctatataggaaaaattcctataggaatgaaatcctctaaaattcctatgaatttcctttgaatcaaatggggccttatcattcgtgttccccttttccttcagctctagtgatctactcgtcttctccaacacttgcgacaccttaaattttggtagagacctacgaattagggtctcgagttagggtcagggtgggtagggggaggtggagtttgttagttttaatgggatggcagaaacagcctagtggtgggtggtgggtcaggcatgcagcgaggtgatggcagcgccaccaaagccatttggtcaaaagcgggcgttgggccagtgagcagtacggaaaaagtaaaaggaccaataaggaggcgaaggccggtggtggtggatccgatagcaccgaagatagggaataaggcgatacgggggtagctcgctgccactggcttgacgaaaagaagaggggagggatggggcatgacgaaaagaagaggggagggatggggcaggggggaggaagcccgttgaccggggagggggctgggggctcaccagagccgttgttgccctccggccaagcggtagcgcggtggggtggtagagacgggggatcgggtgagcgacgacgcactgatggtgtgcaaggggaatggaaggaggagaggagttagggttaagggggtgctacacgaatcctaaaacaaatcgaatggtccaggaaacacaagatatatggtgggattttctacacatgttgatgttgacacaaaatctggtgcaacaaaatgaaggcctaggagatctgcgcggtttctgaaacgctgagcagtactcaagggattgcaactattgaaggaagttgtggccgatgcaattgagattattggtgtccccagccccctttgaaacctcgaccccatcagcctgtgcccctgaccgagccaaagtggtgtccctagccccctttgaaaactcgaccccatcggcctgtgcccctgaccaagccaaagtggtgcagccagaccacgtatttttttcgcccaagcgcacactaacatggcatcgctacagtaaaaaaccatgaggtggcgtgctaatgtggtcctcttttcctccctctctcaagcatatatgtatgacatgtgggtccagaatgtcaggaacgaggtatctcgacggaattgcggctatgtgataatttccagcgttaatgttgcagttttctgaaatgtggtgtaaaggttgcagcaaagtgatagtttagtcaataaaagtgtagttttctaaaatttactctaataataagtagaaataatacgtaagatagctagagaatataagcttatataagttgatgtggtttacgataattattaaatagtatatagaatgatgattcaaatgtaaaagtaagctaatgtggctttatgagaaaaaaaagagagagataatttggataatagattaatcatctaaagacaattatgtgcaatatgttcagcaaaacacaattatgtcccagcgagttcaatattatcctacaaatataataaattatacataaaatcaatttaactgatactcaacacatcgtataaaatgaacaccatatataagagtgctttcccaatttcaattgcacgcacgtttgaatgagtcagtttgcggtacttattaatacaactcaaagctttcacttcagtttaacacttcattccagacacaaacgaagtgttttatttaattgttagctgcaattcacagtaacaatgcatcactgcagtaatttacaaccaccatgttagtttatccccatgacatacgaccagcgctgttaccagctcctcctcccttttttccacttgtcatcttaaccagcagttgttggtgcaaatgtcgccctgaaggatcatcctgcatttgcaataagaaaaaaaaaaactctagtcagaagttgattgcaatttaccagtctattctaatatttgctccagtgtggtgataatgaattattagcgacaaaataataactatggtgcatatctcaccctaagacagctgttgaatgtgccatctttcagctgaggaggaaggcaagtctgcagtgcagcgaaacccctgaattgaagagggaaggaaatggacaaacgacattagtgcttctgaaggagaaatatgaaaacataattcggtgacatttaagcgatagaataaacctaggattctctgacatcctgaggtaacaacggataacgtgtttcagcaacctcttggaaggctgatcaaccattgaggtaaccacggttgctaaagcagctcccacagcatagaaccgatcagcattggcacaaacataagctagaccggcgtcatctacgacaattttttcagtgataaaagttgccacctgcatgcatatttgactgaatcagtttacgagagcaatgggtttaaaaattagcagactaagggaccattttcagaacatcaagtatagtttatggtacctatatttggttttaggtctattttttggggggaaataaccgataattggtgatgacaacctagcgtggccgttggttatatgtgctaatttatggtttgtttggttatatataatccagaaaaagcgagccacttaatttaatgtaaagagtattcatatatattaaaattatatagatacaaatatggtatactgagtgagagtagtgtacttcacatattacatgatcaaaaaatagctaagagtactcaaaagtcagtagatggccactagtttgaagcattcaatcaatgaattgatgcaaaactgcatgatcgaccaggcctaaagcacattttgaattgactagtaaaatgcccaagctttgctatgggcagaagaaaaaaaaatcataatatgtcataccaatatatatatatatatatatatatatatatatatatatatatatatatatatatatatatatatatatatattttatcaaataccttactattacttctttacttatttacttatgttattcacttgtttggaccaaacgttggactattccataataatacaaaatatcatacggtaatttataaaaactacaaaagcaatagcaaggttagagatgcaagtgggcagtcccgctacccacataaaaacccatttgctagttcatttcccacatggtagtacaaaattttagaagaaaaaaataaactagaagtgacttaagcgggctaaaaaaacccgcttgcccgccccgcttgcattcctaagtggggtgacagattcactgccaccaccactagaggcttttaaaggagtataggtgactctaggtgaaaaaaaattaaacgtgttccttccattttttttgacgggaaagaatactgaagaactaaaggtggtactccctccgtttcacaatg

SEQ ID NO: 20939 - DNA, 9906 bp, Oryza sativa
  unsure (1)..(9906): unsure at all n locations
atctacaatgacaatttataaataatatagttgttacccactaactataaagttcaacatgcaagtgtgccacatgatcacccactagtaattattatctatagtatcataaatctcattcaaacatatattatttataattttgctgtattttgagaactcaacatgtaagatatgtcaaaccatcctctccacattattttcatattatttaaacatatacatatatttttttctataatgtataacatgtattcactcagatatcctgtagcatggtgcagggtatcaactagttaccttaacaagagcgccaatgacacccaagctggtcaaccgcaagtactcaaattgtttggccttgtcatcagtttccaaaaatgcacataggtacaacggaatgcgggctgaaaaaaaaacaatatcgaaagataggaaacaacaaaatcactaatagcaaacaaacaaaagactaaagtttgtaccatgaattattttactacaaaacgtagtatatgacacccccaactatcaatattggacattttaaccctttagcagtttttgaatggtttttcatacacatgaacgccacataggatgccacatgtactagaggtccatgtaagcccttatgcattatatgggccctgctcatattggctgcctactcgttgctcgttggcatcatgtgacggtacattgatggagtggcggtggcacgttgaaggagtagcggcttagcgacgagcagccgcggcatggggaaggagaagcagggagtagggagcggggagcaggggcaaacggttgcttcgtgtgcccatggaggcggtggtgaggggaaggagtagcggcgagctgctgcttcactcgctcgctcaggcgacatggcggggaaggagcagcagtgagcgattcttgttgtagtagcctaataggtgggacccccacccctcttcttcctcttctgacatggcatctttgtacaggttggatccttcatcatgtccacgcatatcaaaaccaacctaaatctactttagagggtagtgtttggtattgatagttgtggggcaaggggtgttatagctggttttgtaattaggggtgtgttttagataaagacaagaagggtaaaatagacttatttatcccaaaatatatatggaatcataggtatgatatgtataggtattacttttattttgcgaggtatagtaatattacataataatgagtgacatcattgaggttgggaggaagataattaacaaattaccccatcaacatatttcagtttagacatatccatgatctttaccttgtaagaaatgggtcctagtctccgaatgtgaagcaatacactgcgcaatgcaaataaattaaataaaatatgattatcatagtatttggtagatgagaaaaggtagcaatataagtgtacctgaagaagtgctagtgcattgcaaactcggtttgaagcacctaatgacaaagttgggggtgaaagtgcagggtagactactataatctcctgtttgtttgtcagtaataagaaaaagtgatgagtgtttgttataccacacataaataaaagtaagctcagacatcaacaagttgaattagcacagttattgatatgatcatcaactcaacttgtgctaatgttgaattactaagagtggctgacatcaaaaccacctttttggagaagacctcaacaaaaaaaaagatcacgtaaatagtacaacacaacaaaaattactaattacttgtgggatcaagcatgatcatacctggagcagtgaagcaactatgccaaaagaattccacaacagcagagccaggttttgaaacatctctcttttctgaaaaatagtttcaagaagctgcattattcttaggtttttctttccatgatgctgtaatgtgtcaattgcataatatgcaatttaccattacttattcaattaagaacaattacaaaaataatcaacctggcaaatagaaattaattaatatctcaaggtaagaagatctatcaaccctttgagacctcaaggtgtgctttctcacatagattagtattagaaaggttgaggacaagtttctctgctaatgcgatgtgtactgatccttcgctcactaccaggtgacacccaatgtcagagcaagaaagatttttgagccaggcaaacatcactactactatcatttgctacggaggaaaataaagtgtttttttttctgtttcatatagatgtatgcttttataaatatctaggtcttagcttcattggtaacatgtaacattacttccttatagtcttgctctttaagggaaggcatgaagcttagcacgcttggtgggagatgtgcgtgcacaccctcaacattcaatctctatgtcatgttggaatcaacctatttgcttatttcttctctactagtttgatactgagatcctccttagtatggttcattctcttttggcacttccatgggaaagttcccctttccttatgcttttcttttgtttagtttgtaccttttagaagtatgtatgtaatgcacatgcctttttatcatagatagctttgtctttatgtaagaacaagggactttgcaatgtgaataaagtctgttccaataagattttggatgtattttggtttactttacataattgtctatactgcagttaagtctattctacgtagatcttctgagttgtgtacactttttctcaacctagcatcttttacacgtgcaaatgccaaaacccaagaaaaacaacttttggtcggttttccaaaagccattccacctctgcatgtatgtagaagctactagagtaattcccaactcctacccctctccctgttttatttatagcggccagtggaaacatgaatcatgtgaacttcgaacactcaccctcctcctccctccaccctccccccctctcccacacactcctcctgttcccttaggcaatttattgtctcaaccacaattcttgtagttagaatgcctgacactatgtagtagtctaataatctttatgaaaaatatccaaacctagcaaaggggccttactattgtattggttaggttaattggcatttgcagtaatattgtcacatcaatgcatgccatgtcacatattgtccaaaaatttacttaaatattgcatattatcgacaaattttattttattttatacatatttatttaaaaattgagggagaaactaatagttatatatgttggagaatatatctcatatagcatcattagataattcctttcatgcacaaatctgcaataataaataatgaaatgcaaaaaggtgcatcatctcttttcaactgtcatttattcatatcacttgtatttggtggaaaacaactcattagtattttagtaaatcaagttttacgcaacttggagcccataccacttcttcaaataaaaggaatgatgtaatagacaattcccagaaaagatataaattaccttgcgtagctcggaaggagcatgtcgtttgagttctggatctagcaaatcaagaataagacgctcaacaagttcagggtctctagggctaggaacctcactagtcaacatagcaaatatgtgtagactagctatatccaatgaaagaagtgatataaaactctaagtcaaacaatccccaatgcttctacaggaataaaatagaaatatgtgatacataggggcactacagcctttaagtagtgtagatacagatgatgtgcatttacttgtgtcataagaaatcagtagaaactgttccagataaatgcacattatcttgttggtttctttataatctttgatgcatgttactttttctctaaaaagaatccaaagttaaaaactgcagctccacatctgcgatgagtcatgcaaaagataagtattagcggttcataccttttttatgtcattcctatcgtgtgaagcacatgacaaagtgtaagttcggttcctttatttttgttaatatatgaccagatcactaatctttcttcagagtgagacaaaactcacaggaaaataatgattcacattagaaattttcccatgagttatccatcagaatgaaactctcaaggtggtggttgggtgtgggctggctggggattcaagagaggaaagatgttttttttggaaaggaaagaggttagggcatgttcggattataggataggaaaagtgtacaaatttaggaaatgaatctaagtgtaaaacagagtaatgaaaaataaaggaatacaaaagttaataacaagtttcaatcaatctggtgcatcggcccatattcaaagatcatataattgtttaattgatatcttataataatcaatcttgtacttataatatctctatttggtccgatctattaacattggttttaataaagttagaagattctttgctgatgtattctttgctttatttttcaaaattatatcacatccaaatcttcgctgatgtattctttgctttatttttcataacttatatccatctgttatagccgatcgatccgaaattccaacatcagctaggcacatgattatatatcggccttttggccaatctgccaaacgatctaatctttatctatatcttgttagatcaaactaactgacatacctaaaccctaattgataggacatgtactagatgtaagcaaatctctcaggcctctacaatgaattttgcgtcaacaaatttgtgtatgaatacaaaccgtttgaggaactgaaaattctgatgaaaaatacattgtctagaagcttccccaaacataaccttatactccctctatcccctaatataagggaatttgatattttgcttgcaatgtttgaccactcgtcttattaaaaaaattgtgaaaatataaaaaacgaaaagttgtgcttaaagtactagtatactaaagtaagtcacaaataaaataaataataatttcaaaactttttgaataagaccatggtcaaacagtttaagcaaaatatggaaatcccttatattaggggacggagggagtattacagttaatgcgcaacgctaatgccaatgctgacaccgaagcgctcatgtcgatcaccaacgcatatggctgcacaccgaagcccgtcgcctcgccgccggtgcagccgccgcccagtcatcggcgtgcatgaacaagctagctttggtcgaaaaccagcggtgtcaaattgaaaattttcccccaaaattttttaaaaaaaaaggggcccccaaaactgggaaaaaaaaccgggccttttcccaaaattgnatcgattcgattggctcgattttggacggactgccctaatttaatcctgctaatgaaattatttgatcccgttcatataatctgtagttaatctccagatcgatcagtcattttacttcttccgtgcagtcaaatcctatgggggtattggtaataattgtaactctcgaaccctatgggagtagagatggaattgaatttggtgatcattaaagttgatggagcaattgttgcatgtatgcttgtcggttaaacttttcattcctcattcctcttccgacgggagcttttgacgcgtgcatacgacaggaaggatgggggcgtcgggccgccgctcctgagagcaaggctaataatatagccgacttgttggctataaggtttttttagccttctttcaacctacccatataatagttagctctttacaattaatatagggttcacttgtctctctcatatagttttttggttcttgtgtccaagccggctgtaagtttatagcccgcttctcctctctctcctctcttctctcctccaccttagcatttagccggcttatagcctactgctatacttgctctgaggcgtgccgcgtgcgggacagaaggcggcgccccggcggctcttccagatatacgagtagttacttcaaacgagtcattgagggatctgtttttccggattacccctccgtctcaaaatataatagattttgggtaaataggatgcatcatattatgaatctaaacatacacgcagctcgctgtccagatttatattactagaatacgtcacatccatccaaaattacttatattttaggatgagggaaatatcttttcaattactagcaaaagtgcccgtgcgttgccacaggaattgtaaaaaccagaaaattgagaaaaactcgagaaagatttatattatgtaattaattgaaatataaatttccggaaatgtttggtattttttaagtaggtagatatataattaaattagttatataaaattatatagttggatttaattttattgaattatccatgattaattacactatttggaattttattgaaatttctagagtttaatagctaattttgataatacaagcattattttagtatttatttaaataaaaaatcatcctttctctttaggccattttcagctcgctttcatcccttctcctcccctccgtctcaacctgtaggaaagcattcggcctaacaggaagtctaattcggctccccctactcctctcattgccgtgtggcccccaaccaaaagtccaacctaagtgctttgttggaccggccggccagcacgctgcgtagcagtgatgcggcccaaagatggaggctagcccaacacgggatcgatctgagccgttcgtttcgatggatggctcagatcgattttgaatccatcaaaatcgtcggggttaaaaaatccctaaccctaattcatttttccctccctcccctcaccgcaggccgcccctgtcccccaccagcggcgccgctcctctctccgcaccaacgacgctcctcctcccaccgcgagttgccccttccccaccggtggcgcctctccacgcccctcccccaccggcagtgcctctccatgccctcccttctcccgcggtatcgctcccccttcctcccccctatccttcggctcctttaattcctcctcatcggggtgccgctgccatcccgctcctcgccacatccagcaagttggcggcaccccgacggcatggtggctcaggattggctcctccctctccctcccggcatcttcctagcgcaaaggcgagtcagcgacttcccaacgcaaccgcggctactccccagctccctggcggcacagtggcggcttggctgatccccgatgcaatgatgggacggtggaggaggaggtccgtcgaggaggaacggtggcctcccgctcgcccctccatctcctctcatcatctcttgatgttttggatgattttgtgatgattctgatttggatttggatttggatttggattgagattttgtttttggttggacttggattttgattatgtggattttgattctaatagtataaccaattactagctcaaaatcatctatagtcaatctaatagccaattcatacaatagttaagtacaaatacatactacatcattaataattggtcacacatgtcatacacgcagcatcttgtagtctgtgctacagcctatagatggctacaagtttatagctagcccgttacttttttctctcattttttatctccttcatactccctccattccattctaaaatataaggtataaccactcctaacccaaagaccaagaaaataattattaccatcttgtactttggatcataataaaaatataatatatgcatccaatagaattagaaaacatgagagtgggggatttaaaaaagtaataatttaatggagaaggggtcatagttaatagcttacatacacgcatatcttatattatggaacatctaaaaaaagtggctgtgtcttatattatggaatgggaagtatatgtttatagctgatatatagtctgttattgtacatggtctgtaggaaaaaaagtacccatacaaattcctaaaagtgcctcatattaaatacagtaccaagtactgtaaatgaacaactaatggcgagggtgtgaccgtgaacagatatctcgctatagactatatagatatctcgctatagactttatatagaaaggcaatatctagctaaccaattaaagaggaacatttatgaactagaactgcaagattaacacctagggaattgcttgtgagccggattcattagcaagctaagatatggtcaccggattacccattcgggtagtaagccgtcacctggtgaaggcgtcggatgctaccatccagccgcacgtgctcactctctcccacatcgacctccacgccgacgacgtccagaccaccgtcacctgcgtctaccccaaccctgccccctccggcgccggcgatttcgccgccgtcgtcgccaccttcacggccaacctgccgtccttcctcagccacctcttcttcctcaccagccgcatccccaccaacccggcgtccggcccgttagcctttccggctccaaaaggaaaaagtccaatttcactcccttaaatgtcggtcgaatctaatccatgaccctgaaccgtaaaaccggataggacgactccccggactattaaaaccggtgcaatttgactccctcaacggttttggagggcggtttcgttgatgtagcgcatacgtggtggtattgacttggtattccttccacatggcgctgacatggcggttaggtggcactcgaattttaaaaatgtgtaggacccatctgtcattcaaaaaaaattataggacccactggcatgtggggcccacgtgtcatcctctctcttccctccatcctcatccctctctcccttctctctctctctctcctcacgtcggcgtcatggagcctcgactccctgtcgtgggtgtctccacctcgccaccgtcggtgccccggcgtcgtccaccaccgaagacgccgtcttcatccgcccaagccgtcgtcgtcaccacccgagcccagctcgagctcgtcgccgaaccgccgccacgatgcatagccaagtcgtctgcgagggcgccgcctacgaggccgacaccgtcggcgccttcggcaagctctagggcaagcccgccgtcttccgccacgaccgcatgcccatgtggccatgttcgggagaggccgcatcatggccgaaggcgacgagtgggctcgccaccgctgcatcatcgcccctgccttctccgccaccaacctcaacgtaatcaaccaattaattcattctctccatgcacaagaacacgtgcactattctacatgattctaattgatggctacatatgtgcctgttgttgatgatgcaggacacgatcggcgtgatggaggagacgacgtcgaagatgctcggcgagtggagcgacatggtggcgttgggacacagctgcatcgacatcgagaagggcgttgtccggaacgccgccgagatcatcgccaaggccaacttcagcatcgccgccgccgacgccacggtcttccacaaagctgcaggcgatgctgttccactccacgcgcgcgtctcgtcggcgtcccgctcgccagcctcctccatatccgcgccacctacgaggcgtggaaggtgggccgcaagatcgacgcgctcctgctcgacattatcgactcgcggcggcggcgtgaaggcggcggcatgaaggaggtggaggaggtgaccggttggtcgggccccatggacgcggcggtgatggaaaagctcaccaagatggggtgcatgctaaacgaggtgctccggctgtatccgccttcgccgaacgtgcagaggccagcggcgtgcgatgcggaggttgtgcgcggggagaggcgaaatgcggcatggggattagggatttcggcgagccaaggaagggaaggg

SEQ ID NO: 20940 - DNA, 1890 bp, Oryza sativa
tttaatagttcggggagtcatcttatctggttttctggttaaggttttctggttaagggttacagattagattcagcctactttttaagggagtcaaagtggactttttcagctccaaaaccatcaaaaggtaacagtttcttcattccaggccatacagagcacggcccacaagtactgtacatttttctttcagtaaattgttacatggtagatggcaggtagatggattaacaaatcatccaaaaaaatatatagctccggcctagttgattgcatgaaaaaattggcgttgagataccatggccttaattacttggatttaaacttgagtacctagaatcgtttacatagaatgaggtaacctcccaggtactcgtgttcaagggtacagttggcattttccagttccagcacatactgtacattcctcaacattacctgcaacgtgtctcaggcagtacttgatgcgatcattcataacatcctgaaaaacatgtttgcatgcgattagtaaatatgataaaaaaaagaaaacaaatcctgctcagtttgctagacattagctaatagctattgaaaccaaagttagcttgcttgaaatcataagttacatttatgattatgcaagaatttcctgtaaatttcttaaatagaatctttcatctgaacaccccctaatatttatgaaaagaaggcgataaggtaattttggactcattttcatacgatagcatcctcttcaacaccatctaaaagtgatgacaattgagaggataatcaaatggatagcactgagacacctgtactgaatctatttattgaggcaaaatcacactactttctctttatattcagtgaatatagagttttctattaatcgatacagactgcacaacgctttttcaaacagtgtaaggagcacaatcaatcaattgtcagaaaagtagtaaacattatttttagacagcttctataaagagtgcacaatgtaacagtgacacaaataatctagaagaatttatagggaaatcaatgagcacataccaccataagctcatgcaatccaagaggggcagtgacaacataagttatgtttgagtgctccttagatgcttccgcagctaaagcagggatatcctgggtgaaaaatatagtgccaacttgaatgaaatttttcatcttaattgtggagaataatacataaggcaaatacccatctacctaggaaatcattgcaataaatagaaataacctgatgaacttaacacccttaggattgagtactaacaatcttaaataattcaaaggcatacttgtttccagtgtcgtccaggtgaaagaaaatatggactgacaataacacgggacgctccttgttgcacacattttccaaatgcatctttaatagtaggctcagctagctcctgcacacattcatctactataagagtgtaatggaaggtaaagtgacaaaatacacagaccatagagataagaaaatatatttaataataattcattgccccagaagaactagccatacagattaacattacaaaaaagaaggcaattggaagttgaggagtagatagagacacatttgacaatatatacctttcatgaaacaaattaaaaaagcgctcaagttacacttacacctaattatgtgtagtgactatagcacccttgtccatgcaacactgaaagataatgtgcattccattttataatattaacatgctatgcgggggagacaggaccagtgtcgtgcaagtatccatacagattgcttttagaggttagagataagtttagaaacaaattttggttgtcggctctgttcagtcgagctatataaagtcagggtgtcagattggtttcctttaa

SEQ ID NO: 20941 - DNA, 10983 bp, Oryza sativa
  unsure (1)..(10983): unsure at all n locations
ttcactttgcatagaaaaccgaatatgctacatttaatactaagtcacaatcaagcttcatggtttcttattttggactacaagaatatttttcacagaaaaaaaaagcattaaaagaagaggaagtaataaaaaaaggattatctcctatactactgttgctcagctgttatggtcctctacttacagataaaaaaaaaacatattgaggaaaaataattcattttataggtaaagggaatatgtcttttcaatcctttcccatgctaggttttgaccaataaattggccatggctggtactatttccaaagctaagacaaggccatttagtaaagtctaatggcaagatggcaacatcaatgatggcacaatccaacaggaggggacattgcacaagtaatcttggagttacagaaaataaaacaccctatacgattgtacccagctggcgagaagttttgcaatacagacacaaaaggagaatcctatagctactcatattggcatgtgaatgaaaacgtctaatggtatatacaactttgaggtttcatggttaaatacacataaactgtgacgaacaggtagtaacatagccattgaacaaaactggcagatattggaagctatcagaaaactgttacttaataaacatgctcagtggtcagccagaatttctgatttcaaaaaaactataggtcattcagaaacaaactcgaaaattaattaattgatttgtagtattcagtcaaaaaattgtgatacgccacaagactcctactgatgggagtaaagtcggtttgattctccaaagagattctctctaacaagactacataagttgtacttaataaattcaaaatcttcacaaaatacattcgcacataaaagcatgagcaacgaatagtaccatatgagcaggctcaacgatcttgtaaccggtccctcccctgaacatggcaaccaaattatctggcaatattccgagccattaacaaaaaagcttgaagcgcctgaaagaattaccggcattccattacctaacctggaaatggattttttacccccgggccccttgtcaacaatgatcacaccatccttctcaccaacggtgcaactctctccttgggccgtttctgagctgaaaccagaattcggcttggcactcatgactatgtttccaatgttgagtccaattctcggcaacttgacaaagctagcagaattcctgacatcaatgctcctaattccaacaaacaagaggttgtgtgttacggcaagaactagcagaagttaactagcatgaaagaaaaagaatgcatgtcatggagacaaagtcttacttaccatgatgtcagtttgtttgtatgggtcgcacttaagggttggaaggggattgagatagtatgcatagaccaccctccaaaggcccaggagcaccactatgtgattcttgttgaaaataggtgatgacagggcagtggcggatgccgaattccacagctgagtatttggagttatgagatgttaattcattgtatggaacgcatagtgttcgctataacagtagcacacatgacgatacaaatagtagcaacctacaacctcttcgtttttttaaaaaacaaagttgtacagtatccatcaccaatcaagaatgattaccactaatggcagaagcaagttaccacaagagcaaggggggacaggacattttcagaatttcaggcgacttcacctatggattggacggtgggggatggatggattcgttgccttgattcactcaccgcctctggagcacaggggtgagtagcctctctcgctctcaaaagctgcggcgcgccccggtttgctcctcccgcgcgctctgagccgtggttggccgtcaaccccaccgcgtccgccgtccgccgccgggggaacgggagaggagtggttgggaggggagacctcgttaggggatgggcgctggatttgttttgccgcagcagccaatggcgagagaatgacgacgttgtccaaccgagtttcagcgaggagggggtcgcgagccgccgactcaggctcgcctcgcgctcgcacggtcgccgccgctgccttctttcgatggggaaaaacgcgaacagtagggagatagggttaccacttctggggtgaaatttgtatattcgtcgccgtttcggtagaatgccaccatcataataggattcaattaaatgccactctcaagccctcgactattcactgcaataccattttacttttttatttggctattcactgcaataccattttacttttttatttggatttctaaattgttttttcctcaatttatttttttcttggacttctatgcccctggctcagtaggttgaaccggagaggaggggtggcgacttgggacctcgccggtggagtaagagaggcgctgccgccttcaccaacttggccgcaccgcctctcccaccgagctgcctctccactcctcgttgtgtcgcgctgcctcttgtggccagtcgagccgcgcgcctttctcgtccttggcgccaccgccgcaaggacggcagtgtacggcatcctcgcccccgtcaaccgggagatgagcgcgtcggtgggctaggagggtgcgccgccacaagatttctccgagggcgcagccagcgcggttagggaaggcggcggagaacgaggtgagcggtgccggcgctgttggggaagacggccgcgcggatggcgagggaggcagcgcgggtgtgcctcggttggggaaggtggtgccgcaggcgtggctgcccctccctttggtcttctctcctctccctcggctagcgcagcggaacagcaacagaacaatggtggtgggcggcgccggtgtctccaccttttctccgctcgcgctcacgcttgcgtgctcgattcaaccaaatgagagagaccaagaagaaaccaagtccgattcaaccagttgacccatgggcataaacgtacaacaaaaattgtaattgaggaaaattaatttcgaaatgtaaaaaaccacgaaagtggcattgcagcgaatgcgcgcagcttgagagtggcgtttgatcaaatcccattttgacggtggcattctaactaagctagtttttatgggtggcagatatgcaaatttctcactcctgggaggggcgtgcacctcacgtgcgcgaggaggagcaaagtgcattcgatctgtccagttatttttcaatgatctggtcaacccaaatacgagtggaatattcgcttttaaaaccaacccaacctgcttagtcttgaaaccaaataactttaaaaatgggatggcctcaacctggacctagttgttaacatcaaattttggtaagccccaaagtcatcatcggtttagaatcactattggcttcagcatcttggaattggccgatgagaattatcaagtcgccaatagtcgcattcttagtagattcggttaaggaaattaatctattaaaggaagtttatccagaagtgaccgagttcaaggaggatgcggcatggtagtttatctattaattaggaagagttttttattttctttttatctttaggaaagtgtgcttagtgtccgataagaactttatgtttttattttatatttaggaaagtttctttcttgtccaataaggactagtatctacccatggatataaatatgtacacctagggtaattataaactacctctcgatcaatagaactactatcggtgcatcaccaccctcttttccgaggtttttacttatcaccggtggaacttggcacctgatgcgggactgcatcggctttcgatcttcggcgaaggggtaagtcctatgttttaccgaccctggtaattgtatcggctacattggtgtggttcaaggctgcatcgcttcgacctctcaaatcactctggttcggttgatatatttgtctgcctatttatcatatatataagttaatctagtttggtagatttacttgtatcggctgggatctgctttagagtttttgccggtatcagctaaattgctttgccagattagattagctaaggtatccacctctcttaaagtcagtaaaaggcttgattgtttagactttatgtttctttgcatacttcgagtttcatcgaccttaatcgtgcttggaactataaaaactaacctgcctttgattgccaataagggtttcatcggggtttcaaccgatgagttatctggatgttgcatcgtcttctaaggattacacaagttggattcagccaatcgcaataaaggtttcattgtttaactaatcatttggatttaatgacatcggacttccaaccgatgtatgctttaaccatcggatcacttattctatcatattatttttagacgattggtttctattgaattatattattgttatattacattatcattagccgactgtgtttatatctttatttactcaagtatcaaaatatacgggatatatagccgacagttcaagactctattgacatcagttggtatcggcatcggctggaactactccatcggcttgtcagccgatcagctctttggtgatcaacatatttgtctattttgtcaattgcaagatcaaactgataggcacgccagcatctcatcaatattttggatatgcactggagctaagcggatctcctaggccattgtgttcgtcgacttagttcgcgctaacacagatctggcaccatcgggcgagcgtggatttttcgtcaatactagcaaaaccctccaaccaacaagtttaggctctctttgtttaggcttataagttactccttccatttcatattataagtcgttttaattttttttttcagtcaagcttcttcaggtttgagcaagtttataagaaaatttagaaacatctaccacatctgattagttttattaaatataatattgaatatattttgataatttaacactctttaaaatgtgttttgattatttgacatcctggcctactttcattcactcagatggtcccacgtatcatcctcacaagtgtcaattagagcaattgggcaataaaaaaaatgttaaattatcaaatatatttcataagagagatgaaagagagggaggggagacagaggataagaaaagagtggaggaagttaaaacgtggaggtggaggagtttggattatattctatgggtggatttttagtccactaacaatagtaggaggctagacatcttttaaaccgagactaaaaataatttttacaccaaccgggactaaaaattataaaatagcgttggacttttcaactgggcctggcgttggacttttagtctcgattcccattcaaaccaagactaacatggtttttgcaccatccatcaaaagatcacttctccgattaatggtcatggattgacgtggatgaaagagagggccaacaatggtgaaagcgtagactccaacgctgcatcagcatcacggaggaaggcagcagcgcggcgcaattagcgcgtgatcgcatgattagtgcgtgccgtaccgtgtaaaaatactcgaagcattcgtcactactgatcagcggcgaatcctttagcagattcttttcttgtagcctgccttttgttttgttatttccttcctgttttgctcagtctcaagctgcatataatgctctcatgcatagtgatataatcagaagcactcctttcactcacccgagccaaccatggcgaggcaaaccaacggcggcggcagcaacaagaaaccttctactgctgccggcggcgatgcctcaccggacaagcaaaatgcgccgcctcccgaggacaagaagccgccgccggacggcactgcaccgtcgcccaccacccctgccaccggcaataataatccataaggatcctccgccgccgccgccgccgcgacagccggcggcggcgaagggcacgctggacgccttcggccgcgacctcaccgcggaggcggcgaacgccgaccccgtggtggggcgcgaggaggagatcgaccgcgtggtctgcatcctctcccgcaagtccaagaacagcgccgtgctcgtcggcgccgcgggcgtcgggaagacggcgatcgccgagggcctcgcgcagcgcatcgcccgtggcgaggtgtccggcgtcctggagggggcgcgcgtggtggagctcaacgtcgcggcgatgatctccggcacctcgtaccgcggcacgttcgaggagcgcatgacgggggtgatcgccgaggcggaggcggaggccgacgcggccgccgggaaggtggtgctgttcgtggacgagatccacatgctcctcggcgccggccgcgtctcgggcggctgcatcgacgcctccnnnnnnnnnnnnnnnnnnnnnnnnaggggccgcgtccggtgcctcggcgccaccacgcacgacgagtaccatcggtacatggtgagggacgccgcgttcgagcgccggttccagaaggtgcacgtcgcggagcccagcgtggacgacaccgtcgccatcctccgccggctcaagccctcgtaccaggaccaccacgcgtggatatccaggacgccgccctcgtcgccgccgccaagctctccggtcgctacatcccaggtgagagaccattgcgtcgcgcttgatcaccaatcaactctgctcacgatgtgtgcttctcagcgaggcacttcccggacaaggcgatcgacctggtcgacgaggcgtgcgcgacggcgaggctgctgatggatcgccggaagaagaagcaggcgcaggcggcggtggcgcccaaggacgaaaacgtcggccccgaccacatcgcacaggtacgacgcacgccggcgcgcgccaccgcatcgacgtcgcgcgccggcgagacactgaccgcggttgatgcgcatgcgtacgtgcaagtggacgggcatcccggtggcgagcctgggggaggacgagaggaagaagctgctcgagctgccgcagctgctgcaccgtcgcgtgatcgggcaggacgaggcggttggcgccgtcgccgaggcggtggtgcggtcgcggtcgggactcggcaacccgaaccagccgtcgggctccttcctcttcctcggcccgaccggcgtcagcaagacggagctcgccaaggccctcgccgagcagctgttcggcaacgccaagctgctcgtccgcatcgacatgtccgagtacgtcaacgccagctccgtcactcgcctcatcggctccgctccagggtatgtctcgtccgttgcatccgtcagtgccattgctgtgagcttgcatgcccaaggctctaatggcggccgccgtgtgtgatcgcgtcgcatgcgtgcaggacgaacgggtacgacaagggcgggcagctgaccgagctggtgcggtgtcggccatacagcgtggtgctgttcgacgaggtggagaaggcggacgccgccgtgttcaacgtcttcctccagatcctcgacgatgggcggctcaccgacgggcagggccgcaccgtcgacttcaccaacaccatcatcatcatgacctccaacctcggcgcgcagcacctcgccgacgccgccgccgccgacgccagccacaaggacgacgccacggaggccgccgccgccgccgccaagcagcgcgtcctcgccgacgtgcagaggcacttccggccggagctcatcagccggctgacggagatggtggtgttccggccgctgtccggcgagcagctgcggaaggtggcgaggctgcagctccgtggcatggccgcgcgcctcgccgagaagggcatcggcctcgacgtcgccaacgcggcgctcgacgtcgtgctggcgcggtcgagcgaccaggtgcgggcgtacggggcgcggccgatcaagcggtgcctggagaaggacgtgatgacgaggatctccaagatggtggtgcaggaggaggcggacgacgactgctacgtcaccgtcgaggcagaccaggggaaggaggagctcgtgttcaccgtcgacaagcaggcagacgcagaagagaacgacgcggcggcggcgtcgtcttcgtcgtcggcggcggggaagaagaggaagcggaggccgccggcgaggtatctcgtcgtgattgacgacgacgaatagtgaatccaatcctgatcgtactgatcgttgggctatgatttctcacaatttggaactgtgcctcaaaattcagatttctgaattctgatcaatcctcaatgttcttttattaccggttgttaaaattccttgcacatccattcatctggtcattcccgcaaaaatattggccattgtcacgaggtgatgcaagtcttgaactcctggtcccatattgtctaagagcatctccagcagaggtcctaaacacgggggtttctcttccgcacatacgcgctaggaaccggagacggcgcgcactttcctaccgctaacagcgcttagagctctctttttttttcctaactgtgtcgttcttttttttaataaaaactagctgggtggcccgcgcaattgcgcggctaacacccaaacaaaatcatatctatttcagtatgattttacttaagatttattaaatagctatccccgtatttctatttatatagtttttaaaagtcacaccagttactaccccttacttctgtcatatgcttctttatttgcttgctcggtctaccacggcatatggaacctctcaactgctccctcgggataggtaggcccatcccccacccccctttcccgagaggcggccggccgcggactgggatcgctcgttccgtgcttgacttacgagctcgtgtagtaaggcctccgccctatctatatctatggatactgaagtgtggccagctaataacattgattcaattggcattgacataataagaataccactatttctattcattctctttgaaacatttaaaatttggatcttatagttttttgagtttattatctcgttgggtttctttttataatttctagaagtcccgtcaaatgctgccattatactcctctacgacccgtccactgtcttttctttttattatcattgggattttataaatcgaacataattatcgtttgggttcattttttactttttataagtcccgccaaaccgtcagcggctttgccattgtactcctttatggcttgcccgctgcctcccttctttattatcattgagattttaaaatcgaacatgattatcattggttttttactttttagaagttccgaacctttaaaggttggaccttgtagtttttagagtgaccttgtagtttttagagtttattgtctcgttgggtttcattttttataatttttagaagtcccgtcaaacgatgccactatacttctctacagcccatctaccgcctatttttcattgtcattgggattctaaaaatcgaacataacaatcattggaattcattttttattttctagaagtcccaccaaccgtcggcggctctgcaactgtactcctatacacgtcgcacgctgtttctcatttttattgtcattaaaattttaaaaatcgaatatgattatcaatggggtttatttttttttactttcagaagtcctggcaactgctttacccatttgcttcacgatctgcctaccgtcccttcttttaatcatcattaggattcgatttggtgctttactaacagtttttatatgtcgtatcaacctccgccactctactcttttataggcatgttacttaatttatctcgtcatggattttagatggtctttttttcaatagtctttatttttatcatcattttttgttatttataaattttattcctaattgaagtattttttttcttttttaatttcagaatttattttttttcaaattttaattaataccgtatagtgttcttttaatatttttattttttattttttgaagtccagttgtttcaaaattgtattcctatttgaaatctcttttagtttttccaattttggatattattttattttttattatgaattttaattaatgtcgtattgggttcttatatattgggttcttatatggactttcaatattgcttattttaaatcccgaatttcagttgattttaaattatattcctacttgaactcttcgtttctttttgctaatttcagatcttatttttatttttattccgaatattaactaatctcatattgggttcttatatggactcttctctcaatattccttatttttaattacaaatttcggtaatttttaaattatattactacttggactctccttttattttctaatttcggattttattttatttttattttgaatttcgattaatcccgtattgggttcttacatggacacttcttttaatattgcttatttttaattccgaatttcagctatttttgaagtgtatttctacttggactctccttttctttttcaccaattaatataggaatttctagcccccacagcgaacgtggtgcctcctttcaaagctgttttaataatataatacatagatagatagatttgccaccatctgttttttattttgtttagttgactgaaacaaactttcaactcagatttatttcagatttggaaacttttcaactaagatttgaaaactctcaagtctagatttgaacacagatttaaaaattttcaagtcaagatttgaatacattgaacttaaatttaaaaattttaaacttagattttaaaactttcaaatatgatttgaaaattttcnaagtcaagaatttgaaaaaaaaaaccccntttttncaaaaaaaaccttttcccggggaaaaaaacctttttccngaaaaaattttttttaaaaacattcaactaaatatttaaaactttcagctcatatttaaaaactttcatctcagattcaaaaacatt

SEQ ID NO: 20942 - DNA, 4092 bp, Oryza sativa
agaaaaaaaatcaggtccaacagaacccctactaaaggccctaaaatagaaaggcctccaaattatctcctcaagcccctaggcttcgggactttctcgctggcccctattccacgcgcaggagagatctcccaccgccgcgcgctgatctctttttcgcgcgaaaaattttgctagcgccgccgctaaagcctctcctccgcatgcgcgccgcctggatcagcgccctcctctccggctagccacctcctttctcgccgcattcttccctggctggcgacttcctcccctgccggccacctccccacccggtggcctcctccctggcgccctcctgaactactggccacctccctgcagggcagcctcctccctggcggctggcgccctccctctcggctgccagcccgcccgacgccctcctccccagtaaaccacctccacgtccggcacccttctcctcggccggcaatagtcgatggtagtttttttttctttttgcaatggatttgtcgatgcaattagataaggcttgttctttgtggagatttagcttgtcggggagataaattggatgtatgtatttagaaatatttggttggagccaattttttggtctttccaaagataagcatgtgaacatttctattcagttcagatattagtagggaaattatataagataggtggttaattgtgcccgaactgatcgtgtgaatgaattggtgagaaagaatctggtggtgggcactttgttgtattttagtgatcataataaaaatcgataatatcacaactcagcagagaatcagtactataactgaaattggcaggggtgatgcttggatcgagctaatatggttttgggcaaagctcctcccctttctattactgaaaaaaatggatagttcttgatgtagatgtactctgtaaatgaatagttcttgatgtactctgtaaattttggctgcgaatcgatgcttttatcactcttttatcgctactaaaattttacatttccatgtatcggctgcttgcagaatgacaagatgaaacccatgacagtgccatactaattgatatcatctgcattgtcaaactttttaacttttttagcatggtgtaactgcctatttgtgtgcattgaaatctctagactacttacattgcaccttttctgcaacagtgcatatgcatgactttaagatactgtgtcagctgaaatcttgtgatcgtattctagaggatatgggtgtattgctgtttaatttcctgagctacacaattttatttgtaccgatgttagttatatgcaggttcttcgagcagactgttacaaaaagtaaaaaaataagctgctttggggtgctatatggttttctttttaatgcaactttgtagagctctagcataacctgttctaaattctaatgattggaaaattttgctaccattatgcattctaccaacatatattagctagtatctaccatttttcctaagattgattggagaagttgtcaatttatctacttattgcagtgactagattgtgatggcaagtgaaagtgattcctttgtgcgcatgatgtctgaagagacccatgttgaagcatattccttgccaatgcaaaatgaagaccttcatacttcaacaaatggtgcaaaaggaagagccaaaagatcaagcaactttaatcgtacggaggacgttcaactgtgcatttcatggcaaagcattagctcggattctattattggcaatgagcaaccaaggaaggcatattggcaaaggattgcagagcactaccatgctaaccgtgattttgagtctgataggaatgcaaactctcttgagcaccgttggggtaacattcagaaggaagtaagaaagtttcagggctgctacgatcaaattgagcgtcgacatccaagtggcataccacatcaggagcttgtaagttaaattgtttattcatttttattaataacaatcttgtatgtatgtcaactaacacttgaattttgctacaggttcttgaagtcgaggcattgtactcatcgaatgcaccaaagaatagggcatttcagtttaatcattgttggctcaagttgaggaattctccgaagtttcaaactctagaatcccacaagaggccaaggtctaggaagtcttcgaccccaattgagatagctggtgaagaagatgaagaaggagatgatgctaggaagagtacaactcctgatttatcacagccaagtgctaaaaagagaccaatcggtaggaagcaagcaaaggagaagttgaagaatggaggagaagatggaccatacaaagaggcgatgaaagtgttagagtttgtgtcgaatatgtgtacgtagtcggttacagtttaggacttggagttgtactaggtgtaggactagagtatgagtcgaactctgtcctaggatctctcataaatagaggggcgtgcctgttgtaaccgcatggcgacttagcatagcgagagggagcggcagccggcggcgaccggccgtgagtcgttgtaactctgatacgctgtaatatgccggatcggggaggagcgcccgtaatcagtgccccggagatgtaggcctcggctgaactccgttatcaaatatcgtgcctcggtgttgtcatcatgtttggatctcctatggcattttcttccgcgtttggtttccgatgtgatttcggggccggttttataacaagtggtatcagaacctgcgggagatccatggtagaggtacgagggaggtggtccactccgcgacgactacacagggtgtccagggacggacatagacgcaaggtggagcacggcgacgatcagcggaatttgatcggtggaatcggacactttaggcggtggtctgaaccgttcgatggctgcaatcaatagggaaatgaccagacgtggtgctcgggttgatggcggcggaagcgattggcgatccaatcggtgggttggacacttcgggcgggtggctcgaactttctggtgagctactttcaacaggaagacgtgaggcttcacgctcggggttgattgaagctggaggcgatcggcgatctcgatcggtgcaatcgaacactctgggcggggtagcccgggtctttcgatgagctgcgttcgacagggagacggctagacgtagcgctcgggtcgttcggtggctgggaagacggcatgtgatttgtcggcttcggctcgcggctagattgatgggtgatcaatcggaggtcggagtggatttgtttgcgacgaactctgggtggcaggaacacggtttggtgtggtcgttgtgtaggtgctgacgggattcgacgcgggccggctccggtgattggaggcggcggctttcgcggggagcagtggtgtcggttgcttcggggagaagcggcggcgaacctccaaggcggaggcggagacggtcctgtgagcgttggttgttcctgaccggcggggagctcgcaggggcgtcggacggaggtgacaatgacttctggcagagtcgacgcgatatccgacggggagtgcgtcggagtgtgggcagggaacgaaagaggattgggatccggttcggagtgaaccgtttccaggtgggcttaatcggcaattaagaaggaaaaaagggattttttttttgggccggttggtgaagcttgatagtattttgtaggagccaatactgctcacgtgttgttagggtactgttcaccaggagcaaagctgaggactattattacaagtcacagtggtgcatgctaaagaaactgaggcggtttgtgcttggcttgtttgcacgtggaggcgtgttaagtcaagtattggctcggtaggatagcagcacaagggtggctcgacatgtctagcagagtgtgagaaattcccgggcaacagtgggtgaaaatcgttgagggcgtcaacgggctgtttggcagtacaggatatatccagaatctgcggggattgcatgatggggatatatgaaatctacgtcactgaaggagaagagcgaacgctatggtgataatttcttcgggtgattcaaggcaacagt

SEQ ID NO: 20943 - DNA, 5597 bp, Oryza sativa
aacttggatggggtagaatttttcccaggacttgcaagcttttatcctaaggacattgaaggctccgatttgataaaacttgagctccaacttgatacatatattgatgatatgagagaggatgatagattaaaaggcctaaacaacattgatgagctctctatattaagcttgttgaaacaaagaagcaaaagctcttgagttttgactagtattgtaatatccttgcgtcaaaaaaagtactgtaatatccaatttatctgaagactttatgtatgtttgaacaatttacatcttcatttaggtaagatttatacttatttgttattttctactacttgtattgaaccatttagagttatataccatattgtttaccacattttatatcgaatcatattgtattgcattcggatttttttttttggctaggcctaccctgggttcaaatcctgggtccgccactgatcctgtgttcatatgtgcatataattttgtatacgatagatacatattagttgaattggatttctttttaagataatagttcaattggatttaagggcatcaccaatgtatattgtaaaagtgatccatatagatgggacccacataaagaaactttaactatagccatctccacaatgtatatagatacaaggtagcattaggatatgagagagaaatagagatagatagtattatttattccatatgggtaatccatatgcttatagatacctttagttattttcttcatatggactagttgtacaatggtagtaggtagctgaatgaagtataatattgactatggactattgactataacttgtttatgtttttactttgtatacaattatataattagaaatataattagaacccgctacgatgtaacaaacaatatatttattttttttcctctgactaaaatgtttagtcttcggagcaaacgtggtggctctaattcagattcatatatccaatcctgatactaattgaaaattaatcaacatgctcctatcttctatggtcccgatctcttctattaccagccatggaggcgtagacgaacaagcgagacgttgaacactaccttttgagactaacattggatcaataattaaaaaagatgaataccccaccgcattgctgtgaaaaattaagttgcataatatatacaaataagatgtaatatgattatcaaaactaaaacaaattgatacaattttgcagcctaaaaataattgagattgcatagttttataagagaaaaggaagagacaatttgaaccatagatctattattcaaaggctagaaataattagagtgatgtggtttaacgagagaagagagtaatagatcaaaactaaaacaaattgatacaattttgagcctaaaaataattgagattgcatggttttatgagaaaagaaataagagataatttgaaccatagatctatcatccaaaggctagaaataattagcgtgatatggcttaatgagagaagagaaaaatactattaactatacttagtggggaagaactatataagtatataggattcctttatttcctgatgagccacctatatatgttttttaagatgaggtgttggatttggaaagaacggaggggaggagaagagtcatggcacttccattagggcaacctcaatgtatgttgccaaacttgatagtagtgtggggccaagagtgagaggtggtagtggtacatgatagagtccacaatgtatctgtgtaagcactagaaaataagctgggaccctcttaaagaaaagcatctattctcagcatcatgttgttggaaatttggtcataattcggtatattttaatccaaaataacaagataataaacatgatatttacaatgggatttgatccagtggtagtggtgaatgtaatcaacatgagcatgcttaacgtagaataagcatcaacaatcacataataacacaatgttgacattgcgatgaacattaacagtaaaacttttaattgaaataatgtaagaaggttataccccaagaatggtcctccgccggagtttggggcagtattgcctccgttggtgttgacgggagcctccttctctttgtctccactgttgccgttgtctccagtgttcgacatgttggtgaaggtgaagtagatgttgacgaacagtgagtagtcgtgccttgtgctccccaaaaacatgatcgcccgcccgtccgtgcaaacgtcgcagcagcgctggtttcggaggcctactctcccaacgcgtatgcacacactcgttgggatgggattaccgtagcagcaatagcattggaaaatggatgaaagtgtgtctctcttctctcgcgggagatcaaatccattatcattttataagaggaatggaagatgaagagtaagagtcatggaataggaagaggaatagagtaactaattctcatcaattagccatcaaccatcctccactacacaaccatcaaccaacaatcaattaggagtaattgatgtaagttaccaacagaataggaagagtaatagagcaactaattgtcatcaactagccatgaaccatcctccactacacaaccatcaaccatccatcaattaggactaattgatataagttaccaattccctaattccctaatcaaatggattaattctcaaaactattcatcccattgatatcccataaaagaatgaatacacatgaattcctagcataatgagccttagaatttatttgatttaattgatttaaatggatcaattacccaattaaatctaacacatgtgaccctatagtactgtatcaaaattatagtttatttcttattaccggcaatagcactatgacctggttgttgttgttgtttatcacttccacaatgcttcttactaggtagtaggggtctttttcatgtttattacctggttttttatacattgtggatgcccttagaagatctcgagaaggcatgtgggaataaaaaaacaagtcatggataactttaaccagaaaaggaatatcatcgataaaaatttcagagttaagctggaaaaaaaggggtttgcaagaattatgacactatattcttttaattttagtcacttttttccatgtgattactctctcttctctatgtataagattttatgtctcccatctcatttttcaaataggtaataaattatttttcatgtccacctaccacaccaccgttgttagggaggaagagatgatagcgcgggtttgagttgggatggaggaggaagcgcgggtgcagatggagaaatcaaagatgaacgaacaagagaaaggggggattgagttacgaatgactaaaacaaaagtatataattcaaaacaaggttatccaaatattcagaaattaatacttatttaagtgttcaaaagttatttggactgatacttcaaatataatacatgctaataggagtacatagctgagaaccttctaatattatatttacaataaatttaatacgcttggcatgttaattatttgtcatcatgataaataaaagaatgttactacacttcctaccaaatctgttcctcaagaacctatttacaatatataataacatgttataacatttattagatacgagaggttatactcatacgaacgcgcgactctgctgtctagtagatttggatggtaaagattttttccccctccaattaacgaggaaattttaaaaatcgtaaaatgttgtgagaacttctagctttatatattctagattaatttaggggctctaataaattcattcgataattaaaaatatatgatacattatattcatgttggactaaaatggccgttttgaggcctggttaatcttagccactattagcatatccaaacttgccttttgcaactgtatcttcattttcatgcgcaaacggtgttctttttaacaaaaaaaaattgtatagaaaagttgcttgaaacactcatattaatctatttttaaatttctttagataatgcttaatttgtcaaacgctaataactcgttgtgttttacatacgcgtgagagaagagatagggacgaacacagccttaaccgcataattgcatttgcatgcatggctgaccagctgaaggggagggtgggggaactgggaaaactaaagctcgggtcatggcattgcctgatctagaagaaaaggatggactgatctggtcaaatataccgtgtcaatagtgttgttcaaagggatggaattgaaacagcgatatgcatgtaattggctctgtgcgaatgtgtgttcataacaaaatatactatatatatatgcgcatggtcaaattcaagtgggtgtaccgagggtaggcataatagacataattataattaaatatagtagttcgatcctcgaaacaacctgacttagggattaggatccggtgcagtcatagtagagactacaagtttagcagttggaatcatttttcatcattagatcaagacaattaacagctgaaacaaatgctacaggtgtattaaacagtaattgctacagtacatgctacaggaactaactttgtacggtcctttgtgaacagtatttaggaaaaatctagggcgttaatttgtaatccaatggtgtcggtaggactgcttaagtcgcagtggctatagccactgcatgtgatcccctttggtcaacacctctccgaaaaaaaaaagttggtaaaaataagttgcttcgtacttcgtaatttcttaagagtgttgatactaggctctgccttagtacatatccacattttgaaataacctaattctagtgtactccatccgtttcatattataaattatttgactttatataaaaaattagaaatatttaaaatatcaaattagttttattaaatctaatattaatatatgtttataatatgtttgttttgtgttgaaaattctaatatacttttctataaacttggccaaatttaaacaagtttgtcaagaaaaaaaagtcaaatgacttataatatgaaacggagggagtagcatatcaacaacagtgttaatcttgagcggtacatgtctaaaccaagattttgtaccaaagtttctcttagaaatacaaactcttcaatcttactcatcgttctagcttcatagccatttttttatctttggtcattaatttttagaaatttatttagtttggcatcatactatttaattatagtatttatgtttttagatttattacgagaaatatctcataatatattaattaaactacatgaatttttaaaaatcaatggtcaaagcgaagtgagtatagctcaactggttaagttctttatggtggaaccagcccacccagatttaagtattagacttaacacatgtactgctcgtattattcagtggtaggcgacgtatccatcgacaatgagatatctgtagtgacttcgttaattttaagatatgtcagcttagtttttcggagaagctcgatgtatgtgtatatttatagaggtgagtgtatacccattataaacgtatgtgttttt

SEQ ID NO: 20944 - DNA, 4974 bp, Oryza sativa
  unsure (1)..(4974): unsure at all n locations
tcagaaaacaaaagattatattattcgaagttacgatagtacggcataatgagaagtcaataggcacacgtatgcatgatattatttacctataaaaagattaatggcatatgatataacaagcactacaaatagataattaatggacatgcaggttgaaattgctgcctgagttaatgaaaccgaagctaaattgtctgcaaatcaaataactaaagtctactgtatagacggtacacaacaacttgcaagcaagaacacccaacttttctccctgaaccaaagcctggataacaggtgcatcttcacttggattcactaggcagtagccactggacgttgagttctctacaaggtcaaaccaaactaatcaaactttggcaccatttctccacaaagtttctacatcaacacttctataattgtcaggtacacccagtcctgttcagcacttgagatatttttccttagaacacattaattagagttggacgccgccccaagtgttgaattctgaaactctgaattaatctaccaggagatgagcacacacaggacctagcttttccctgcatgatgattattcaaagaaaaattccatgattccacattactatcacaccaggaatagttcaactgacaagctgcgcagctggactgaaaccttcagctcatgttcatataaaccattctggtaagtacaagctaatgagagaatacattgtccattaacactagagagaagctagctagtgagataacacagaattcagatatgcagcatatggttaagccagtttgcatattgtgtctacagtgtagcctcctctatggcgttcatcttgcagcagccgttgctgctgccggtgacggcaacggcggggaccagtttgcctactccggctttgccggagtgaaggacctaaccctcgacggcacggccatggtcacaccagatggcctactcgagctgaccaatggcaagccgcaggttaaaggccacgcattccatccgacgccgctgcgcttcgaggagttgtcgtcaccagaaggcggggagaagaaggcagcagtgcggtctttctcggcgtcctttgtgttcggcatcgtcactgcctcccctggtgtcggcggccatggcatcgccctcgtcatcaccccaaccaaggacctctcctccgggctcgccagcacatacctgggattcctcaacagatcaagcaacggcgacaacagaaatcacatcttcgcggttgagcttgataccatccagagccccgaattctccgacatcgacgacaaccacgtcggcatcgacatcaatagccttgtgtcttcaaatgcctctgatgccggctactatgatgacaacaccggtgagttcaagagtctaacactggttagtgggaaagccatgcaagtatgggtggactatgacgacgatgctacacagattgacgtgaggcttgctccggtaggaatcaagaagcccatgaagccattggtctctacgagatccaacctctcaacagtgatcaccgatgaagcatatgtgggcttctcagcgtcgataggcacaatgacctcgcaacactacgtgctcggctggagcttcggtgtgggcacgcaagctccggccattgacatggacaagcttcccaagttacctggcagaagaagcaagaagtcttatccgcccaagaccatggtgatagctctaccaatagtctcggtggtgcttgtgattgtcgttgctgctggtgtttttctactgattaagaggaagtttcagagatatgtcgaactgcgtgaagattgggagcttgagtttggagcacatagactgtcatacaaggatttgcttcaggcaacagaacggttcaagaacaagaacttgcttggaattggagggttcgggagggtgtacaaaggagtgcttcctacttctagttcggaggttgctgtgaagagggtatcacacgactcaaggcaaggaataaaggagtttgttgctgaggtagcaagcattggtcgcctccggcaccgcaacctcgtacaactgcttggttactgtcggctcaaagaagaacttcttttggtctacgactatatgccaaatggtagtctcgacaaatatttgtacagccatgatgacaagcctactctgaattgggctcaaaggttccagattataaaaggtattgcatctggcttgctttatcttcacgaggagtgggagcaaattgttatccatcgggacatcaaaccaagcaatgtgctccttgacaacgacatgaatggacggctaggtgatttcgggctcgcaaggctctacaaccgtgacaccgagctacaaacaacagttgttgcaggtacctttggttatatggcccccgaattagcactaaccgggaaggcatcccctcttaccgacgtgttcgcctttggcgcatttctccttgaggtcaccagtgggcgaaggcctgtcgagcaagacatcgaagggcatcgactcctgctgacggactgggtgtttgagaattgcagcaaggaacagatccttgctgttattgacccaagacttaacggcaacattaacattagtgaagcaagtttagtattgaagttagggctcttgtgctcgcacccaatgtctaatgtaaggccaaccatgcgacaagttgtgcagtacctcaacggagatatgcccctcccagagatgtcaccaatgcgctttactttcagcctgtcagcactcatgcagaaccaagggtttgactcgtcgttgaagagtttaggcacgattagtaatctttcaattgggagatgacaatgcaagatgatgcatttctgttcataagtagaatctgtttcttttcaccacattaggtcagagtttattgtagttattcttagctgaagtgcactctctccagccttgagttgagagatttactaatgtgcctatgcatgtttctttcttgtgacaaagtttatcaattccttgtatataaatgctgtaaggcaccgaactgcctgggctcccctctcatattgagaaccacccgcgtatgatcttgtaaaatctggagttagaggagtttaattttttgtttcttcttaattgagtgaattaatccataagaagtcagaactacaagtatagaggatatgtgcaccatcatgttgcaaacaagacttttggccccagctttgaaacttactagcagcttaactagtacgcagtgatgtgatttcacaatctcctatcctattcccatagcccctgaagtcgccgcttccacgctggtgtagttctcagtgccagcgtgtggagggtgttcagctaattcagttatccgcaaatcgatccaagatgtgagggaataaggttcaaggaactggagtatgagttctatataactctttgatcttgtgggctccctagtcccaacgatgctaatcaagactgacggcaaccggcaaatatatatattacngtcattcctatattacatagtttgtttaaacanaatctaaataattagagggccgagcccgttgaaacattgatatctgtccgtggtggtggaggatggtaagaatctgaggtgtgcccgggtgccgcagagaagatcaacaataaaaccgaaaacaacttcgcctaaacacaaatgcgactacatcgtttatatgacactaaatagaccaacaactaaaattaatccgcatgcaaacatgcttagattacctgttcagctcgtcaagcaatatgaaatgaacccaattgtacttccacctcttctacctgttcaccagcctcttccaccgcaacaattccattaccacaagtagttggggttggtggcacatcacccacggttaaaatagctattcaaatctgacaaacaagcgatgaatctcagtcattcaatcggttttgtaccaaataaataggattaatcggaaacatactgcccaatgtcctacctaacctaacctacctctttgagataccttccgtcgctgattttcagccaccaggaaatcagtaatcgagaaccacagctcgcttgctcagctcctcgataggctccttccaccagctcgaatgctcgatgcgacgcagacaccgagcgcacgcagccgcctcccccaccggccgccgcttgcctccaccgctccacgcgcctggctacccagtcgcagcctccccgcgcttctacggactgtggcgcccgcacccccatatgctggccgcccagcggagccctcatcagccaccccccgctggccgcccggccgccggcgggcggcggcggcggccggtcgccaacaaggcgttgccgttgcgctcgctgctggggttgggctcaatcgcacaaggagttggataaggtggtcaaggaaaaagtacactttgactccttaaagtacgctgaattgattcgtaccctttaaccagagaactagacgattcccgaactattgaaatcagtgcaatttaactctctcgtcgattttcgagggtggttttattgacatggtggtagaactaaaaattatatgtaggacccacccacttgtcattaaaaaaatattgggacgcactgacatgtgggtcccacatgtcagtgggtcccataattttttttattgacaagtgggtctcacatatgtttttttaattctaatgccacctaagcgccacgtggaacaaagaccaggtcaatgccgccacatcagtgccatgtcagcaaaactaccctccaaaaccgctaaaggagtcaaattgcactggttttatctagttttctagttaagagatacgaattagattcggcgtacttaagggacctcaagtagactttatccggtggtcaaagctggtcaacactgccctctgggctgggccctagcctagttctgatacatccgggccatcattttgtctactgaaagggctgcaggaat

SEQ ID NO: 20945 - DNA, 7321 bp, Oryza sativa
tcctgcagccctagggggtgtttggatgggctaaaatttgttagtcctgtgtagatactaatttgcagtaataattttataaatgagactaatccgcgagtcaaattttttaagcctaaatttaatctataattaacaaatgtttactgtaacatcacataggttaatcatatattaattaggctcaattgattcgtctcacaaattagtccaaggttatggaatgtgttttttaattaatttatgtttaatactctaaattagtgtccaaacatccgatgtgacaaggactaaattttagtccctgtgaaccaaacagggcctaagcaagctgtaggccatcgctctctcacgcaaacagctcgcatgtgccagtcgaggggtctgtttattcagattctgagaaggaaaaagtacaccgaaggcaaattacaaaagcatctcctaaccacaaaaccggatacaacgcatcccctaacttacaaaaccaatgcaaactaggtccctcggtgtttttgactctggttttgaccgacgtggcagctgactcagcgttggacccacgtgggtcccacatgtcagcctctacttcccctcctctctccacctctcttcctctctctctcctcctctttccatgtcagcctctctttcccctcctctcccttcctcctctctctcacactcatctccctaggtaggtgttggtaattcttacggtcacagataaaatccgcaagcgcacgatatattaatgtagcacttcccctacagagtattccaagggtatcgaatccaagggaacgtatgtagtcagatcttcctccggttcattcaaggacaccaagcaaaggataggccaggatatagatgatttattggtgagaaacaatgtctgggaaagcttaagtttaatcctaacgtaatacttcaggcactggcaacccgttgttcccagatgtcgctctactacgtacccggacagggaggacttaagtgatctcgatagctatcaccacctctacacctacctcaaacgtactatgggatacgcagcaattattggataataatcacctaaacactacgtctaagcaattaatatctacttaagtgtttataactcactaaagtaattactatattttagtccggtatgctatttaggaactaaccaagagataattctcataagataaatctaaattactcaggaagaatattatattgaaatcagagtaataaacagaataaaatatagtacaatagagcctcttataattcagctcaaccttagaagtgtgtgagggagtgaagctccttatatagaggtaggtatgacggttgtacaacgcgaattgtcagaaatgccccgcaaccgccatcaggagatgatcagaaccgtccacgccaaaccccagcctgaacggctgagattttggttcggctgaacctgggctaggcccacctagcctggccttcggcctatctcctccccttgtcctcctctatctatttctcggagtttttggctgagtctttgatattttgatgaagttcacaacccatccttgtatggatacatgtttctcctcactttagtctagatttcctcccaacttcggggtttaatacctgcatacaaatatacaccaacactcatggaatatgtgagattaaacacctatcactatgtttgatgttttattatctgaactttatgcagatgttggcggtatagaatcggcatttaacagccgccaacaaaaccccccacacttcgctctttacttgtccctgagtaaaggttagcgtagaatgaatttctccaagatataattcaggcatataaatcattcacaaccatacctgcaccttcgaactttatcagtagctacttaccatcttgagtaattgataaatggaacgatcttgattccagtccttcttgcttctcctgtcagactcatgggattttatgaattttcgcaaaccagctcttttcctcatattgacttttatctctcaaggatatatattttcttgtggatgctcaccaagacgaagtgtgctagaactcatctctattctaaggctgatatgtggagctcggtagtgataaattgtgacatacctgcatcatatatattgcaaagccaaaaatatggactcaagaagatcatcagtcatactcctaaatcaagggtctttatttgtggtggaaaaatgggaaagtaaaatattttgtggaatgatggaataaagaaatggttctccttttttcctttactttctcctccaattttcttttcttgcatgaatatggaaggggcatggctatatgcacttttttcatcatgctcaatgttttgagagcaagctttatttctctctttatttctctctcttttcttctatagccatgcctttccctccttttctcattttctttttgccaaggatcttctaggagaagaaaacatagtctaaagtaggagttttattgaatggaatttttgtgggaagctaacttccggtgtagaagcttagcttgattaaatatgtggaaatgaaagtggaaatgaccccttgatcatgagaatatgaaagatgtctatcacgagtcacacacatttgacaaagctcaatataatgtcaagcagtcatatgcatgataaggttcatcaatgatatacttgcatatggccttggtaggtataaaatgaagtcaataggaggaatgagcctttaaaacattttttattttgaaaaacaaattcccataaatcatgacaacagtcgcgataattcctttcatctttaatcatctcacatgtagcaatcacttagatgtataaggttccctaaacatggatggttattcataagtacaagtttagctgagaataatgaatatacaagagtaatcataggaagaatttcattagttggaaattttatttttttcaattatgcttgaaccaattgtttctagaattttcagctctagtactataccatgatggagatatacagataatagacgtgcttacctgctcacctgtaaaaaatgagagggattggggccagcactgcaattttatgcagagttcagtgctttccaggtgttcagaaattcagtaattttcagagtatgtgcacgtcagaagatgggatatctcccccacacttattcgaaacctgaactttcttaaacatgaaacaaaaacaaacttggcatacattggggttaacaccaatgagccacattatttatagcaagtacttgcatgattggaaaataaatgaccaagcaaccactactactttattcatgggagaggagacatccaattagcataatactttttctccttccccatctctatgaatgcacgcttaatcttagtgcacaaaccacgactaagggtatcaaaattgtttctaagctcagtaagctctacccctagttccgcgttgcgatccctaagctctatgttctccttgcggagtttcttcacttgaacggcgagtttatggaccgagggctccggcgattttacttcatcttcttgaaactggccgggtgcccttacaattggagggggcgtcaaatgatgcttcaccttcataggtggagggctaagggactccgctgccccctccttctccgatgtcgtcaaaggccggagcaatccttttccatacccactgccgggagttcgcactcctcgaatgcaaaattgctcctccttggtagtggacggagtggcggtaggtgtggtgtatttgtggagcacctcatcccctgccttggtgaatagggtgcccacataccgctcagtgggaggcggagcggccttctcatcgtgttggaaaatacgtcgcatcttcaagagaccgagctcacccattgtcagccgttgcgtaggtgagtccccccggatttttatcttagtaacatggcgaggggagagggatcgcgctgccgaacggggccgagaagggttcggcctaaccagcgagctcgccggccggctccaaatttgctggggagccgggcaccgtcacaaggggttgtgcccacagtgcgtttacccctttcattgtatagttctccaccgggatcaattgatttgccggtgtcggctctctgtctaggttgtaggtggaattggaggatgaggcaatgtatgggatcaaggatttgccagccattggtgagttaagggtggaaattaaggaatttagttaagatggagagggagtttgcaaaggtggaggagaggaggaagaacaggtgttctgagtttgattcgttcgatctacctccgaaagcgcatcacaacaaactacaaacgagcatgggagaccacagtttgaaaatggtccctcccattgactatgcaatttcccatggccgaaaaacttaaccctggagttgaacatcaacactttgtctcctggcttgaatttcttaatttttatccttttatcataacagcacttcgtcctttctttgtatatcttagtgttgtgatatgccttttcactccattcttcaagttcagcgatttgcattttcctccattctcttgctccttcaaagtccatattccagttcctgatggcccaatatgctctatgctcgagttctacagggagtcggcatgacttcccacagactatctgataggaggacaatccaataggtgtcttgtatgctgtccggtatgcccacagtgcatccagcaatttatccttccatcctgttcccattttgttgaccgtcttctgcagaatattcttgatttgtttgtttgaagtttctgcttgaccgctggtctgtggatgataaggtgtggcgacattgtgcttggctcccatgtcttgtaggaggtctcggaaggttttgtcgatgaagtgcgaacctctgtcacttatgaccatcctaggggtaccaaaccttgggaagatgatctctgtgaacatcttcttggcatgctttgcatccgcggcgctggacggcatagcctcaacccacttggatacatagtcgactgccaccagaatgtactcgcagttgcgggatgtcacgcccggaaaatacctttccgaacgctagtgtattaatccccatcccaagaaaagccggggtacaccacaacaaacttgatacaaaaggcacatctttattaattattacaataatatttacattattacaaaggcacgttaggcctgacaacaaaaaaaaaacagcaacggacttgcgggcctacgactctatcttcacaggcactcaactggggtataagccaggactcaacctaaaactttttcttcaaaaagcttctctgactggaggggaaaagattgagcaagaatgagtacaaccaacatactcagaaagccatgctaggaaatgaattataatgcaaaggggaacaaagagttggcataaaagggttcatttttgcgtaaagccaaagttgcaatattttgatgttttgaaagcatagtttaaactcggtcatatatctaagcaatattatcacggttgcgaaaccacgcaaactgccttaaacccaggttaaccacctatccaaagtgccatgaattccatccatcacttagaagaaaaacactaacttggtacattgctaggcttgcccataaccgagggcgcggctattcgaatagttttactctgatcagtgctgtacatctttacccacaggacacaatacttgacttcatgtcagccatgcatcgtgataccgaaaaggcacctgaaaagtcaagatcatgacaagactatccacctagctcaacccaaaacagaaggacccgctaaggtttcgccgcccgccggtccccgacaaggtaaaggttgccggatcccctgagacgagacatgccccctcttgcgccaggtcaaaatcggcctcccctggccccagacctatcataccaatggcgtttgttttgagatgatctagacttctagtcaggccttatccattagacttgtggttgcactgttatgcttcgcaacataggcccgaagaccggtccttatagtggccgaggtgcttctaacaaaaccatgcacctcgcggcccaccaaaaacagatttagaaagttttgaaagagattccaccatatcatggctcaagtagccacctaatcatcattcttacatattttagttgttacccacagtctaatttataaaaagggattctatgttggatctaagcatagataagcccaacctagagcaactagtaagtccatcacatagggagccatactaatcattttatctttttactaaggttgtcaagagcatgggtagcaattcaacaacatggctatataacaaagaacattggaatattaactattaaataaacaatggtgagcacggaataatttataaaagcggtgcatatagaagtaaaacaacatagtttttgcaataatgggattcaatatgttcaaggaatatggtatgacttgccatgctcaaagagaaggtcttctgatgaattgatctacacttcgggaacttctgaaacgacagcagctacatgaacacaaaacaaggctacaaatctaaggaagagacaataacaatacataaaaacaacaaacacaagttctttaagttataacaaaaattaaacaatttaaatgggtcaattaggagctcgtatggccgagaaatgaccattcgaattttaagtgcaattaaagtagatatttctgagttgtttaattattattgttataccgttaaattatgcgcaatgtaacattgctcgagagagaaaggatcgagcaactggcaaccgggactaccacgtgagctgcacacgtgggcaatccacgcggcgaccacacggggaggacgaggagagggcagcgagggaagaggttctcaccacgggcacgacgcggcaagggaacaacaacggcgaccagcgacgaccttggcgcggcgacgacgaacgaaggagggcgacagagacgaacggatcgacgaagagaggacgactctgacgatcttcaggcttgatgaagaggcggacacgacgggtttggcgctgtggacttgacgacgacgacgacgggcgggacttcatcttgacgagaacgacgaccggaggaaggcgaggcgatggggcgacgttcctggggtcttcgggcagtgaggaggcgcggccgacgatgaagacgatgagatgaagccgccggcgctccggcgacgagggagggctgccggaggacaaggatgaagtcgaggtcaccatt

SEQ ID NO: 20946 - DNA, 18578 bp, Oryza sativa
aagaaggagaagcacaagcatagcaagcatgatcgctatggccaagctcaccttgggatgatcttcggctccgactccgagtcaagctcaagtgatgaagaaggagttgccacgttcgccgtcaagccttcatcaccaccgagattcttcaactactcaagtgatgaggacgctcccatttgcctcatggcaaaggagtctaaggtaccctctcccctcaactcatttaatgttgatcttgttagtgatgaggaggaagatgttgaggatgaggttatggatgacgagttgttcaaatccataaccaaggaatctataccacacttgagtgagttgcttgggagacttgaggaccaatatgcaactcttgagaggcaagaggctttgctcattcgtgagaaaaagcgatctcatgaactcaagagtgagcttgctaaggagagagagaaaaatgaggctttggtacggctctacaagcaaaccaaagagtctcatgctaatcttgaggtggcgaacgctcaacttcaagagagagtggatggcttggacaaagcatacctctctcttgaagaaaagttcgaaaccttaaagaatagtgtctctctccctagtgagccgtcttgttccaaaattgtcccaagcaatgaatcatgtgtgagatgcaaaaatattgatattgaagcttgtgctactaactctatttctttgagtgctttgcaaaagcaaaatgagaagcttatgtgactctttcacaatggcactacttaagtgccatatgggtagtaaggccctaaaggagtacctaggctatcaaagggacaacttcaaccatgagggtcttgggtatgttcctccaccaaaaggaaaggtggacaagagtgtgatgatcaagaggccccaaggtcttagcaattttattaaggccaaaagtatccttcctaatgattatgcttcacattgttcttttgatgcatcttatgttcttaggaagaatgctagtggtcgtgttgttgctaagtatgtaggcccgaggggcaaaaatgtttccattaagagagttctttgggtgcctaaggcacttgtcactaacatgagaggacccaagcaagtgtgggtacctaaaactagaaattgatctcttgtaggaatctctctccggtggaagaagttgggtgattgatagtggatgcacaaatcacatgaccggagaagaatcaatgttttgctcccttgatctaaatggcacttcgcaagagaacatagtctttggggacaatggaaagggaaaagtaatgggattgggtaagattgcaatctccaatgatctttccatttctaacgtccttttggtaaaatctctaaactataatctcttgtccgtttctcaattatgttccatgggctataattgtctttttaccgatgttgatgtgaccgtatttagaagggatgactcctcggtagtctttaagggtgttctcaagggcaagctttatcttgtggatttttcctcaactaaagccaaacatgagacatgcttagtggctaagtccgacatggggtggctttggcatcggaggctagcccatgttggtatgaggaatcttcacaagcttctaaagcacgatcacatccttgtctaacaaatgtactttttgagaaagatagggtgtgtagcgcgtgtcaagccggaaaacaaattggagctcatcacccggtcaagaacgtaatgacaactacaagaccgttggaacttctacacatggacctcttcgggccaattgcttatctaagcattggaggtaacaaatatggtctcgttattgttgatgacttttcacgcttcacgtgggtgttcttcttgcatgacaagagtgagacacaagcaatcttcaagaagtttgcaaaaagagcccaaaatgagttcgacctcaagatcaagaacattcgaagcgacaacggcaaggagttcaagaacatgtgcatcgagagtttccttgatgaagaaggcatcaagcacgagttctcggctccatattcacctcaacaaaatggagtagccgagaggaagaataggactctcatcgagatggcgaggaccatgttggatgagtacaagacatcggactgtttttgggccgaagccgtcaacaccgcatgccacgccattaaccgcctctatcttcaccgccttcttaagaagactcccgatgagcttcttaccggtaacaaaccaaatgtctcttactttcgtgttttcggtagtaagtgcgacattcttaataagaaggctaggtcctcaaagtttgctcctaaagttgatgaggggttcttgcttgggtatgggtcaaatgaatgcgcataccgcgttttcaacaaaacctccaatattgttgagatcgcgcgtgatgtgacatttgacgaaactaatggctctcaagtagagcaagttgactcacatgtgttaggtgaagaggaggaccctagcgaagcaatcaaaagattggctcttggagacgtgcgtcctagggagccacaacaaggggcctcttcctcaacacaagtggagccacctacatcaacccaagccgacaatccctccacttcaagcttggatcaaggtgaagaaggcgagcaagtgccaccctctccgataaatctagctcacccaagaatccaccaaagtatccaacgagatcaccccaccgacaacatcttaggagacatcaacaagggagtatccactcgttctcgtattgcaaatttttgtgagcattactcgtttgtgtcttctattgaacctctaagggtggaagaagctcttaatgatccagattgggtgatggcgatgcaagaggagttgaacaatttcacccagaatgaagtgtggactttggtggagcgacctcggcaaaatgtgattggcacaaagtggatctttcgcaataagcaagatgaggccggggtcgtaataaggaacaaggcgaggttagtggcgcaagggttcacccaaatcgaaggattagattttggtgaaacttttgcgccggtagctagacttgagtcaattcgcatattgcttgcttttgctactaacctcaattttaagctatatcaaatggatgttaaaagcgccttcctcaacgggcccatcaacgagttggtatacgtggagcaaccaccgggcttcgaggatccgaagtatcccaaccacgtgtacaagctccacaaggcactctacgggcttaagcaagcccctagagcttggtatgagtgttttcacaattttcttgtgaaaaacggctttgagatcgggaaagccgattcaactctttttactaaaagacatgataatgatatttttgtgtgccaaatatatgtcgatgacattatatttggttctactaacaagtcttttagtgaagagtttagtaggatgatgaccaaatgttttgagatgtccatgatgggtgaattaaagtttttcctcggccttcaaatcaagcaactcaaggaaggaaccttcatttgccaaacaaagtatttgaaggacatgctcaagaagtttggaatggagaatgcgaagccaatccacactcccatgccatcaaatggccacctcgacctcaacgagcaaggtaaagacgtcgaccaaaaggtataccgttccatcattggctcactcctttacctttgtgcatctaggcccgatattatgcttagtgtgtgcatgtgtgcaagatttcaagccgctccgaaggagtgtcaccttgtggccgtgaagagaattcttagatatttagtgcacacatctaatcttggtctttggtatcctaagggagcgaggtttgatctcatttgttatgctgatgcggattatgccgggtgcaaagtggataggaaaagcacatcgggtacttgccaattcttgggtaggtcccttgtttcttggtcttccaagaagcaaaactccgtcgccctatccaccgccgaagcggaatacatttcggcggggagttgttgtgctcaacttctttggatgaagcaaaccttgagagactatggcctcaatgtgtccaaaatcctactcctatgcgacaatgagagcgccattaagatagccaataatcccgtacaacattcccgaaccaaacatatagatattcgccaccatttcttgagagaccattccacaagaggcgacatagacatccaacatgtgagaaccgacaaacaattggcggatatcttcaccaagcctctagatgaagctaggttttgtgagttgagaagtgaactaaatatcttggattctcggaatgtggcttgatcttttgcatgcatttgttttcaattactagaataagattgcatgccacatcatgacaaagtgatcattcaattcatgaatgaacactagtcataatctaagtggatagcttgaatctatgtgtacggggatatcttgtctcatgataattcactctcctttgatctttggatcatccatttgacttgtggctattgttttgtgtggttgattgtgtgctagccatgaactcaaatggggcctaaatgttcgaccattcctttctctccaactcccatcaaaagtttgtgaaaaattgaatctcttcaaaattcccggtgcaattcccttaaaaaattcatttccaaaagtttgcaaaatgttttcatcaaaattccagcaaaaatcctccctttttggtgcttagatgccaaagggggagaagatctatccttttatttattatggtcgaacatgagtggttcttatttgtatgagacatgtgtgtttcttaagttagtttaatgctttgtaagtcattattgtttaattatgaatgcttgggatgtaatgtgatatatttgtagatgtgatgaatgtgatgagcaaaatgtgatatatttgttgtcttgtgagcttcaatgtggatgcaaagatttagggggagctctctacttgctttaatgcacacttttaggcggatctccaccaaaatcctaatcttttattacttctaagtatgttgtcatcaatcaccaaaaagggggagattgaaagtgcatctaggacccctcatttattttggtgttaatgacaacacaattagatggtaactaatgctttttgttgagatgtatgcaaggatgaaaaaggagtggatgtcaacacaataagtattgcgacatcttttgtggtaattgtcttctaatccatgtatatcttgtgttcttgagtattaggatgtcgtactattaagagggatgccacatgcatataattggtagaacactagtgctcaaaatcatttatttgaagtgttcctgttttatatctgtcggactatccgatgttgatcagactatccgatgctcagactatccgaaatttcacagaactttgctcactgtcttgggtctgagtgttggctaaaaaatatcggactgtccgatataaggtcggactatccgatacgtcggactatctgaaatttctcaaaacttcactctctgttttgaattgctttttattccttttgagtgagttttaaatcagactatccgatgtaatcggagtattcgatgatccagagactccgaaattcaatggaacttgagtctctgtgagaggatgaaattcttggttcaaaaataacggaatatccgatatgacatcggactatccgatcgatcagattgtccgaaattctccagaattttgttctctgtctctggcctgcttgggggtcaaaaacatcggactatccgatgtcatctcggactttccgaggtggcatgaaaagattctctcccaacggccacattttgggggcttctataaataccccccacctaacccttttctagggttacccaactcatttcattctcattcactttgggttgagcttggtgtttaggtgctttggatctttgagctctttctccctctctcaaatccctcctcgttctttgtgtggtggatcttggtggttgtggatttggtgtttgagggcctagtgtgtgtttcactcgatcttgagcactagggtttgactaagagttgtgtggtgtttgttactcttggaggttgaggactcctagacggctaggtgtcactcccgagccaccgatctacgtgtggttggccgggagaagtttgtgaaggctggatctcgcctccgcaaggaaagagataccccttagtggaaggaggagtgcttagtgcaacctcttgaggaaagggttagcaaagacccggctcttagtgagctcctcaacggagagtagaatcccctcaaggatttgaactccaggaacaacttcgtgaacttcatcattggtgatctcccttcatcctccttttagctttgcttaattgtgccgctatagatctagtcgctgtttgtgctttactcttgtttgtgtgatagatctacttgttgtgcttcattggtggatcagacagtctgatccaacatcagactatctgatatttttggatagtctgactgtggatcagactttccgaccttatttcagttttagcttccgtataaagttttaaattagcctattcaccccccctctaggcctatttgaccctttcaagaagttctcttagcagctgccattagaaggagataggttttttaactcatgatgcatacttaatgatgaaccctaagtttcactcgggatactcaaggctgtagttggcccgatctttccgtgagttgaagataactacgatttgggagaaacgttgacgacccgactacaaccgtacgagacgttgttgtgttgcgccttagcgatcgatacacctctccgtgggttgttgatcttgccggtgcagatcaaccttattcttgcaagcaaatcgaagaaacaaacaagaacaagataaaagcaatctaaattgcaaatagcaattgagtacaaatgataagtttggtgttccgtaatgagcaaaacgacgatttaaccgttcacgggattacccggtaaagtagcaaagctaaactttaatctaaacaaaacccaagaaaccctgaaggggaacctaactatttatggagatgggaggacccaaggtcgtcctccacctggttggggcgcaccccacatgggcctcacttgggccggggtcccaaacgaagttacaagcccataggcccattacaggtgatgcatcaccttgttctatcaattgtagctcactgagatggaatttcgcaatgaggatagatccgttggaaggaggactccgagagatttctataaagtactcacgggccgaaaacggagctcgtatgcagatttggcggccgtttgaagtcagcagtgtagcaggtagccgaatcggattccagctcttggaggacttgatccttatatcatcttgtccatccatgatgtgagcaatggttgtatctgtagtagccatggtcacatcatcctccccttcttcacggaaaaccgttctcggtttttccgtatggtgctcgtcacataggccctgtttgattcagcttaggattattataatttggattattaggagtaagctgaaacaaacagatagcttattacgatagattattacaatctataagctagattactataatatggtaatccactctaaaggtgctttttctagattattgggtggctaacagctaacatacaactaataatccaaagaaacaaacagttaacagcttattccatgtcggtttattataatctaacttatagtaatctggcttaataatctagattacaataatcttaagctgaaacaaacagggccatagtctattcaaaataacttgtttcatccaatcaaaactagagaaactcgaagttgtgtgattagcaataacatgtttctctaaatccgaacaaatgaaaactctatgcaccaaatatattcctctatcattatatacgccaaagatatgaaaaatagcattagttggacatggaaaatcatacttagcaaataatttatcctccaaattattgagctcacaaaaatcatcaaactgaacatagccaaaagtatttaaagaagttatcaatttatgttcctcaacatcattagcaatgtgaacaacatgcttaaaatcagcacacaatgaaacactagaaatagcatgttcattcactagttgtggcagtgatataagtgaagcattatcacacaactcttctttatcacagggaacaacaagtaaatcaacttgtgacaaaggcaaatcagaagtagtttccaccaaaatttgctctagattagtatggatagtggtcaaatgtgactcatcaaaagcacaccaccttgagtaataacagcaccatttaatttaccttctatgccctcttcagataatgtaggtgcatcagtcttctcttcttccttcgtgagcgatggagatggcatctcgatcatattgctcttctcctcatggtgaatgttctgagctccctgcaaaatgtcagtaataggaggcacaagcatagattgtttctcccttgggttctttaaaatattgctctcaacactacaagcaagcatgaacaagtggcctatatgattatatgtcacgttaataagcccagtctgaatatcagaattaagccctctaaaaaatctagtcattgtgctctcattgctttcttttaaaccactataagtggtacaaattttaaagtcatgaaagtactcccacacggctttatcaccttgttttagatgttctaatttctcaaggagagtacgtttataatatgaaaacacaaaatttttcctcatcattgttttgcattcatcccaagtttcaagcttattgccaaaagtataccaccaaaaagatgcagaaccggtacacttattactagcagccttaatcatttgagcattagagaaatcatactcatcaaattgtttgtctactgctagctcccaattaccataagcggcggaatcataattaccatcaaaaacaggcaaattagattctacccttgcaagatcattatcatgtaccttatatgcaaagagagaagaagacgatatatctcattgatggtgaagaagtagatgttgagcatgaccatctcgtttccccttgcacaatcctgccatggttagtagcaaacaagaaacatacacaagaatatgcatgctcctatcaactactaggtagtggcagctgaaatatcacacacactcaatcttttcaccaagctcttacaagttcttaccaaagcaagcggaatagtgacatacaccgactcaaccaagcaccccaatggagtttggatgtatcgatgccttggcaaacacttgctgtttggttgcaatcagatctgtggagctctaggtaggtttaaatatgtagcaaagaaaagcaatggttcaaatcagataatgcaaagttgaataattgttcaaagtcaagtactgtgctggtcctaggctagaacgtactaaagatgcgagcctagacacgaacgataccacaagatagcactagaactaactcaagcacactctgatatatgaaagtaatctcaaagatacaactgattcttctcttttccttcttttttttcctttcttttctttttcttttatttttttggtgcggcttttcttttctttttttatgcacctttctgcctttttttctcttccttccgtttttttgattttttttatcaaaaccgacaaaaggacctcaatgcaagattatagggactcaaatataaatatgaaaatttatagggactcaactgtaaaagtccaaacccaaaattagaactatacaaaaatgaaatgctctcgtcccataggttccgttttgcaaacagatctccaatccgacactctaaaaatttttaccaagctgtctagcatctcacagtatgcattgaaaccgacagggagggagtcggatagatgggaaaccgactgtctcggctgaaagtttggatatctcgcatgaaaggaaacaaaaatcaatctcaacagaaaccgatctaatctaatctaccaaacagacgcccccttccctttttttttcacgcgcaacagcacggccacgggacctggcagaacaacacgccatacaacataaaacctacacgcaactccaaaaccgaccaacaaaaacttgtgaaaactacaaaaatagaaccgtgacggaaagacgattccgttttcgtaggtcccgacaacaacaagcacgcgacgactgtggtataaaatgtgaccagaactcgaaactctaaacgcactagacgctatgaccagcaacacgacatgacgatgcaacacaaaactcaacaacgcaaaaatagaaaagaacaatgcaatggcacaaatatggctaggtacaggatgcaattttttttgtagggcaatttttctcgatataggtaaataaaaaaaaactcaccgagcaacgaaagctttgataccacctgatgaaccctgagttccactcgggacactcaaggctgttgttggcccgatctttcggtgagttgaagttaactacgatttgggagaaacgttgacgacctgactacaaccgtacgagacgttgttgtgttgcgccttagcgatcggtacacctctccgtgggttgttgatcttgccagtgcagatcaaccttattcctgcaagcaaatcgaagaaacatgcaagaacaagataaaagcaatctaaattgcaaataggaattgagtacaaatgataagtttggggttctataacgagcaaaccggcgatctaaccgatcacgggattacccggcaaagtagcaaagctaaactttaatctaaacaaaacccaagaaaccctgaaggggaatctaactatttatggagatgggtggacccgaggtcgtcctccacctagttggggtgcaccccacatgggctccacttgggccggggtcccaaacgaagttacaagcccataggcccattataggtgacgcaacaccttgttctatcaattgcggctcactgagatggagtttcgcaatgaggctggatccgttggaaaaatgactccgagagctttccatgaagtactcacgggtcgaaaacagagctcgtatgcagatttggcggccgtttgaagtcagcagtgtagcaggtggccaaatcggattctagcacttggaggacttgatctttatatcatcttgttcatccattatgtgagcaatggttgtatctgtagtagtcatggtcacatcacttatctttgtcctagattttctttttgaagttgtgtataagcactaatactgagatgtgcacctctgcatcagcataccagagacatgagtgaaatcaatggagtcagaaggtattttgaaatatttgattgagaagacatgcttgagcatcataaggtttatctttatttttcccccaaatgttgcattatatcctcaaagaaaacggtgttatacatgcaaatattgatgatggtattaattaatcatggcttgcatttgacaaacatgaggctaaaaatagttagtactttctggttatgtaaagtccttttccaagagttcaattcttttatccatgaggaataagtattatcatattaatgtgctttatcaaggtggtttgtactagggtcacaagctttaagacttgaaatgctatgttttttttttgcctccatccttttttgtctacacatattctacagagtgcaactagatcaaatcagacttaattatctccaaactccaatagaactgaacaatatgtctatcatgtgatatattgttgatctttgcaacattctgtttaactaatgtgaaattgttaactactttcctcagttgatggcgtataactcttgtccacatctcttccaggtaaaacgcattattcttccccttggtcttggaggtgatgatcaatatgattattattggaattaccttgtgtacattgtttctacttgtgcagaactttttttacattgatatctttaaactttgacactttttttacagtataaaagcaaatactttggttctttaactaaagaaggaacttctatggcctagaaaattcgcaccgtgttgaagataataaatcggcagtactaactccctacacaactgttgtccacaaacctcaatatagagttgtattgatcaaaccagagaaagccatgcatattactagatcttttggtctcaacatggtcatgatgtatgttgccggggaacggtaattgatcatttccgaacccagttcatcctcgtatctctttttcactttttattctacctttacccctgctacccagagaagtattcctgtcaaactcttctcgactatggagcaacctctcttggagctatccgctctaggggcgaattttatgagccatctccttcatcggagccaatttatacaactggctatgaaattcgccccgaactcatcagtatgattagagaaaatcttttttctagctttgatctagaaaatccctaccatcatctgtgagactttgagcaagtctgttcatgccttaagatttgtggtatgagacaagaaactatatggtggaaattgtttctgttctcccttcaagagagagcgaagcaatggtacacctctaccattggatgtgtaaatggtagttgggaaaagttacgagtcagattctgccttgccttcttcccagttactcgtatagctgcccttcgagtagagatccttagtttccagcaaatcaaaaatgaatcaatcagtgcaacctcgtcgagattcactaatttagtgcagtccggaccaaccttgtccatacccgaatatgtactcttgcaacatttccatacgggtttggataaggaatctgcattctatctggacataaccatcggaggatcattcatgcacaaaacaccatcggaaggaaaagtaattttagatcgcattctagaaaatactcccttcatggcacaatctgatgaaccccagctagaggcatccgtgtccaagatagaggaaccttcagcaattgagtcacaatctgagccttccacttccactgacttgattgatgagaaagttcctgagcagccatccgttgagaatgaagaaattcagactccggctcgtgccacaactctgttcagggacggttttgacgaagattatggcaactccctgaactatttcagtaaaaagaaaccactcgtccccttaacgcctactgatcctatggaacttgggttcctcagggaaactgtttgggagctaacatccataatgagcaacgaatggctaagagaggcagagctttcatccgaagtaatttggataaatacccctcccgaatcattccttgccatctggaagggaacgatgttggtattctttacagtccaactgtcggggttaatctcatctctgagtcatttgcattcgcttatttgagcgataaggcagtaaccccgataaacaaattcttcaagcacccgaacggaaatattattgaaggatttaggattatacaagatgtgcctatctgctttgaagatagggaggcagtcttggatttccacgtctttgaaattcaagattttgacattctaatcgggcttctcattgagcaactcctaataaacacgccccggttagatagcctcaagataactttgggagggaatgaattctcagtctcattctcgcgggcaaggttcgccttgaacgactctctcccagagattgagtcagcggaggaggttacagcagttccccctcacgagtctcccaagtcccttttggaagatgaagtccctgacttcatcaaggaagaagcggaaccccgagagactctcgatcttccaatcttggaaccactacctcgacctccgcatgagcttaaacctctacctcaaggcatacgctatgctttcttacacaatgacagagaagcccttgtcataatcagtgacaagctctccgaagacgagactcgacgtcttctgactatgttagaaaagcatcgcgctgttcttggctattcccttcaagatcttagagggattaatcccgcgctttgcacccatcgtatcactattgaccccgagagtaccccctccagggaacctcaacgacggctcaataatgcgatgcgagaagttgtaaagaaagaggtcctgaaactcctgcatgccaggattatttattccataccatacagtgagtgggttagtccggtccaggttgtgccaaagaagggaggaatgacggtcgttgcaaatgctcaaaatgaacttattccgcaacgaaccgtaactggatggagaatgtgcatagattacaggaaacttaacaaggctacaaaaaggatcattttccgctaccctttgtggggacacccaataaagtcatggtgcacccacgaatacgtaactgcccaggatattcagttacgcatgaaatgatataaaagcataaacttcgattatacaatacttaagtcacttagttcacaacacaacataaatacaaaccattacatatatggcctataaagccttatttctacaaacagataaactgctagacttcaccacaggaactgcctgagcgtaggatgacctagtagaaaccatagctgtcccactctaacgggtcaacaggatcttcacaagcatcttcctcctcatgatctgaacccatttatgagtacaaaaggtactcaacaagacattcttatgataataaatacaataattgcaatataaaacatgtagtatcgagagctggaaggtttaaaccctaaccttaacaattatttcatagagcctaacttaataaacatttgatataaacaacactattgaacatttaatttaaacaataataatgagcataaaaatatatatgttacttataaataacttgaatagaacatcaagtaataaataagttaaccatattaattaatagccattttgtttaacttgtgcccataatctggaatcacccatagacacatctccattaaccgggagcacggtgtattcgaatactcaacgactctgcagcgtctacccagctttacccacacgatacccacagctggccaggctgaaaagtaacaaggtgtaatattgctccatatatctctctcccttctgcctagtaagttaaaaggatgctcgggatgttgctcagagtgatccggtccgaggtgtgtgccaacctacctccgcatccacttaccattgttcgttactcgatgagcagcccagaacttcatgggcccatagggcaattctgaactctcggggcccatcgagcccacatatataaatcatataaacatgaaccatgtcactttgcttcacacacttgaaagctaatggccaggacactgaaaggcctgcagaagtttaatcaattggagcaatatacgactaggttcgataactcgatcgtgtggatgggcgaaactatatcattcttattgacacaaggggttgattattatatcaattttaaataagaaataaccataaatatatccatatatccatcacgaccataaacaggtccataaaaccaaacacatgaactctatcgtgtgtaccacccgctcacatgcggtgtcaacaattcttagcatatagccataaatagttccataagcatgtttcatatgcagtaataatatccatattaaatcgatagcatgctaaataattaccaatttgtttaagtgttcctcaaattttatcctaagttggttagactccaaggctcattaaggtgtttataacaacaacagaaaatatagtgcaataatagtaatataattaatttaaaagaattcgtgcagtctatcgtactccaaaggacgagtacgctaccaaaataactctctctatctactgggattaaattgttcaagggagggtgcatgtcttgcaaccttcggactcgatgtagtcgtacaaaccgtctcctcctggcacggagatttcactcgcttcgactatcggaccaacattggcgttttctatttacgcaacaatcatcaccacaataaataacaaaaaaacaaagataaccaaaaacaaatagtatcctaaagtgcaacaatgggtgaaaaggatttaaagaaataattttagggatttttggaatttcggtgaacggtgaaccctatggctaaaattagggtcacaacaacggatactcggattgcaacgaaactaacacggatggattcggaataattctaggagtttggaataggtatcagatttcgattttgaggtcaaacagatgatcaacctgatagaataagaaaaaggatttttctgatttatttttcaacaggaaaataggatttcctgtccttctcgttctctgcacaggagccggtcggcaactccctgacgccggcagtggagatgccggttttgggcaagggggcgccggttttgtgatctagaagccaaggcgattccgtttttgtggtcggcggtgagagaagtgccggtggcgaggctggcggcggcgagcagaaacgggaggcggaggcggccatggcggcagcgactccggcgaactccggggagggcggtggcctggtgagcatcagtaaggcgaggggagtctaggggtggcggcaacttaggctgaggcgtcttggagctgcggcgcaccatgtggccggcggcggccgaacagagcagtggcgacgggaggcggcgccggcgatgttccgacaacggattggatgatgatagagaggggaaagggagtattcagcatggcgaatccaattttaccttcaatttcagaagatttgcgttgtatgcgacgaattttggagctcaatcaatttcagaagatttttccttcggtgatgacgattgagttaacgggagtaggggcggatttgaggaggtgaaagaggttgaaattgcacttcttttgcctctggtcttgagccttctagttgagagacgaaggaaatacgaaggcgggaagctggaggtgttatccggggattcgtccgtcgatcggcctcgtgtgtgtgcgtgcgagcgtgtgggatgcgcgggctggcacgagctgggcgcgagcgcgcgcaagcgcggcgcaatgtggcacgggattggcgcgaggcagcacgagctggctcggcctagccgaatagaggaagaaagaaaaggaaaaacagagaaaggaagaagaaagagaaaaacagagaaaaagggaaaaagaaaagaaaaataatagagaaaaggaaaatttggggaaacttaaaatagatagaatttgaattgatgtcatatttagatggtgcgatatttgggatagatttaaatcggattcaaaggaattatttgagggatgatatgcactttgcgacaaaaattaaacgagaaaagaaacaccggaaacaaacttggaaaataatattttaaataaatgtctaactcgacggttatatttttagagaaccaaagcaaactaattcggttttaaaaagttgtcaaattttagggctgttacacccttcattgatgaaatgttggaacgactggcaaatcattcctttttctgtttccttgatgggtattcctggtatcatcaaatttctatccatccggaggaccaaagtaaggctacattcacatgtccgtacagtacctatgcgtatcgtaggatgtccttcgcactgtgcaacgctcctgcatcccttcaaaggtgtatgatgtctattttcttggacatgatcgaggacattatggaagtcttcatggatgatttctctgtctacggaaataccttcggtcattgtctgcagaatttaaacaaagtcttacaacgataccaagagaaggatcttgtacttaattgggaaaagtgccatttcatggtctatgaagggatagttcttggtcatcgagtgtccgaacgatgaatcaaagttgatcgtgccaaaatcgatgtaatagattagcttcctcctcctatgaacattaaggggatccgcagtttcttgggacatgccggcttttatagaaggttcatcaaggacttctctacaatcacccgacctctgaccaacctcttagctaaggatgctccctttgagtttgatgacgcgtgcctaaaatcctttgaaattctcaaaaaggcactcgtctctgctccaatcattcaacctcccgattggactctgcccttcgagattatgtgtgatgcaagcgatttcgatgttggtgtggtcctgggccaaatcaaggacaaaaagtatcatgcaatctgctacactagcaaaactctaaccggagctcagttgaattatgcaactactaaaaaaaatgctcgcggttgtttttgctatcgataagtttagatcttacttggtgggagctaaggtgatagtttatactgatcatgttgttctaaagtacctgctcactaagaaagatgctaaaccacgtctcttaagatggatt

SEQ ID NO: 20947 - DNA, 514 bp, Oryza sativa
gtggccattatggtgcattccgcacccatgccaagatttgacaatgtggttttttctagccaacaatgtacgaagattcaaaagaatttgtcagaagatgcccaaactgctagaggcaaggaggaatcactgcttgcgatgcaatgcccctcacatacaacctgcaagttgagatattcgatgtttggggtattgacttcatgggacctttccctaagtcccgtgtcacgccctgataaatccatcccaaattaaaaatcattctctaaaagaaataatataattaattaaaattcaaagttaaattggcaaacattaaaatgcgtacaagaaaaaaaatcgaatgtggcttggagtatttcttaaatcctccatgctctaaattggtgcctcaatttttactcgaattttcagagcacaggaaacaattttaaagcaacaacaaccaatttcagcgttaattaaaaatgagaaaactaaaaataattctctcttctctttgggccattttcag

SEQ ID NO: 20948 - DNA, 2246 bp, Oryza sativa
ggaaagcattatccgcctattctttgtgtctgtggtagattgctccgtggaggatctgtcgatctgtcatattcagttcaagaacgttgggaatgatatgctctcaatatcctccatatggtctattgacaagaggttccaaactgtaaacctgattacttgagcttatcttggaatctctagaagattatgtggaatgatccacatttccaaatatgcacgagcagttttgcaggttctaaaatttactaattgtttctccaagatggatctgttgaaaaggaggatggaatttgaagatggcctattcttaggtgccagagaataccctgctaatattttatcttatgcttgattgatctatgccatatttcctgaagctatgttgtcatggctatggccgtaaggccgtgtatcaaaaccagccaaaataatagtttggctccatctcggggtgactgccttgcatgttacagtggttatcatccacaatgttacaatggagccgattgtgccatccaaacatgtctgaaatttcagtacatgttttcatgtgtcatgtacaactatgaacagtgataaaagatttatcttagctctatacagaactacaaagaaaatatgtagtaatgtttctctcttccttctgagtcccagtatttcggttgtctgatggatttagaaatcgatatttagacatgcactgcacccatagtttccaagaagcacaaacatgaagaagctagtaccaccaatcggatgggttcatttacaatctcaatcaactaatttgtctgaaccacaaatcttgctctgattatcatgttctatgaaagtttaacatcaataatctacatacacagtgaacaaatgtctgcgacggacatacatcactgaacaatctatactatagtcaactacatgaacatgttttaacacaaacaaattgcatgttcagagactcggtgtaaaagaaaaatggaacctatcaggctaacacactactaaaaaaacagagttagacaacaggggccagctagctgaatgcatgtcgatcatctcccacttgagaagctacttagttggcttatgctcgccatggacgataacgacttagagatggcatatgaatcaagacctcggctttgcgccatggataacatgctgaagctcgtgtgagacgggacgagctcagggaatggtaactgaccatcgaggtactgcatgacttgtcgcatgctcggccttaaatcgggcaatggatgcgagcacaaaagccctagcttcaacactaaactcgcctcatcagtgttatactcaccttcaagtcttggatctaccatatccatgggtagtgtctccctgtccaaatgcgcagatatgagatcaaccaacatgtgtatgcctccttcagtgtctcgctccacaggtttccgtccagtggtaacttcaagaaggaatacaccaaacgcgaacacgtcggttagaggggatgcctttccggttcgagttatctcaggagctagataacctaaggtacccgcaataattgttgtttgcatatcgctgccatggttatacagcttagcgagaccaaagtcacctaacctagcattcatctcgctatcaagtagcacattgcttgctttgatgtctctatggactacaacttgctcccattcctcatgaagatagtataaaccagacgcaatgcccttgataattagaaacctctgagcccaactgaggacgggcatgttgttgtgaccatataaatatttgtcgagactcccatttggcatgtagtcgtaaaccaaaagtaattcatttttaagtcggcagtagccaagcaactgcacaatattccggtgccggaggcgaccaatactgacaacctcggcaacgaactctttcattccctgtctcgattcatgtgacaccctcttcaccgcgacctccaaacgagattttggtaatactcccttgtacaccctcccaaaccctccaacaccgagcaagttcttgttcttgaacctttccgtggctcgacgcaaatccttgtaggggatccgatgcggcccaaactcaacctcccaatcctcacgcaattcaccgtggttgtaccgtttccgcacaagtataacacaggaaaccataaacagcaggagaaccacagagagtatgggtagagctatcaccattgtcttggactgatcagaccgggtcctccttttgggcatcttggg

SEQ ID NO: 20949 - DNA, 5418 bp, Oryza sativa
ggtcctgggtgtcggcggtgacgatgccgaacacgaaagaggacgagaaggaccggaccgccttctcgttcccggtgccgttcgtctttgtcgacggcgtgcggcggagcctcaccggcggcgggtagaacgcgtggcccgtctgctggaccgtgccgttggtgagcttgaggaggccgttcggcgtgatcctggccgcgccgtagagggtcaggttgacgccggcgaagccgttgtacaggaactggccgtcgtcggcgagtccggcgacggccgcaaggcggaggaggagagcgaggcaccacgacacgtactttgttccggtcatgtctgcggcgcggcgcggcgacacgtacgtacttttgttactgtttgatcaatgcaaatgatctactatactgtttatactgtttcagctcaattgtggttcatatcaacgcgtacgttgaattccgaagtcttttgaatttgcctagtcaatctccctactcatatttggtttgaaaaaaaaagaagagaaaaattgagccttgcattcatagcgtgatgaggacgtgtgacttaacgagtgacagaattaacatgatggagatgttcgaaacggtctagtagcttgtatttaactgttcatcttggaccaggctctctcggttattatagtttgattgatatatggctttaatttgggttgttcatggtagcagtagccgacaaagctgatagggaaattcgtggagaaaatggaggcaaattgctttcaatgattcagtgccagtaaagcgaaggtcagctggctctgtgttttgccatggatgtaagcaaaaggtatatacggcgtacgtatatttctgtggacacaatggttacgatgaaatagaacctactgttgcgtcaaaaaatagaacctactgatgccaatctagaaattttgaaagaaatacgggttggtgcatgacctgatcggtatggcatttgagatttatggggatgtgactaattaggatgcatgaacccagacttggagggggcgttatagttttaaaagaaattgttttggacgaaatttttgccaaatttctcgtcataaggaatctggtaacggaaaagttcaactttttttctcttgtcttcaaactctgctcacaatctaatttttcatcctaatatgaaaaaactagttagttatagattgagcacagttctaattgaaatctcaaactgacttcaatatctggtaggagtaattcttacgcacttacacagaagatgaacatatgcttacatgagctgatgagcacacacccatgagtgcaccctcttaacacatcactaagttcctattaaaagtacataattgtgttcttatgacctgggtgaagtcatgtatccatgactccactgcaccactagtgctttcgctagattataaaaaattaaccttaaacatgtctaataaattatcatcctcttttaatttatttgcttaattttgaaattattgtatatggttgaccttcttttctgaactaataattgcttctctaaattgtcaataagttaagaagttaatcatggctctaaaacaatattaagtcaataaattttaatcatggctctaaaacaatattaagtcaataaatttaggctattcatttaatactaacgttgggttgaaatttgaaaatgacaggacactcagactccttacacaccacaaagtttcaatcattattaattattaagttgaacagatgtggtgtagtgataattattgagttgatttaccagcaatgcgactgttttgtaaacgtccattaaattttggatatacctcgttcggcagatatcattggaacaacaaaataattaattacaaatccaaaattcaaatccttcaatcaaattgactaattatatatgtttaattatttctttacttgtcgagcattgcgactattttgtttctagaacacgcaggagatctacgttgcgagtattctacctatcctatgaattggagcgcttgagacaggcaccttaacagcctgccgatggcgtcacaaggcaaaatcaagttatcatctaaagtgccgctcaccaaaaactaagagactcgaatatttttaattccctcgtccgacgattaaattatgagtgaataaaatgaaaccctctctatcagatgttgtaatgttgaatctcaattagcaatagttttagcaagtgattaaatttagctcgatggaatagaaaagcacagacattaattaggtgccactaatagaattttcctaaccaagtaaccaatcaacatagatgcaggcagcatcatgcagcagcaagctagcagcaacacactaggaaggcatcatgcatcagcaacactaaaaaaacaccagcagaaactcagttggatcttgcatagatgctgttgggacatcaagccatgcaactagaaaaaggaaaatccctagaacaatacatccatggggaggtgggggtcccggccggtggctagctgggcagccagcccaccgtgccgtatggggccctccgcctctgaacaaaccaaacatattattgccagtaggaataagtctacttggtctccctcaactcatgcacctagttgaatcgcatccctcaactataaaaccgggtataacccatcctacaactcacaaaaccgttccaaatctactccttggacggtttgggaggcggttttgtcctacgtgccgtctttgactccgttgactagccgagttagcacgcgagccccacatgtcagtgtaaggtatggtcggtgaaaactcatcgagggaagaggaggcaaccactgccatgcggtctacgccgcccacgcccaacgccctcacctcacctcctcttccacccaccggccgccaccatcaacctggctgacggagatgccctcgactaggaccccaaggccaccaacgccgccatcaacccagctgccgaccccaacaccatcaacaccgccatcaacctggccgccgcaaggtcggaggaggagagcgcggggatgaggtggggaggaaggagaggaggcggctgaggaggggcacgggaggggaggcggcggtggtgaggtcggaggagatgccgccactccgccgttcctgttgtcttgaactgtgctgacaccaacaccatcaacaccgccatcaacacgatgagaagggaggagaggaggcggggatgaggagttggtggcgaggagaggtggttcgccgagttcccgtcgccccaccgctccagccgtcctgctactccctccgctcccgtcgtcctgctactccctccgccccaccgctctctccatcttgctcgccgctgagtacaaagactgaggagttgagtaactaccacgtggacccaaaatttctttttatttttatttaggtttgtttttattttagtgccaagtaagcgccacgtcgatgtcgcatgggataaagaccaagtcaacttgccacgtaagtgccacgtaggacgaaaccgcctccaaaaccaccaggggagtcaatttgcaatggttttggaagttaggggacaggttatacctggttttgcggtcgaggggtgcgattcaaccatacgcatgaggtggagggaggcaaagtagacttattccttgccaatactaccttaccaaattatagtaattctataagttttcactttgaaaaattctataaatgctggtaaggttttaaactaaacacatccagcgtcgaaaaaattttgtaataacaaaatgtaccaaaatcgttaaattttagtagagttgaaagtggctataaaatgaacaagcccttaattcaattcagttttgtccgatttgatcaatccaattgagatattagcctaagtcataaattcatgacttttttattgggtttctcatgttgactagtaatgctaatgtttatctataggtttgctatcacaacttataaaatgcacagagaatcaaaatcgagttaaattatataatgaaaacagcagcaaagtatcaaatctactgttcattataatattcgaaggtttacagtttttttaaatgttatatcatagtggtcaacacatccctattgtgtggtttagcccagggacaccacaaaaacatggccttggggaaagacactccataaccgtggatatttgccgatgaacaccatgccatctaaatgaaacttgtcgtgctgacgtggcggtcggtagcccggttttttacgcggtcggaccgaaatgcccctacgccttatcctcatattgcagtttaggatcgaatcgccaccaccaccggcggtagaaccctagctcccgaaacaccaccagtccgccgcctcgctgctggctgtgcccaggcattttcgccgccggaatgcaaggttgacctacggtgatggcttcactatcgcaggaggtggtggaatctgtggtggcggcaacgccggcgacgccaaaatggatgcccaaaggataagtatttttcctctctttgattcgttttccccctctttgattcgtttgggatgcatggtttgttggatctgatttgggggcctgtttttctcctcatttgccgtcgcattgtaggatggatccgaactatgcatgcagagttgtggttagggttgttgcttatgttgagtatatggataacggtagccaagattatcatgtttctagtacacataagtgggtagtagataaagacagtatgcttgatagatttgatgaaggacttggatgatgaaatcatccgtggtagtgcgcaggagcttacaatgactttctaggacaagagagcgggtagggatgtagaaatttcttctgatgttgtgttgttagaggcatttaaccaatactgggatgttaagaagcttccattgcaagtgacagtgagtgaggatatcatgccttgtacccaaattgtgttttgtgtggatgatgaagctgacacaatggttccactgagtatggttttacccacgcaagcaagtcaggctgataatgtacctaccagagatgctaccataaaaaaggtgcccaccaaaaaaagtagcatgtccagggacaaagctacagatcaatcaatgccaaatccagatccatggggtgagtttgatgaggttgagtatgtgggagttagtgatgagatggagaattacaatgagctggtgtcagatgatgaggctaatgatccagattatactcctgatgatgatgatggtgatgaagagaatgctgatccagtagatgatttagaaatcaatgataataggggttgtgagcctctaattcatataactgatgtagacaatccaaggatagaaattggtgttacttttgaggatggactttgttttaagaggtgtataagat

SEQ ID NO: 20950 - DNA, 1003 bp, Oryza sativa
taatgagaagcatagattcagtaggatgtttgttgctttgaagccttgtatagatggatttttgaatgggtgcaggccatatctaggcattgattcaactgtgttaataggcaagtgaagatgacagttggcttcagctattggtatagatggccacaattggatgttcccaatggcctatgctgtttttgaatctgaaacaaagtaaaactggaaatgattcatggtttgtctaaataaggcaattggatctcccaaggcctagtactgtctactaatgcaggcaagggcatagatgctgcagtgacaagggtgttcaacaatggagtagagcatagagagtgcatgaggcatttgtacaataattttcagaaaaggttccatggagaagtatttgaaagaaatctatggccagcttcaagagcatataggaaagatgtttttgacaggcatttcaatatcatgaaggaggcttccccaagatcaatgcaatggattgaagagaatcaccagcatttgtgggcaaggtctaccttctccacatctaagtgtgactatgtcacaaacaacattgcagagacatttaacagttggattaggctagagaagtcactacctgtagttgagctacttgacaaaattaggcagatgatcatggagaggatgtgtacaaggcacaaactatctctcaagctgcaaggcaatatcctgggaaatgtaatgaagcaactccatgacaaaagtaggaatctcaactacaatcgccacaagagtctgccatttgtaggtgaagtcagtggtgcaaacatggacttgacaacatggagacacacagtggacttgaccaaacaggaatgtagctgcaaggaatggcagctaacaggcctcccatgtagacatgacatctctttcattagatccctgagagaagtggatctagaaaactatgtcagcccctactattcagtggccatgttcaggattgcctactccacaattgtgc

SEQ ID NO: 20951 - DNA, 6208 bp, Oryza sativa
ggagaaaaccacacaatagggatatcctataacaaaattttccatagtttaattatattccctttgtccataaatattttatgggattttagctatatgcatacatttgtcgatggagggagtacaaacttgtgtcaaaaaaacagctcctctcttgtctagtactttgtccacaaaatttgtagttatctggaatctacctttagagacgctcctgtttgaaaaaaaaaacactttttcgacagtgtaattttatggtaagacatgcttgcaggttgcagagtcgccgccatctgctgcagctagacaacaacattgtaggagatcgtggccgcgattacacaggtggcataaaacaaaatgctcgaccttaactccataaaacagtaagaccagctgaataatttacatgatgaaacaagtaatgggaatcaatgcaacgccaacattgcatccagtcaatgatacaacagattgtataaacaaagtgctcggccctcagaatccatgctacatcgcctacttacatcgcagctagtcacactacccaaaaacaaaatgagactagaaccaactgaaccaaagctaggattaaacagtagtcgtgggatccacgagagctttccatgtacaaatctggcaaaggaactgtagctctatatagaggcacctgctttgatgaacgtactgaataatatggaaggtccagctaggttgccgaaatagaaaccttgccatcacaggtgaggtcgtgtcgtgttcgtgtgttcttctaaactagggtcgagttgggtggtgtgattccttgtgataagtagtatgccttctcggcatcggccagcctcgtttgaaatatctcccattctttcctacagcgtgctcttacctgagacaaaacgtaccatcgtaagaggaatttatgtgctgtacagagttcatgcgttgggaatatctacaacatttaaaactgcagattacataaggatatgtatttgcttaccccttcccatggtgcttttccattctctgcgttgccctgcaaggtaaagtagtgcaagatcaggttacacagtttcactgagcaaaatgaaggacagtacactaaatagttggctaggggctaacctggtttccaagtgatggcacagcttgatgaacaatccattgagcatcgacgactccaatcttctcatgagcaggctgattaatttcatgtaaaacagaagtgtttaagctcagtgatccatggatgatttggaatagcattcgaagtggaaaatgatatgaaggcggagcacaaaaataattgctgatgatagacttcaaaatttaggtgaattaatgttgttaatcagactaagaacagaagctctgaacttctctcattgctattcggggttcaggagaagtggtttcccactatccaaccacaaaaacaaaaatccaatatatgtagcttcttcccaagaatcccaacccccaccccatttcatggcccactccagccaccccagaatataatcaacccataaagtcagcatcatttttcctaggtcacttcataggaaaagaacaaacaaagagtacctccacacatttccttagagcgaaatcaagaccccatccatggaccaagtcattctgcagaagacagtgtgtaagaataccactgttataaacaatgttaaagttgaacatgtagtgccactccacctgaatcatatgccagacacagcgccatgcatccctagagaacacggttgccatgatttcaacaaatctgcacatcaaattgaatgtaatacagatatttgggcaaagaaatttaaatacacaataaaattctgggcccttagccccttacgctgcacatggtggcagatggggatcagtgcaccagcctggcctctcctcagtaactctgttgaagaaaaaagttactcaagaatcttatataggtggccaacgattaatcattgaataaaaccatatggattcagcggctcacttgtgaacttcttgatcacctcgccgttttgtcatttgccatgtcagtcccttgtcaggttgcaaaccaggctgagagatatctagcccatgcttcctaacaagttcaatatacctgaaaaagagtacaaacataatcgcacccaagtggaacacaaggtcaacagataaaggaacaaaaatgcagttcttacttctctgcattgaaatgctcaacacctaggtcctcatcccagatgaatatgtagtcatatcgggcaacaacatcaggatgcaaaaaccgctttgcataccaccttaggtaaaacaacaagtacatacagtattaagacttcacagcaaaaattcaaatggattcagcacagataacatattaataataacaataacctttacctaccacttagtctgcttcctgacactcacatggatagctcttttagaccactcaaattcatcccattcagtagtccggccatcataatggaatagcatgatagtgaatttatctgaaaactatatgaaaagcttctatgaattcagaagcaataattgcatatttacattaagaaaaagtgactaccagttcaccggaatgcaagattaactgtttatctgttacagggtatagttgattgatgcaccaaatttaagcaatgcaagatgtccgtctcagttacctttttgacagcagcatcaatattagccttctgtgtaattccaactgtaaaagtaacaaggtaccgtggttcgctactcaggtcctgacagtacgaccatatgtttcagattgtatatcatagaagaaaaatgatatagaaaccatctaattcaatgccctactgagcaaagttacaacaaaagaaaccacaaacctcactaggatcaccccacaatctccgtggaaaaagatctgtttcagaaacaacaatgcctggtgggagcctttcagcacctttagggtttgtgggaacataaatctgcagaaagaattgcatgtgactttaaaacaaaataaacaataggaaatgtggtctatgaccagtaaccaactacttttcagttaattactagttgagaagagtcccttgtagtacactaatatcgacaattcaagattcaatcatcgattatcataattttataagatgcaacagaaaacttttaatatagacagaaaaccctgatatcgtccttcatgtaatctttcagcctagaacttcacacattatgcatgagaaacacaggagtggtattaacagaccccacatatcaaaatgtagtccccaacccaactagaatattgcccaactcaactaatacaaacaaccttaaaaagtattagaagtattgatgtgaacgtaccttaggaacttcttcagaggttgaatcggaattgtttttgttatgacgatttgcagatgcccacgcatgatttaacaatgtctgggttgtgatgccagagttcctatcttctatataggagataatactggaagggaagtgaagctgcgaaatgcagtaatgtagaaagtaaagattattttcctaaacaaaatacatgatgagaaaaaacaagagaagcaaacgatctacttcaccttggttatatttactgtagggaaggaaaccccaaacaagtatcccaacataacaccaacaactgccgagaatatgagcctcatcccctcatttgatcttggcgtgctgttgatgatgaatgttcacaattaaattacaatgtgcaaccatgagcaccgtagaaagaaaaagaacacttggttggtgttactagacaagtgggcaacagataaattatcaatcagcgctagaaacggaaaagaaacagttaagaataaacagtagctgcagtatcaaacctacctacggccaatgctattagcaggttttgccatatgaactgcgaatcttcccctctttcttttctactacagttgctgccgaagaaacctgtagagctgcagctgtcgattcacaaaccacagtcacaacgaagcaagataacaacaaatcagtgcttcccaaatagcataagttggttcaaaattcaaacacaatagaaacagctccctaaaatttgaactaatcgttactagtagacaacccgctacaacaagctcattcgagatgcggaccgatgaatctctccccccaagtcgacaatcgccgaccattctcgggaacgcgaaacgcgaccactaaatcactaatctaccgcaacccagcagccgcccccgcacgaaattggacgcggtcccgcgagctagatttgaaattgaccgcgtcgtcgcagcctctacctacgcgcacacagcaaatcgaaccgccccaccccccccccccccccaaacaaaagcttgagaaatcgtaccgacggaaagcgaatcagccgcacacccggacagatctcccccgcagcagcagcaggtcggcaccggcggcggcgcagtacggcggcggggacgaagccgaatcggggggagagacggcgcgcagatgagacgatgattgggagagaggagagattggaggacagcgatggaattgggggggagacggggatgggatttgtatcgcgatgagcagctaggatctggttgtcccacacatgcgccccaatcattcgccgccgcgagaacctctcctccctctctctcctctctctctctctggctaagtaagcgatctgctctcctctcgtctcgcagcttgaaagagtcgagaggagagagggaggtcggcggtcactggcaggtggggtccacctcgagtccaccctgcgctgtcctgtgctgttgtctctctcgcttggtttggtttggtttgcccctgaatgaaaattaaaaagaagaaaagaaaaggagagagagagagaggaatacttgggggaagatgtctgtttgactagcggtaatcttctggttggttagaaggttaggattaggaaagttcctggggctgaacgcagatttgtatgtactatcctgtcctaaaataagtgcagccataaatatacgtgctgagcgttttaatcatccatcttatttaaaaaaattataaaaaatatttaaaaaatagtcacacataaaatactattcatgttttatcatctaataacaataaaaatactaatcataattttttttcaaataagacgaacggtcaaacgttagacatgaacaatgctaaaactgcacttattttggaacggaggaagtactgcgtacatgctcctttgggtatgggtagagaagggacgtgtattatgaaaccgtgtgcagtcgacttgtgtttattgatcttttcaaagtagtactacatcctctagatagggatatttgtcactctaaaaagaataatagggtaatttgttttataaaaaatcacttggtaagctaaacagcacaaccaattttaacactgctcttcatacatctctcgaccgttcgattgaacgacccatgccacttctaacttgtccacacatattgtatttatttcttcacgcggatgcacacggagaaggatggcattagagcaatcacaatataaaaaactagtcatgattttcatatcctccccattacgccgccggctgctcgtcttcctcacagcctctcgtcttcagctctctctgtcaagatctgaggtaagtgcaaagatggtattcctcttccctttctcacctccttcgattttttttggtaggatattggttactctctgactaaggtggtagtgggacaccaaatttatatatgcacatatggctatgtgatggttaatgtgtagtggacaccatattattgttgcatgatctctgcctcatgttaaatttcatccttctgcacttgttttccatgctgcaatgacatgagttaaattgtccttctgcacttgttttattcttgttccttgttcatccatttgtaccgacaaatgcaaacttggtcaaactatttgcaactggtcatttctgatgaatagtgcaaatgtgaaggatgcacgtgatgaatggtgctgatttgtgatgcataaataagaacatattttgtacacttgttcatattttttagggtcacctgggaagaagctagatatgatgaacactgctcctctgttttattcataagaacagatgtaagcatggaagcttttatttatgactgcatatatgatg

SEQ ID NO: 20952 - DNA, 9004 bp, Oryza sativa
aaaaatattttttaaatgatggtctaaaacaaaatattaataataaaaaagtgaggccgaaagtaaaatttactctttcttttactatatattcccaagagcttccacttcccacctatagtattcaaagtaaaaaaaaaaacttcttacgtgctggtcaaccaatccatatagagaggagcgcgagatattgatatagtaaaaaaattactagcacgctaggccaaatgcgctacgtgactagatgacacttagtgtgctgtatttgtctgtatatacttcatatacattcgtataaactttatatatgcatacaaatatatgtatagagaactaaggggccctaattaaccgtgcgcagtggctcaacattgaatttaggtggtgcacaggaaccccttaaactcataattccacacttaaaaacactaaaatatacagttttgcatagaatatttttatattttcagtggtactacaccactcttgttttgacgctagctccgctctaactgcgcatgcgcagatgcagccccgtgcgactggtcactggtgatcacccattagcaccaccacctctggttgccctatattacttgttctttttattatctttaatgtttgcctcgagataatgatgttaacagactcttttttaaaaatattccttcagcagataattatgcaatttaagtactatttccatgattttttcctgagctttttacattttccttttaaatttgaagtcagatgaaatttatcaaaacataccgccggttacccttaacggacccccacggtaattgaggtaaccagccagcggtattgcaaaccctcttgatacatccatctctcgaccgttagatcaacattgaacgactcacgccacctcacacacattgcgcttctttcctcacacgggtgcgccgctgcacggagggtggaattaggtgggactactaactacaaggaccgcatcacaagacaacacggcatgcattaatctcctctacgaaatgtaagtcctttaacattttgtgcaagcttcaagaaagtagcttaaatgactaaggtgtgtacgaatggacaatctggttggtattttcagagaacagaaaacgaaaaaaaaatcatcagcgcttagttaaataagtattaattattataaacttaaaaaaaaagtttacttgattctttttgaatttttttttcgaaaaaacaaactgtttagcaacttggaaaatgtgctaacaaaaaataaaaattataattacaaaaggagcttaattgacccttttcccgattatgcgcagaacatgcacacgcacctcatttatagacccatggacccacaaatgtatctcttaatacaaactcaaagagacctaacttgactaaattcttactatatatatatccacttgtatttattatactgtgttgcaaaagatcacacatttatttggcatgagtgaacataactgaaagaatgcataggtattctagaatgacttatatgtaaaaggcattcatttaagtgtaaaaaatgaaatgacaaatgattttgcattaaaaagaacaatatttgatgcagagacctgttcttatctacactttactaacttctctattccttgtttcatgtgcacgcttttcaaactgttaaatagttttttttaaaaaagaaaatctatagaaagattgcttttaaaaaaacatattaatcctttttattttttagttaatactaaattagtaaagtgctaatgatccactttgttatacgtgtgagaggaaaattgtgttcccattcgtgcaccttcaaatagaaccctagttgggcacttgggcaaaaacgctatgctatctggcttgctcttaaggcaatgctttttttttttcttatcaaatggagctacttgttcgcttactgtgaacaaactttctaaaatatttaacatggtatatttttttttgcaaaatatagatatttctttagaaaatcaaataattttatttttcaagtttacagtagctaatttttaattaatcatacattaattatcttgattattttgcgggtggcttctaaacttacatcgtttgtccaaaaaaaaatgaaactgttgcacaacggtctaaaatgaatttagacaagaggtggagtccagattcatagtaatagaaaatattgtatctcatataaattttgtttattttaggacggagagagtaagctaaataatttttttaaacttctttaatttttagttttaagaataaactttcttatacttatttttaatatctgaacattttgatcagactgtcgtggcaaaataatactgccacactgatctaaatagcatgtcaacgttatttagtcatgctggtctggtgggcgtggcagcgttgtcctaccacgccaccgtggctaatgtggtcggacacaaaattgtcacgttgtgggtggcgtgacagtgtcacgccagacatcctagcatgcataaaagattcggatttggaaaataagttttagaagtatttttttaaaaaatttaaaagttttttaaaaaaactccaagccacaatctccctatcgaacggggctcctatttcccggtacgcgaccagctcataaattagctcacaggcaccatttctttggaagaagaaaattgcacccaactcatcatggtcattgactgttcttgaggttgggccagaaatctactttgattgggctcagcccaagttcaagctaacttggctcctataccaagcagtagggatggcaatgggccaggtcaggcttagtccaagcaagctgaactcgaggcctcgagcttactctgtagctcgcgactcgtgagtgaaagtgtgaaacgtgctcaacctgagcttggctcacgagcaactcattgcctcatttgacagtcaactcatcaatttggaatgaagacgaaccataggagtatgtttcatgtttatggtccgtataatgcactaaccattaagtgtaagatactaatgattttgtcttctagttatctggtctagtcagagttaaataccgtagagcccctacaatacttctttattgggtagcatcattttattccaaaattgtgccttcgttagcagttaatttttcactaggagacagtggcgtattgactgttacaatcactcctaccagttccttttaataaatcagatacatatttctcttgagttaataatattccattagaaatctttgttacctctgtaccaagaaaatagtgcagatctccaagatccttaagtgctaactctttctggagatactgcaataaggctggtactgcatcctttcttaaacttacaataattatatcatcaacataaatgagcagaaacatggttaagtctgctttgttataaaagaataacgatgtatctgccttagatcctctaaaaccaagatcatataacttacttcttagtctggagtactaggccctaggtgcttgcttcaaatcacataaatttttatccagtttgcaaacataatcgggattagaagaattttcataacttggtggctgcttcatatagacttcttcttcaagaactccatgaagaaaggcattctgtatatcaagttgtcttagactccatccccttttgagactgcaacagacaagataattctgatagcagatgccttaacaataggactaaatgtttcctcatagtctatgccatagtgttgcttaaatccctttgcaactagacgtgctttacatctatctaggctaccatcttgtttcctcttaatttaataaacccatttacagtcaataatattcgtgcccttctgaggaggaactaaataccaagttttatttttgaataatgccatatattctgcatccagtgcatctttccagtttttattgctcaaagcttcctgtaaattttgtggctcaccagttgagattgaaaggccccattttactgtaccatcagtgtagaccttctcctttctgattccacacacttgtgcgaggacgaggaggaccatcatcatcatcatcatcatcatcattattctgagctgatgatggatcttctgtggtgctcatcagctcgtgtgaccagaagatcctgacgtggaatctaccgcagcagagtgagacgatgacatgaatgcgccaacgccagactggggtcccgaggacgctgaagaacgtgtgggtgaagacgtggcagcatgcgattgctcgggcggtgaagtcggagctgacggcacggaagaagtaggcgaatgcaacgacaccgatcccgaggacagcatcacggcagacgaggcagattcggtcgccgttcccgcatgttgttgtgaaccactgtcctcattgtcatatgtggctaaatcatcatgtatttgctgtaaaacttcaggattttcatcaaaactttcaggagaattaatcacatgacaacgctgttgttgacccagggatactagtgatgatgcatcgggaagaagattaattttggcgcggagacgtgcactagcatttggatgtaatttggcaaaaggaaatttgttttcatcaaatactacatcgcgagagatataaactctcccagtagaggaatcaaggcacttgaaccctttgtgaaagatgctataaccaaggaacgtgaattctttggaacgaaattggagtttgtgtttattataaggacgtaaatttggcgaacaagagcaaccaaagatacgaagggctgtatagttaggttatttggtaaaaagtttttccaatggagatatgtcatcgagaactctactaggggtgcgattaatcaaatagagtgcagaaagaaaagcttcatctagttaggttatttggtaaaaagtttttccaatggagatatgtcatcgagaactctactaggggtgcgattaatcaaatagagtgcagaaagaaaagcttcatcccaaaattttagtggcataaaagaatgagctaataaagaaagacacacttcaactatgtgacggtgctttctttcagcagacccattctgttggtgagtatgtggacaggaaatatgatgggtggtaccagctttttgaaaaggagtgaagtttttgatattccccaccccagtaagtttgaatggctataattttcctatcaaaaagtctttcaactagttgttgaaaatcatgaaacttctaaaagacatcagacttatacttaagcaaatatatccatgtaaatttgctattatcatcaatgaaactcacataatatttaaaaccaccaacagattgtggagcagcaccccaaacatcagaaaaaattagttccaaaggatatttaggctcactagaagacctaggaaaatgtaattgatgactttttgctcattgacatgcatcacatacaacaattttattggacacatctagacaagacaacttatgacttttaatgaccttttctacgacagtgtaggaagaatgaccaagatgactatgccacctctcgaaggatggcgtgaagactttatttggtgttggcttggcgatgcaggaggaagagcatatagtcctttatgacatcgacccctaagcagagttctcttcgtggctagttccttatacagaaaaatttacgatataattctatgaaggcaaaattatcacaagtaagacgataagctgaaacaagatttttgtttgccttgggagcatagagaacattatcctatatacctatacaaatcatccccactactaggaattctctgcatcttagtgcttccacgccatccttttttctctatccgttggtttctaatcaaacgatcaggatcactgccgcatcacacatccactcgcttctcctcctgccgctgctcgcgcttcacctccgtgggacctccaggcaaagcgctcgcttctcctcccccatcggctgcgcatgccatcagcgggcccgccagctcagctgcgttcgcttctcctcgccccacggcgctgcctcccccattccctgcacgctccagccgcattgcgccgcttctcctcccctcacgcaaggacgagctctttaatttccgctaacagtcacacacttatttactttgcctcttcctcttcccatgttcatgtgcatgtgcatgtgaaagatgcacatgccgatgccggtgattgctgctatataatgacatgctcggtgttgttgctcgctcgctaaatgtctccgtctctctctcaccaattctgattttcatagattaatcgctctaattaatttccttgcagttttgcttgaggttctatttgactttcataatacattcccattatcctttccttttgtctccagtatgtatttgaattaatattttaattattctcttaatttttcgcatgataacataaatttcataattgtttagtgccctgtgttgttgaataatatttgaagccgttttcattttatatgctattagaaacccttttttcattgttggttacacttcttatgatgttgtattttcagctgatctttttagcattagcataatatggttattcctatgtccagcaactttaaaaaggtttttgatactctgtattgttctgtattgtacaggaaacaagaaaggtgggagctttcttcattgaaccactgcacaaataattcctttgacggtacgccattaaaatcctcttttccccttgatcatgtctaccactgtagactgactaagttgttttgcattaattttagtagcggttgctgcaaccttggaattatcttaacttaatagtgagacaagaaaaggaagtgagttgaattgcatatgtttttcaataatttgaactgtgagtttgaaagttcaacacattatgcatattcggttgtgatgttatatttattggagtctctactcctatctgatgttatatttattggagtctcggctcctatctttattcttttattcttttatttgattgaatagaataaaatgaagggtgtaatatcctaactatttctttttttatacttaaaacggtaggagatttgccggatatattagaacgagaaaagaagtagtaaaccagagccttacatatctctattaaaaagaaaaaaaaacatctagggaatatatgaggatttatttacataaaaaaagagagtgactgattgaaggatcatgaaacagacagatccttgattgttctattaggctaatattttccttcgctagaaaagcgacttggaattcattcttcaacaattgttggaaaattcttctattgtgtaccagccatatgttccaccacattgtcaacaaagcacacaatatcctttttttaggtatgaaattacaggagctcactccaccaatctgtgatggtttggatcgcttgctgttgtggggcttggaagttcatccaattgggctttatcctaactatttctacatttatattgtaaacttcatctataggaatgtgctatttgacttaacatgtcactgtggcctgtgggccatgtgatatttcattttaggttgtctggcagcgccgacccaactttcactatgctgtactgtatttttcaagtaaacactacacaaataatttttattcatttgttttaaataagccgacatctcgagtgacaactaaaagtaccgcagcaacgcgcggggtgtattctagtttagatagagattgcgactaggggtcttaacaacagaattgccaatgtgactaattttcatacctgcttcgcttgctgtgtgaatttggtcattgccatggtacttgtcatgcactgttagcttctccaactcgccagtggcgtgatccgttgcaccggtgtcgaggtaccaattggtatctacaccgtatgaaatagcagaacttgcaaacctttcatctagaacaaagttttcatcataacggaaccaacaatcctttactgtatgtcctctcttgtagcagagttggcacttgggcctattgtcgacacctcctggattgccgcgggcaccgctagggttcccacgacctcttccgccgcggttgccgttgccgacgttgttgctgccgccgcgggtacggttgttgctgccgccaccaattgtgttgtgtgactgtcctcggttggctgaggcttgtccttcttctccacgacacagcagtagcctgtgctcaaagcttagaagctgaaaaaaggcctcactgacggtgacttgatctggacgcccgacgatagattggatcacatgttcataatcctcttcgagactggcgatgatgtagctgatgagttcgtcgttgtcgacgaacttgccggagaccacgagctcgtctgccagcgcccgcatcttgccgacgtagttcgccaccgtcatgtctcctttcttcagggtagtgagggagaggcgtgtgttgattcactgcgcccttgttatcgaggagaacatcccctcaatcatgctccatgctgtcgctgccgtggtgcacgcagccaattggatgagcatgtctcttgtcatggaggataggaggtaggagaggacttcctgatcaacagcaattcattcctcataatcggggttgctgacgacgacctccgcatcgccttccttcctcctgatggtggcggccggaacccttgtcgctccggtgaggtgcccttccagcttggcacccctcacagccgctaaaacctgcgccttccatatggcgtggttcgattttcctaacttctccaagaaaaattggccgaccagaggattcccggtatgggtcttcgaggaacttgccacggtgcggctgggagaatggattagattagatctcgctctgataccatgtagaaaaatgacgtgggaagcgttgaacccttctcagggccgcatctctattgatataggtgagaatagccctcgcagtggcgcatacatcgcg

SEQ ID NO: 20953 - DNA, 10575 bp, Oryza sativa
cccccccatcccaatagttctgtcttttgcaatcaagcaaaggaaacgatcgaccacattttgttgggctgccatgagtcccgctagctttggtggctggtattgcaagcatgcacgccgttgggcagccaccattttttccgttacccgatggtgagcaagcagcaagaaagaaagtgaggccaagcaatattgttatcaccctggacatgcggaagcggaacgagcgcaacaactgcgtcttccatcagtagtcacgttcctggaccaaagtgatgcgcgtggccacttacgaggtagcgctcgtgaagcgctttctggccttggtgaatgtgttaatatggtcactcttttgatgccgtgggaaatagccttctgtacccccatccttttccttttttcctttgattctcttttttgtcttttggttttgggttagctttgtgaaattgtgaggcacattactcctgaatcttaatataaacatacacatgacgcatgataaaaaaaaagctacatagattaaacaaaacatgatgcacatgcagatatggatttgttcatgttgagaactacttcctccgtcctaaaatataagtatttttagaatagttccaaatcaaaatctttgtaactttgactattaatagcgaacaaataaaaaagatcaattgcgtaaattgatgttaatagatttatcatcaaataaactatcataatatgcaaaaaattttatttaaaacatattacttttataaatattattgatcaatgtatcatttcaaaaactgtgtcgaaatctaaaaatacatgtattttaggactgagggagtagctggtatgattaattaggagcgagtggattagctgtcagattggtttgttccttcgtagagctagtagcatcaatgtcaattaacaattacagttcataaagctaaatgccactaaagtcaggatgcttgtagattagagcaggtaaaatagcaggctataagccagctgtaaacatattttaagcagataaataaggagagagaagagcagcgggctacagatttatagccagctgtagcacggactccaagacgcagtgtgtatatgacaggtgggaccagatattaatagtgtagtatgtaactattgtatgaataagctattagattggttataaatgaattggagctagtagttggctatactattaaacttgctcttatacatcagctcataaagctacagttcattccccgaaaaaaaaaagctacagttcatgatgctgtctcaggtttcatgcacctttgttatcatgtagctaatgatcttagaagacacatatcgttctcggttttttgttttcattgggtaataaaatggagctaggtacaacgcatcatgctcttattttacaaatgtgcaggcatggtctttagcagcaggaatatgatacttggcttggcgcacaccggggtgggttaggcccgcaatgcagagggatgagaaggagaagaacaggatggatccgataataagagaaaataaaaaaaaacaaagaaagggaatggaaagaagagaaaggtataatctttttgcaattacaagaaagacgcaaatgcacacacctacacataagggtgtaagtggggcgggttgtgccgccaacccattgggtacacatgctcacaccacgaatatgcccggtgtctctgtaacacatgctcgaagggaagaggccaaccgcaaatctcttaccttactgaaaatttatctatttaaagcacatacacatgcgtatgcttaatatttgtcacctctgggatttgaacatggtttagaaaaggaaaaaaaatccaaatgccctactaaactaactttggatgaaagtttgtttatcgccctgaaatttgaaacggatattcaaccacccaaatttttacttatgtaaccctcagattgtttcgcagaatggtttttatctaattgtatataagttcgatgagtttgatcacgtggcctacacattggacatatctatgaaaatctccactaaaatatttctttttccctttattagttctcagttacgaacaagtacaatcataatagtagtatggtaataattgtgtaaggataaattgatgacttactaccgatgatatgttaatatgttatattaattattcaaaattattcgtttaagcttccaaaatatgcaaaactaccattaagaactccttagggggtaatatagattatattgcaaagtttagggggttggatgttaaagtttaggatgttaaactgacttattcaaagtttaagagggtatttggacctttttctgtaaagaaaggttggataatttaacagtttcatattaacactgaagtgggaaagaatatcaccaaagactgtcatacatgacgggtcaaaaatggttttttttctcgtgtaagaagaagagatttggcaaagattgtgaggaaaccaggtcaaaaatattacaactacacgattaattgaaagggaaccgggaaaaaaatcccccgaagaacaaaaacaacttaggtagcacagcaccagaacacaatgaccggaaagaaacccgttactactcattgttgctcagctcatagccaaaaacgaccagcggctccaacttctggtgacgatcttcaacctgaaagcttgacgtcgctgctaacaataaggctgagtttgggaccgcacgggaaaccgtattgccaattaacgtgtgattgattaagtatgcttaaaaatacttgaaaataaattaatataatttttaaagcaactttcctataaaaacacttttgtaaaaaacacaccatttagcaatttaaaaaacgtgcacatgaaaaatgagggaggtgagttgggaaagaagagggaagaacacaacctaattaaggggatgtggccactggccaccacccaatcatagagcgtgatcttcttgacaaagccttcaaggagaacaccacaccaaaagacattgtcaatgctcatccagagcaccggaactaggttttcaagtgaagtaaagagagaaacaacacggctaggaccacaaggagggggaatggtgtcacaggtgtcaccatgtgaagaccgggacaagtctttcgcccaaagctcatcataccaaccacgacctttgctagtaccttctccacaaagataaatgtaaggaggcaagtgtaatcattgccaagcttatcataccagtagcagctccgacttcaccccgaacacataagcacttgacgatgccatagttgatgctacaaccaacattagaggagatggcacgatggatagtatatcagctgcatcctaggctcctagcaatgacggactggtttataaaggagtagagatttttaaaaactacaaaaaatggaacccaaagcgaacagcttcgatttttaaaatccaaataataaacaaaataaggatgacatgcgggccataatgagtaaggtggtagcggttgacgagacttctaaaaattataaaaatataacccaacgatgatcatgtttgattcataaaatcctaatgccaacaaatagaaggggcgaagggcgggtcgtaaatgagtatgtgatggtgtttgacgagacttctaaaaactataaaggggaacccaacgatgatcaagtttgatttttaaatcttaatgacattaaagaggaggggtggtggccgtaccataaaggagtagagtggtaacagttgatcggacttctaaaaactataaaaactaaactccaacgatgatcaggtttggtttttaaaatcccaataccaataaaaaggaggagcagtgggagggctgttaaggagtagggctgttaaggagtaaaggagtaggatgatgaaaattaacttgacttcaaagaattataaaaacggaacccaaaagatgaccatgttcgagtaattctaatgataataaaataaaatggagggcattgggcgggctgttaagagtagggtggtggaaattgacttgacctctaaaaactatgaaaacggaacctcaaaagatgaccatgttcgattaattcttataataataaagagaagggatgataggtggaatataaagaagtaggatggttgcggtcaatggtacgtttaaaactataagaaaatataaatcgatgagataaaaaaaattataaagtcccgaagatgatgaatagaagcggagatgagcaagtagaggaggagcgacagaggagtatagggaggcacgtgtgtaacttttaaaaactaaataattgtaaacttgataatataaggttcattttttaaaaatcacgtacgtgacaatgagttgaatatttaataaatatttttaaaaaatcatatgtaaaaaaaatagataattttatgacggtgttacccctgcaattgcgcgagccaacatactagttggagtttaatttgttatttttgttacaacttataaagttaaattgagtttacacttgcatgtttgagtgatgtattactccctccatcccataatataaaagattttatcttttctactagttccataatataagagattttgctatactacttgtcacatccatcatctctcattcaaatttctacctatttcaacctccaactacccgctcaccacaaccgaaatcacatttaatagggatattgtagtgttttcttttcatcagtaatctttacctaaagggaataatcccttatattatacaatggagggagtacatattaatttattatatcaatttgtcttgaaattttatcataatcatttagttgacatactcactctgtttcaggctacaagacattttgacttttgccaaagtcaaactgctttaagtttgactaactctataaaaaaaaaattttaagaaatttttttttatagagttagtcaaacttaaagtagtttgacttgactaaagttaaaacgtgtattgtaatctaaaatggagggagtaaaataaatgagtggatatttagtttcccagcttgttggctactctctcaaggtgtgatttcaggctttccgcatataaatagggtggtatgcatgtagtacattgtatttgtgcatcagctggccttttgtgacttttgtccatcaatcatacagtcacgctccttcctcggaaatttataatcttcgaatcagagatcgatgtcgcggcggccgtccgtagcaccggagccggctccgcggctggtctgcaatgcaaccacgggtgatctaccggcaggctgcaacctcggcctgctggcccgtatcgaactcctggtgctcttctgctccgccatcctcgcgctcctcgtcttcctcggctcctccaggcgccggagcagcagcgccaccgtccgcctcgtcgtgtggggcgccttcacggtgtcctacccggtggcggcctacaccatcggcctcatgcagtcgtcccctttccaccacgagctcttcgtggtctggtcctgcttcttcctcttcgtcctcgccagctccgactccatcaccgcctacaccctcgccgacatcaagagcccggccaccgtgctgctcaaccgaggcctccaggtcatctacgtctccgtgctcctccactactacgcctccgtgctctccccgaagctcaagatctacctcttcatcgtttggctcgtgagcttggggaagatcgcgttgagcgccctcggctaccggctggcgctgcgctccgacaggttggaggcggacaacaagctcgtcgctgattacatgacctacgagcacgacctgagccggcagggcggcagcgacggagatccggtgaccatggaagggtacaagtacatagtcagaggggaggagacggacgtcatggagctaacggcgccggactacgtcaagaagatcaaggtggacggcgcgcgtgcgctggtgacggtcgagagcgtctggcggtgcaaggggcggttgctgatgggcagctccgtcgccgacgccagcgccgccgcgcgacgggatctttgcctctcctttgccctgttcaagctgctccggcggaggtgcagcaactatcccctggccgagtccggccaacccaagacgagggactttgtcctcaggggcctcctcggacagggaaaagacgacgacgacgacggcgacggcgaccggagatcaagacgagacggcagagctttccgggtgatcgaagtggagctcggcttcctctacgacctgttctacacgaggtatcccttcatctgccacgccgcggtgagcacggcaccgcacctcgccatgtgcgccctcgtgatgaccatcggcgtgctcaccctctcctcccactcgctgcgacactaccaccctactcaccatagaagcatcgaggtcaatggcgtcaacctcgacgtcgccctcaccatgttcatcatagcgctagtcatcgtcctcgaggcgtaccagttcgtcgccgtgctcttctccgactggcagaaggtgaagatgctgtgcaggtacgtcctccggccgtcatggcaggggaacccgttcttcgaggcggtgttgcgcgtgctgtgctactgcggcagtggcgtgtactggaagaagacgatgagccagtactccatcgtccgccacgcctctcctggccacgccgtgaaggactggctgtcgcgggcgactcgccggtggctggacaggctcatgttcaacggcggcaaggcgcgatcggtgaaggtgtcggccgcggtggagagcgcgctcgcgtctgcactgagggatcgcgacgacgatgacggcgtcctcggcggcggcggccgcgccgcgctgcggcaacacaggctagactgggcgtggggaggcgcgacgtggcgcacgtgcgcgcacgccattctcatctggcacatcgccacttgcctctgtgacatgcagatgccggcggcaataacccacaagaagacgcggccgcgagcgagaaaggccgccggcggcggcgacggcgacggcgaccgtgcagtggcgacgagcctgtcgaggtactgcgcttacctggtgtcgtcggcgccggagctgttgccggagcaccagtacaccacccggacgatcgccgaggcggtgctcctcgagctccgggtctgcctccgtggctgcgcgtcggacaaggaggtcttggacaggttgaaggcggtggcggagacggcgaccgcgagctcgccggagagcggcatccatgtgcacggtgcgaggctttggacacagctgatggtgatcccggaccaggagatgacgtggaagctcctggccagggtgtgggcggagctgatgctgttcgtcaccccggcggacaatgcgacggcgcacgtccagcatttgacgatgggcggcgagcacattacccacctctgggcactgctgacacacgctggcatcgtcgaccggcctaattctccgtccccacacccacatccggcgccgtaaattggcaccactgtatatcggtcattatattcctccttattgctgctatatttaattgtgttcctccttattactgttgtattttgtgtccgctgagtacttctgtttttgagttaaatgttcatgtttgttttggtgctcagttagctttaatttggtgtcttagtagagaccttaattctagctcaagcaactttctttaaaggttgttttccacttttactctactagcacttttcgcgctaatgtaatctctttactcatgcttgatctccattgttataaaaactagctaggtggcccatgcaatcgcacgactagtacccatataaaattatctatttttacatatgattttacataaaatttgttaaattgttatctcattatcttacgactttgaaagacaactttatcaatgcccgtgttattaattttatagtttttaaaagccacgtcagttgctacctcttacttcctcatcaccgctccttgcttgcttgatctaccaatgtttctattcatcctccttggaagaacctttaagaataagaccatgcagtttttagagttcattatctcgttgggtttcgttttataatttgtagaagtcctctttattgtcattgagattttaaaagtcgaacatgattatcattggggtttatttttactggttgaaagtccctccttccgttgtgactgttctaattaatggcatgcccattgtccctactcttaatcatcattaggattctatttaaggttttatttatagattttagatgtccaatcaaccgccaccacactactcttatatgggtctgttgtttctcccctcttcaattttacttttgaaaattccatatttttcattccgatcggcggctggatctggctaccttgagatcatggcaaaggagagaggcaaggctacaagttgggactacgagtggacccctgagcccgtttagccactgtggggtggccgctggccgtagaggagaggtcgtgccatcatcaagactgccataaagggaggttaggccatcgttgaggggatcgcctgtcatgcgccactatggggaggctgcccgtagcgtcctcaccggatggggaagagaggatggggatggatcgagagaagagaaagggccgagaagatagagaagagaggatggggatggattgagagaaaagaaagggctaagaaggtagagaagagaggatggggatgatgtcgacaggttgtacccgtctacagtatttgtagagtatgcggatcgttggtgacgacagactatacccgaagacggtatttgtagagtatggaaatcattggtgtcgacggactatacccaaagatggtgtttgtagaatatggggatcgttggaaccaaggtatacgcgagatcggatcaagtagacaatggacaaagatttatactggttcgggccctcaagatgagtaataaccctactccagtttatacgtattatagatggaaataccacacatagtacaatgagggataggatgactagacgaatccgccgactagaagctgtcgagaatggccgacaagatctattcgccaattaaggtgctagcttcctttggattgcttctggatgtggctttggctacggcctgtaattcgatgcccatgcctggatgaggaggtcttgtatttatggcgtagatcatcttcttcttcaagtaggactcggataaataaaccggaatatgggcctaaggaatcctcatcttccccaactagggactctgacaccttctaatccgggaagataattgccaacattatttcccgtatttccttaattgtaggatatcttcctctatactattaggtatatggtattgtcatattccgttaactcatgtatagaaggtatgtcatatccttgacacttacagtcggtactaaggtatatgcgagattatagtaagaagatggtggacaaagatttttatataggtttgaaccccacttattacaggtaatagctctactcttgttagccgaagttggtgtagtcattatatctcaatatcatactgattacaataggagagcaagttagctattctaacgggctgacctaaatccgtcgaatacgtcctagcgagtagatatcagcaactaaggcttatcttactcatggttgttttccaatgtggcattggctatggcttgtattgatcgcgttggcttgtattattgtgtattggttgtcttctcttgtcctctctgctcctctagggtcttatatttataccctcgggtatcctctgtccgaatagaattatggaatcatatatgtatacgatccgactagtctcgcagtgtccaaataggactatttctcttttattatctgaaacaccttacatgcatgtatgaggccttgttctgcaaaaaattttacaatttgaccctttacaaaaactatttttacaaatgaactgtcaccaaaacttatttcaaaaataacccttggcgctgaccaaaagagtcatttttgaaataagttttggcagcagtttatttgtaaaaatagtttttgcaaagggtcaaattgtgaaaatttcagcttgttctgtgtaggacttgatatacggtatatttgtatgtcatgaattgatgtatagaggaaatgccttatctgtaatagtgatagattggtcggtgtcagttgctggtcagataaaaaatccttaacccatcagctcggcttggaccgtttattatggatgccggttaattaaaaaatcggcattgttggttaattaaaaaacttgtactcataggtgctgggtttttaaaaaagtcacaattttatttgcaactagatggataccccgtacattgctgcgggagaattgtgtgataatataatagatatgagttctaaaattttctttcttacctactatacaattttttatgtgtttatctatttttatactttcatcaattatccaaaggttataaatgattaagttgtatggtgtgccttttagaggaagagatgca

SEQ ID NO: 20954 - DNA, 1318 bp, Oryza sativa
gcgtgctgccggcttctttggggggaaggcgggcgacgatgtcgccaaggatggcgtccgggaggttgctgatgtggtcggcgctttcttcgtcctcctccgccgccgccggatgctcctccgcttctccgatctcaggtggtcccgacctcctcctcctcttcgcactccgacccgacgcccccatttcgtcgagcacttgtgtttcactgcttcttcttcgctcctgttggcgcctgtggttctgtccttcgccggaggactcggcggcggcgggcggcgggcggcggcggattgcccgctccctggccgtgtgaccggtctcaacttcctgtcatggcccgtggccggcggcgtgcgatgccgaggtgaagcaggcgacgcgcgggagatgcgaattgacggcgcgagaattagggatttcgggagaaggaggagacttgaggaggggaggaggaagaatctgagaaatgatctaacagagcccagcgtcatgggcccaccaggcccagtaactgcttcatctgccgtcattgttgtcaaccgatgggaatgatgatataaaatggcccgtgctttatggtgggatatatctttgatattagagaaacgatgaaatgatttatagattaaagtattatgaaaataatttaagaatggtgatttagaaaaacggcatcattgctatggcatgaaaagagtttctggtccggatatacaaattatgcagacaaaaggccatgtcgagtgttcgtcgtgaaaaaactttgaatccaggaaacttgcagtttaaatacagtaatctagttttagaatgaaataaattgtagtatacttgcatgttgagtttttgtgtgtttaatgggttgatgtggcatgtttacatgtaggttttaggagcgctaataaatactatgcttgcatattaagttttaggtgttttatgggcattagttttatagaaggaagatatacgccccgttcttttaagatacatattttgttttatattagttttggttaacacgtcctttaaactattgtaaacggtgtattttataaaagtaattgtttatataaaagtcattctaaaatatcagataaatctattttcagtttaaaataattaaattatttccctcattttagtattttacgtgtccagatgtgatttttatggtataaacacggtattcctctggtactccctccgtcccataatataagttattttggacccaaaataacttatattatgggacggagaaagtaataatgaatttgggatggagtgtcacctaaagtttttatattacaa

SEQ ID NO: 20955 - DNA, 2985 bp, Oryza sativa
  unsure (1)..(2985): unsure at all n locations
agtaatgggcataatcaatcttaaactgataaaaattgcctgatgatatcagcgatgtaacaatgacactagttcattcaaaatgcaaatcacatctcctttatcaataaatcccgtgtatacatttccccaagggcacaacaaatcaacaatcccggcacagcaattttgaataacaatctaaacacatgacactataaaagttcccgtgtatacacttccccaagggcacaacaaatcaacaatcccggcacagcagttttgaataacaatctcaaacacaacacgaaatcatttacgtcatttcagctcttcttttctagatgaatttacagtttcagtataaattttcctacaagtcatgtaccaacaatgcaatccaaatacacccgtgttgatctgaacacatcatcaagctgttaccaggagccgagtgccattcaaaacatgcaaacaaagtgtaatgcatattggggcgataaccatagacttatcagtcatgtattgcatcgcgcgcagtccgctatccatcactgtgttgccacccttcttcgccccagcgtgcattttccacagtgcgaactcaaggaacgacctcactgtctcaaatgtaactctaccagtaacatcaagcacaaacttcctgttgcttggaactgccaatgtgctcgacactgtctcgacccacccttccccagcaccattgctgccactgccaaccgatttataattggcattggacataacatggtgagtggccttcaccatagtctccactgccccgttgcataccgaaacaagcaattctttaaccttagcatcatggcttgcattggtaaggccttggaatagctgatcataggtattgatgtggattgtcttgtcaacgaacacccccacggctgtgctcacgaacacctcaacccaattactaatcgccttctggccctttccagtggcaatcaagttgacccacttcatcggcgaggaggtctccccgggagtcgaagaggcggagtagatagcagctacgagatggcgggcgaagctcccggcgatggcagccgcaaggcgctccccggactccgagaagagcctgtcgacgaggcgatcggagagggccacgccaccgccggagccgggcccggagtcggatccgactccgcggagtatcccggcggtgatggcctccgagatcgcggagacggtcgcggagacctcgggggacgcggcgagcttggccagctgcgtgacgctgcgggggagctcgtccgagccggagcggacgaagtctgagaggtcggaggccaccaaggccgccgcgtcggcggaggccgcggcggcgtctaggaaggccgcgaccgcgccggccagccgccgaggcggcggcggcgggccgccacggccgggtggtggtagatcttgtacgccgccgaacanccgcctgccgccccgcccgccgcgaggaggatccagcgccggcggcggtgggagaaggcacaggcggctgtccatggcggcggcggctcgccggagctagggtttcggattggttcgtgtggtgcggtgcgcgtaccgtgccggtctccctctctctggttttttttcttttttttttggccctttttttttcccttcgcgtgtttttcgtggggactccggcgagcgaccggcggataatggcgatggggaattgtggggcctacacggagttggttgagtttgtggtccgcacgaagaaatctcgcgtaatccgaacgggatttgtagcccacgtgaggcctatattaaaacaggccggaactggatcatagcccacgtgcgtaccaaattaagatgggctgattgtagcatacgtgcggtctgtgtttagtaggcccggaaaggtatagtcggctacgtgcggcctatcctaagatgggccggaagttgaatgcagcccatgtttgttgggtctaaacggtgttgtaggctgtagcacacatgtttattgggtctgaaccgtcgattgtaccatacttagttcactttcaatcccttatctcgagttttaatcacatccctgaatcgcaatactagatacgtgttcctcgacttgcaaaaccaaagcaccttagggtccttaggtcctaaaacagtattgtgttcggttttcgctgacatgaagaatctattatattattaaagaaatagaaaaaagagcctccacgttcgctctcatggcctagaaattctcacattaatcggagaaaaagaaaaggcagagtgcatatagaaatacaatttagaaatagttgaaattcgtaattaaaaaataaggaatattagaagaggagactagagtccatatagaaatacaatttagaaatagttgaaattcggaattaaaaaaaaggaatactagaagtagagtatatagtccatatagaaatacaattagaaaataactgaaatttgaaattaaaaataagggatattagaagtagagtatagagtccatatataaatacaattaggaaataatagaaatttaaaattaaaaataaggaatatttgaagtagattatagattccatatagaaatacaattaagaaaaaaaattcgaaattaaaaaataaggaatattggaagtagagtatagagtccatattggaatttaaaactaactaaaatttggaataaacataataaaattaaaagtagagtttagagtccgtataaaaatatcatttacaaataactaaaattcaaaattaagaaaaacatgggaataagagtttaaagtcaatataggaatacaatttagaagtaactgaaattcgaaattaaaaattaaagaatattgaaagatgagtagagcccacgttgaaattcaattagaataataaaattcaaaaataaaaataaataatattggcacaagagcatagagtctatatagaaatacaatttccagaaaatcggcattataaaaatatattaaa

SEQ ID NO: 20956 - DNA, 4258 bp, Oryza sativa
acaccagtttacaagttgagagacacatcagttcgaatgattttaaggtggacataaagtgaacctattcctagcatacttgaggactacattcagtgggctaaacgcgattaaaacatatgtggcggtccaattagggcgcctttggaatggagagttgttttataaactagaaatgcgagcgcggcgccacgccgcgcacgctaacacttgcgtaggtagaagtgtacgtaatcaagttcagttagaccttacgctatggtatattatatgtatattaatttgattgaacaacacagtatgatatggggcttttttgtttaacagaaattgggaaagattttttttatgaagtaagggcaggtgaaaatggggcagtttgaaaaagcaaatggtaacatgtgatgtaaggacaacagagattggtcaaaaaagcagagtttagttgtaaatgggtttgataacgagaaccaataggtttattatgcagaacgtatattaaataaaattgcaacgagtaattaatatttgtctaatggtttgtgcatttatccatgatgctaatagagacaaacttagagccaacctaaggttcagctcagcctgtgaagagtacaattcaccagcctatgtacgtgttgaaaagttattttatcggtgggctattagttctgggctttacgcttaagttaactttgcctttccgggtttagatacgtatgtcaatgagtggagatgatataatgaagaggaaggtgtgtttcgtgtggaattagccgagtagatatctaaaattcttcactaaacagttgcaagggcaggtagcatgtctgtaaaacagagaatgcaacacttggcgagcatgcaaattgtttacatggattaaaaaaacgcacagttaaaatggttagtgtacaggttgcaagtaaacagagtcggcttatacggatgcattttatttgttcatagtataagttgtttatcatataatcaacaacatacttattaatgcctaatttgcttgcataaaaagaggatttgatgcagaaaatatgcttccttagctgggagatgagtcttcttgtaaactttgacactctccaccggcttctgtggcccaccaagattatataaatagtgaatagtgtactgttaccgtcataattcatgctacatgtatgacgtgtgtctcatgaaacatggagaggcccggtacgtgtcagtgaattgtttacgaccctatagcctcgttgcagttgcttatatatatgaccgtgtttagttccaaaatattactactgctactactattgaagtagtatcaatagctaaagcagtagtgaactctgtagcgttctatatccatatagacgacgactactactgctactactatcgaagtagtatcaatgtatcgcctccggaaaaaagagggttgctgccatttctttggtttcttctccccctgatcccctcctccggagaatcttctgatttagtataacaagttaattacaaggcaatgaaatagagttaattccctgttagcaatatcttacccgaggcgacaattcacctggtaggtaaaatagggactaaagatcaatcaaatagaagtcttgttcaagcttttaaacaacctttaataaggccagtcccttaaaaacggaaatgaaacagacatgtgaaacaatgaggatgcaaaggagccatttcaacaaaggtacaccaatgagctccttccacttcaacaaagcaaaaaaaaaaaaggaatctttcagatagcaaagaaacaaaaaaaaactccttggaggaggatcacaacatgaactggatcagtagttcatccatttttttgtaggaagtaaacaaattcagctagagcatacaacatagttctgaattttcttacacgtcgtactatattatccccaaaattaagcatagtaagcacgtactaaacacatctatacagtaggtaggctcgggttaaagatgtaccagtggatagcaaacattctatatatgctacagagctcgcctatgtcactctttcatcctcttcttgtcaaacatttgtaggctaaaaaataaacaaaaaaaacactgcattattgttacgtctaatatagacgaatctttggatcacctctagatcgaacaattatttaggcacaccatggataacaatcatttaggcagaactcatagaagttttttaaaaaatgtaactcttcaaattttgtatatcatgttaagtgcctcttgagaaaaataaaagatagagcctaaatacctgcagtgaaagtaaatagtactgcattgttttgcattactatcagatgcatgataatacgttatgtatatgtgtcttagtttggccatgtgacctaaatgaccctcgtttagcctatcttctaaaaataagcaaatcttataccctacagttttgtaagtagtggaattagaatacatcgcaatatagtcatatagtttacttcagcatctaattaatggatggcttaatctggcacatactctggtaagtacagtattcttccttgattatataaaggttgttccattatgcaagaaaggaagcaaaacaaataaatacatagacttgcaattcctaaatatagttgaagcagagtatgcacaaccaaggcaaacaattgaacactactattgctattgctccattgtcaaccaatttgtccagaacatttcacagccagacacacaaaaggcaaaccagtttgatagtatatccctgcatgcttttgctcaccttctgttttgggaaccagaccttgatcttctgcttgggctcgatgttggcgaggatggataactcgcagagtaactgctggcggcgagagaatctgggcttggggcactcggcgtacacccgctccagcgcctccacctgacccggcgtgtagtgcacgtacttgccggagtccatcccggccttgtcgtacccgctgccgtcactgccgctgccgctccgcatcgggcatcgccaccgctgccgccatcctccactccggccaccaccaccaccaaagtttcccccttcgccaccttcaacacaacaacaacctgagagatttcgagcaaaagtgaaatcatccggagaggatgaggagaaaaaataacctgacatgtgagagggggaaacgaaagaaagaaagaagaaagagaaggaagggagaaatcgatagatggttgtgcgattgcaagcttgcttcctcctctcctctccgtcaggggatgcgtcgacctcggcggcgacggtcatggtgttccacgtagagaggagaggtcgagagttgagaggggaacggttgggaagctgcggaggagaggacggagaggcaacgcggcgacgggggaagacgtacggcagtcctgcgcaggcggccggtccgacgccgccatgagggaagggcatcggcggcagacgcgcagccggctctgccgccaacgtaggtaccctcgccactgccgccacaagggaagggagggggcacgacggcggatccgccggcgtcgggcgccggatctgccctccccccgccaccaccgccgccgccggcctaagtggagggagaacaaggagggaaggagaaccggtggcggattcagcgggcgtccctccacccgccgccgccgtcaccacaagtggatggagaaggaggaggggagcaccggcggcagctcgggcgggtgccgcctcctccctccccccgtggacgcaaccacaaggtcgaggaggccatcatggtagaggagggcagcacaggaggcatggtggagggcggcaatgttgtcgtccccttgctccgtcgtctttgtaaacgccggcgccgtccttgcccccggccgggaggaggaggccgcatggattggccggggatggggatggcggattggccgggaggaggattgggcagagagatgttgcgtgttggggatgggttggcagcagagaaagaggagggattggattaggatctgtttttttagaatgccctcgtactttttgggattacagcgctgtccctaaaatccgaattttctcttcttcacattgtatttcatataaaggtaaggcttttttagtaaaaattagaataaggatgaatctccaggaggactgcttcgttgtttcctagaggattgagagtttttttgaaaaaacgcatagagcatacgtgccttgcatgcacggcataaacatccaacacccggt

SEQ ID NO: 20957 - DNA, 3799 bp, Oryza sativa
tatcagctatccaaacactttgtaaatttctgtcttttctatgtctgccggatttatttgacatctcacttctacaaattttcctatttacgtatttctaaaatccaccccctatgtttcaaatgagccattgggcagccgacgtttggctcatatttagatgttgccgttgactaatgatgaagccgaactagtgtactttgactaatgataggtgcattccagaatgaagtccactgctccactgtgctacataaatttagctacagtttggccgttaattttctacaatttggcacttaattggattaggcgtactcaattggcaagctgcagtcctgctttcaattcagacgtggccataccaagctggtggcgctgttttttgtttaacgaactggtgtatgcttacgtgggggatttggatagatgagtgcgtaacgtgacaggtgaattattaaaccatacgctaaaagggaaaaaaaaactaagttaagctaacttttgcgtgacatatagcaattccgaaaatactattcagtttcttgcatttgcccctgttttgcagcagcaaaaatagcaattacgactcacgaattctcaacaaaaatcatatttacaaacgcaaaatcccaaagtttgaatggctactagacctccagagaagaccattaatggcgatgaacaccgtcgcgagcacgaccggcgggcagcagctcaggccaaggccgccaccttcctgtgacagtgagcgatcctcccgccgacgccgccgacgcagctctggctcctggggtagtgcatcacgccggcgtcgccgaactcctcgcacggcgcgtcctcgtcgatccgcgccatggagatccccgacgccatgctctggctcctggccacggcccgcgcctcccgctcctgctccgcggcgcgcctctgcgacgccgcgcggatcagctcccggaggtcgtcgtcggcgccgccgccgaaccgcgagtccgacccgaagctgttgctcctcatcgaggcggcggcggaggacggcacgaacaccgggtagccgaacgcggcgtccgccggcacgcagcgcgcgcaccccgtcatcccccgcacgtacatgtcccgcgccctccccagcgccctcgccggcgccctccacagccagctcagcctgctcctccccctgctcatggtggtgtttgggttgggttgggttgaagacgatggaatttggttggagacgtggagctctcaccggtggagggtagggctgcctcttatacaatggccttgtttatggatggggaaaaaatttggattttgtgttacatcggatatacggatacacatttaaaatattaaacgtagtttaataacaaaataaatcatagattctgccaggtaactgcgagatgaatttattaaacctaattaatatgttattagcaaatgtttattgtaacgtcacattgtcaaatcatgacgcaattaagcttaaaagattcgtttcgtaatttacacgtaaattatgtaattgattttttttcacatttaatattctatgtatatgtctaaacatttaatgtgatgagtgaaaaaatttttgttttgtgaaaacagggtcaaaacaacggtgggtgcggaagaagagaagaggagacgggacgggaggggcgtcggcggcggtgggcgaaaactgcgtaggaaaggggagaattgagaaagacctgtgtgcgcgcgcgcgcccaccactcactctcgtgctcctgttatccttctagatggcggcgcgtgagtcacagagtcagagacaactgtgtgacgtggcatccggtacacagttcgtgacagaattttacatgccctggtcggacggaggaaggttggattgggttgctgattggttttacagttgttgttactgctagccttgaaagtttcagtggaattagtacacacaaatcatcatcagtttcatcgcactactgtgcagtagaggagttgctatcatggctggaccgctggagcgggccgtcgccttttacaaatattttcatcctgcgtggtgcgccaactggtagtaaaatatagaaatactaccaatctcgctttttttgttagaaaacgggattcctgcttgcttgtttaaatcttggcaggcagcaaacctatccatcagcctcgacaaggaaatttgaagaaactactcgatgccgtacgtaccttcatttcaaaatcataaaataatattgtgctacaagtgataacaaaataaataatatttaataagataaataattaaacgctgtaggaaaatctaccacgtcatatagtattttggaatagaaaactcatcacttcagttgattcagttgggcaaacgcgcgcgagtgccgcgcgccgccggtggcgacggagccgcggtgagcgaacgcccgcccgacgacgctcgaaaccggcggcgcgggttccagccccaagagccgcgtaggagcacgtctctgcagtccaaagacacaacgtggcaatggaagcttcgatgcgatcagaggttcggtttgaattcgatacgtgcaattttagtacttacttccgttctaaaataagtgtatctataaatatccgtatttagcgtttttactatccgtcttatttgaaaaatttataaaaaatattaaaaaaattagtcacaaataaagtactatttatgttttatcatataataacaataaaaatactaattataatttttttttaaataagacaaacggtcaaacgttaaatatgaatagtgctaaaactacacttattttgggacggtagtagtagcacgtaaaactgcgtaggacggctttttttggttctggatgacggcggagtcgccggggtgagtcaccgccgtgctgtcggttggttcaacgaagcgtgagatcgacaggatgcagcagcagctgaatgatttgcaggggcgcaggcacctttcagctgacgggagcgtcattaactgttgaaccggcgtggactggtgactggtacgatgacagagacggccgtgtttatgtgcttccgtagctcgatcggattgacaggaggggatttcttgactttctcgataatactggacgtttctgctggagacagtttttcttccgatcaattcagacggaagaacaccatgcataagcccccgtcgctcacacggatgcgctagttccatttacaattttttttataacactgactcacctaatacctgttcaaaattcgaaatataataaggttttgtattgttcggtcatgacgatgtccaactcattccatcaaggggggtacaccttttgaaatggacagaatcacacacttcctagtggctaaactttccccaaaacttgtggtgaccaaattgatcgaaaagaaatgagagccaagttacaccttttctcgggaaaagtataattaatgggatggtgtagttctgtatgcatgacttcacccaccaggattttaatattgatgcctacaaatattgcgcacatgtaggtgtgattctaacatgtaattagtgagattagagatgtaccgcaggtttttatatccctctgagtatatgttaggagcgtattcacaggggtgtgaatgtggtgttacttatgtagtggtgtacgctcgcgtatgtgactgcgtataatataaaaagagttacacattttcccattttcattatacgcagacacatatgcgaagaaatactcttttcgtaagaagaaaggcaagaaacaggggcggagggctcgctagggcaagg

SEQ ID NO: 20958 - DNA, 2171 bp, Oryza sativa
accccaccgccttcaggtcccaccactgtcaccgcctccccctcccagcggccgtgccgccgcgcaggagggtccatgtctcctgcgacgcgcggaggacgggcggcggtgtcggtggcggtggggtgaagcgctaggccatacctgctggaaccggcaaggccaagaagcaggtcgtgttcttagacgccgcgccaccggtctcgcagcggggcggcggcggcggcggggagggggagggggagggggagggggaggggaaggtggcgaggaggaaggagaacgccgcgttggggttggttaggaggttgacgaagaggacgctgtcgctgctctccaacctcccgctcgccatctccgagatgttcgccattgccgcgctcatggccttaggtgattcgctgcttatttgatactacttcgaattcgctagcttagcttctccggaatggattgcccatttgccagtatgtgattgctgtttttttttattcatgattgtgattgcaatttgcaatttgcgatttgcaattgcaggcacggtgattgatcaaggggaggcgccgagctactacttcgagaagttccccgaggacaacccggtgttcgggttcatcacgtggaggtggatcctcactcccgggttcgatcacatgttctcctcgccggtgttcctcggcctcctcgcgctgctcgcggcgtcgctcatggcctgcacttacaccactcaaatccccattgtcaaggttgccagaaggtagaaatggccattttctgatgtgcaggttttctcttcttgataatgatagtttgtctgatcagaattcagaacatgagttatacttgtagataattgcaagcgctgatcaattgtttcttgcagatggtcgttcatgcattcagcaggaagcatccggaagcaagaatttgcggagtcacttccccgcgcatccatccaggatttaggagttatattgatgggttatggatatgaggtgattttagtcacattctgtgcatttcatttgctccgatatgcatttaaatcatgtgtgtttgatgtgtgtttcaggtattcactaagggtccatctctgtatgctttcaaaggactggctggtcggtttgcgcctatcggtgtgcacatagctatgattttcatcatggcaggtgccacgcttagcgcaacagggagctttaaaggatcggtggatgtaccccaagggttgaactttgtaatcggagatgtgatgaaacctaaaggagttctctcttttgtgcctgatgtttttaatactgaagtccatgtcaatcggttctacatggagtactatgatagtggagaggtagtcaattttgcccagcatttcatatgcttgtgtgatgtcagatttacatgtggcaaatatttttggctttccaggtttcacaattctatagcgatctttcacttttcgaccttgatggcaaagaggtcatgaggaagactatcaaagtgaacgaccccttgaggtatggtggggtcacaatctaccaaaccgattggggattttcagcattgcaagtaaagaaaaatggtgaaggtcctttcaatttggccatggcccccttgaaattgaatggtgataagaagttatttggaacattgttgccacttgaaaactccggttcttccaatgtcaaaggaatgtaagttttaacacttcccctgtttggagctaaatgataaactggacacattccctataagctattaacttcttctcttgatggcttgtagatcgatgcttgctcgagatctgcagtctattgtgttgtatgatcaagagggtaagtttgtgggggttcgtcggccaagctcaaaactaccgattgaaatagatggtaacgaaatagttattgaagatgccatcggtagcaccggtctcgatcttaaggtcagtgctcctgataaattgttttgaatttgcagaaattttgtacatgtttgatatatcattaaacgtgccttgtatttatttcccttgccatcagactgatccaggaattcctattgtgtatgctggatttggtgcactcatgttaacgacctgcattagttatctttcacattctcaggtgtgtgcatatggcacttcctatgattatttttgaaatataagtattgtaaaa

SEQ ID NO: 20959 - DNA, 2644 bp, Oryza sativa
ccgccccaccaccgccgcccgttcgtcgtcgtcggggagaaggcagggcgagctgcacaggatcttccagcacttcgacagggacaacgacggcaagatctccggcgccgagctgagcgcgttcttcgcgtccatgggcgacgagatgccggcgccgtcgccgggcggcggcggcgccgccgccggctacatgctcgacttcgccggattcgttgccctgatggagagaggtgacagccaagaagaggacctgaggagcgccttcgaggtgttcaacgccgtcgagtccgccggccggatcacggcgaggggcctgcagagggtgctcgcgcagctcggtgacgagcggtcggtcgccgactgcgaggccatgatcagggcctacgacgtcgacggcgacggcggcctcgacttccatgagttccagaggatgatgagctaagtccatggaatgcctcagcttgaagctgctacagcgagtgagtgactcagcgaggtgtttttcagtttcagagtcctgagaaaattatactgctactataggttgttgataagtctgctgcatccagatgacacattgcagattgtttacagggcagaagagttcttcagagctcttttgcttgcctggagcaaatttgttgttgtcatcttgagttgtttggtgtgccacacacttaatccagtgtatcagtaaagttacagttgatttccttctttcaaaagaaaagaaacagttacagttgatttcttggcttcacctgtatttgttcaggaataaatcgtcgagatcgtgcacccttttcttattatccaaaaacactgaaatattctaaaatatagccggatagatccaatatattcttaaaatagacaatttgcacacactcctcccccccccccccccaaaaaaaaaaaacaccaaaaaaattcaatatgccaaccaccacagttaaatttattagatttgttacaaaaatattggtattaactcctagaggatagccagtgagctaaaaagaaaacaaaagaacagacaaacaacaaatagataggacagacaaataacaatttttttttcaatcactcactccgctcacccttttgagttttgattggttatgcaataccatttgaaatacaatgagaccatggtttcatcatctggaaatgacagataacaatatgccgacataacaaggaaatgtaccaactttattttcacatagtataattcgattgggtaactgtaaattaagtaaaattcaaatatgaaggttgtttttctttcaaattttagagggcacatctcagggaaatctttacagttgcattgtaaacattgagtttgtacatgaatccatattacagtaaaaaaaaagctactattgcacaatgctgcaatattcattgcagtgcaacaaactgatgtcatgatagtaacaagcagataagaaattctgcaaccagaattcagagagcttcacttatatttgataaaatgaagcatcagaagcacaacgcgcacatattctcaagccttgcaagataagtactaatttacatccccattttgttttcatttcctggggttctccctaacagcaaaccgagtaagacattacccattatctaaaaagtaagacattaccactactttctcagtgatattctacatgaaaaaagatgacaattttttcttgcagtctataaccacttgagacctcaactccgacccggctgagattgattcccttgttcaacataaggccgcacgaaagtcctcttccaccacacctcaaaggccttctgcagattggggcagctatccccaaccttcaagaagctcccgagccatgaaagcaatatcgtctgctgatcctcgagcgggagtgtcaagatagtacgcccgatcccttcctcgacaactttgcggtcaaatgacctgcagccatgctgtaaccagttgtagtcatccatgagaggctgcagccagacatccaagagaagcttccttgtgtcctttgaagggagcatgtctcctttcccaattgccacaaagagccttgctgtgacgcagctgacaagatggcgcgacttggttggtaacttggagtgaagctcagccaactcaccctggttagaccacatgactgcaaactcaccagcagcattcctgtcggccaaaatctcagttaaccaaaggagattatctgcttctagagcaatttgtcgaaaaactggctctttaaggtctaaggattgctcagcaaaatcgtcggcagtcgcttgtcgaaacaaggtcaacaaggattccaggcaattctggcaagagctgtagagagtctcagcatagatatccacagatgtactggtacagctgctattctccttcagaagcttcagcaccagggatttcatttcgcggcgccctctatcctcgccgctcttcaagactaattctatgatatgcacaaatgtgtcatttggtgggcttgttaggtcagagcataccctcttcagtattgggctaacaccataattcccactttgcagatgctgaacagatgataccacattctcctcttcttccccgacccaagggacggcttccaagtactctaagcaagacgggctgcaggaa

SEQ ID NO: 20960 - DNA, 1780 bp, Oryza sativa
atggcagcctgcctggcttgattttgttccaaccccccaccaactggtatggcaagatatatttatcagttgtgggctctattcagagtttgtcaacttgtagttattaagtgacatattgaagtatatgggtatagaagacataaaagaccatatccctttgatgtaacaacatgaaacagacatgcatataatacatgcaatgcttcttttttacattaaagattattaattacaagtggtagtaaataacaatagcttctagggaatatttctgttggatagacataaaagactgacattaacgacaacttaagtagattgtatatcaaaaagcttgtagaaatttcaaaagttgtaatacagggaaggctattttgatatatgactaatactgtagtaagctagatgataagtaaaattaaattctgacagaatggtaaaagttgggaccgtacccccttttcattttgcatattagcttagagagttgaaaaaggaaaattgatgactatatggattttcagtaaactgagaaaataaacagaaccaatatttaactgcagcaaaccttcaagatccgaagaacgcgtggaacactttgcttgataagcctctgcttggcatcattgcagtacatcaatccaactgtctcaacatagatctccacatcctcacaatcaggcacctccatgcttgacattggggattgtcttgagagcttatcagcaaaccaggtactattttctgcaaggatgttcctgtgaacactcatctttacagcaacaccatccttgccatacaacacaaccttgagatcactcatctcaagttgaccaaatccaacagatatcttatgctgcttctgtggtctatcattcgctaccttcggtggattgggtgttgaattttccgctggcgcgcacttctgttcatccgaattgattctagaccttgtcggagttgaatgcgctcttctctctgatgaaatggtaggcgccctctgaaccgaagaggcctttgatgcaagaggagatgcaccccctttaggctttgcctgctgattttggttcttcattgtcttttggagcacggcctgcgacgggcagcaccagaatccttctggtgttacagcaatggggacatttctgatctttgttgctcgggcatcaaggctcccaaccttgaactctgtcatgttgccttaggaagcttacggccaatgacttgtctgatattaactgtagaactagcacttgttcatatacctgagcagcaatccataagagcaaaattagtgaactcaagttttaagcaactagctaaaatggtcatgatagtgaatgtatgtaattaaacaagaagagctgacaatttagagtatctactgtatgagcaggaagcaaaccatatagaacatacataattttcagttaagccaccttttcctaacctgcatctcagatactgcagtttctaagttaaatccaaatattaggaaattcataagcttggaacctaacatgaacgaccacaaataccaaaatttgcagagcctgaaaacaggacgctctatcttcagcgaattggaacggcgaccaatgaaaatcacaccttatagagcggccaaattcaacataattcacaactcacaagcaaacagtcctaacttttcttaataaactaacaaaggcaagaacactgaagtgcaaacaggaaaatgaccaaaggagctaacaataacatacctctgactgaagaggcactgagcacaatcctc

SEQ ID NO: 20961 - DNA, 5214 bp, Oryza sativa
cacatcatttctttctcccccacagttgaaaaaggagagagagagagagagagagagagagagagagagagagagagagagagagagagagagagagagagagagagagagagagagagagagagacgaaggcaaggcaaagaaaagaggcagcaaggggaaagcaatggaaggaaaagggcacaaagcagcttcctttgagctttaccagacgagtggtgtcctccctttaaccatccaagctaccacaccggccatcatggcgagcttctcctctctgaaatctctcttctcttagcttttctttcttcttctccagctctctcctctagcttctttgcttcttctccccctttatccctcttggctctgggtgctctctctctgtctctctgttcctgtttgtacaggcagcagcacagagcacagacgctagtggctggcgacttggctcttcttcgtcctcctctgctcgcatcagacacctcactggctaactctaacagtgccctaacttaaccaggagtaaaaaaaaaaacttatctttaccagtatatctccattggttcttgtgaagaggagctcctcctctcctctctctgtctctcaaggggtgtgacaggtggggcccgtagtcagggtgagatctactccactcttggatgctgcgatcgttctgtttttaccaccagcctcggcgcttggatcatccgagctggaagaagggtaatttatctggcagtttgtttcgccccaaaaagctttttgatcatcacatgcacgtttcgatcttaccattaccatgatggattatacatatattcacttggtttttactgaaagtaatactactggtagcacatcaagattattatttttctgttactttaagcatgtatacatggatgcatctgaataaaagaatcttgcaatcaaattaacctcgaagcatgtcggcatgttgcttcagaagaactcatcatcagcaagacacgttctttcttgcataatcttagtgtagtactattatgcatgcccaaccccctccgtaccaaaaaaaacaaaccctgatttccgtgtacaacgtttgaccgtccgtcttatttaaaaaattatataaaaaattaaaaagacaagttacgcataaaatattaatcatgttttatcatctaacaacaatgaaaatacgaattataaaaaaatttcatataagacggacagtcaaagttggacacggaaacctagagtttgctttttttttaaggacggatggagtaggtgctagcaccctggagcaaacaggatacttaactgtgagcattagggaacagtatagtacttaactgtgagagtgagcattaagaacaggtacaatagcaggctataagccagctgcaaacatattttaaggagataaataaggagagagaagggcagcgggctacagatttgtagccagctgtagcacggacttcaagacgcagtgtgtgtatgacatgtgggaccaagtattgatagtgtagtatgtaactattgtatgaatgagctattagattgactatatatagatgaattggagctagtggttggctattctattaaacttgctcttagggagaaagatttgaactttgtcttgagttgtgtgggacataatcctagtagggagcagcaggacaggacaatgacaaggcaaaaacctgcaagagaccaagaaatccaagatgccatcggagttggcaagcagccagtgtatgtactatgctggcttgtaccgtttgcttgacctgacaccagtaacatttgcttttggagtttttgagctttggtgacattcacaagcatactcctgtgaatgcatggaattcgaggtatatactctggtttcggaacacaggtccaaaaaacttgctaaaactgaggaggaattgggggtgtgcagagtggagtagaatgcaatgcacgggttgcatgtctttggaattagaatctactagtagctaggaaatgttagttttgaccgtaattttgcacggttctacaacccggtgtgtactcaaaatcagatagaattagcaattgttcgtgcgagtttgtttcgcggtttgcagatcgaaattggcattggcttgttacgagtgtcagcgtcgatgcttctgttcagttaaagatatgtggttcaaatgcgttcgagaaaaaaaaatgtggttcaaatctgtaccgctctttccctctctttttttttttaacttttctttcctttttcttttcctttccgttgttcaaattgaacagcagaaggtagcgccttgactcgatgcttttgacctctcagatcagctactatggccggtcatgttcagtgatcgtaataatttctgccctggttttcgatcgactttgtgtgtgaacacggttcgttgcagctacaaattgccatgcccttttgctttagagaaaagtcggtgatcagatcagctaatcaaagtggaaaactagctttcctctggtaagtgcagatattagagtccagttagttggggtggaacgggaccgatttgatcgacctaggttcaggaaaagcactacggagtactagctggagtattaccttggttgttggtctgaactgtatctgctcaacgttgaaccaaccaactattgatttattttccttatcctcccagagctccagtagtccagtgccattgacacgttccgtgctgcttcagtgcttggtactagcagattgtgttatgagagactatgtaacggtgtatcatggtaatggaataattgacatcaacataataggtatcgaatataatatcgagggtaccaaatatgatacaccgtagatattagatccggtacctatgtatcatgctgacatcagcattgtactttcgataacaaacatgatatcttgtatatactaggtctcgtttttagagattatgataaagttagcatggtacatgatatctggtagatatcagatctgatatttgggtatcatcttaccgttctgtgatattcaatattgtgatcgtgtttgcgcacgacatgttacttagctcgtggggtctcatcacgtttgtgcatgggcgcagcggggctggcgtagcggcgtggcgtggagtggcgtttgccgcgcgttggagaggagggggagcgcccacatgtgatgtggggcgcgcgcggcgcgggcgatggaaagcagcagccgggccgcgcccgcgcgcacggcacgggcgcacgaatgcatgattttcgcggtgcgcccgcgttggcgctttgctccccctctcgtctactacccgtcccgcgtccgcgtgtgccgcgccgcgccacgcggccggcgaggcgaggccgcaaggcgactcgaggtacgcgcgcgtgacgcgggcgctggcgctgtgggctgtgctcgatcgactttcctcgttctcgtggtcgcgaaaaaacacacgtactgacgtacgggggttttgacgcacgcgcgcgtgcttcccggccggctgcgttgtcgctcgctcgtggtttgttgggttcgtgtgcttggcgtgaaggtctctgtcaagtggcgtgccacattgtcgtggtttgttttccatccaatagtttcgtgtagacgcaacccgttggactgttagcttcgtggcaacagctaatcccatcgagtcgttgcaagtaggcacgcgcgcctttgctccatggtgatactcttgataacacgaaacgtaacagaagcccaacacagatccattgtcgtctagtccggttaggatatctggctttcacccagacgacccgggttcaaatcccggcaatggaacaattttttttgttttttttttggtttcacactcacgggcttcagtctgacgctgtacaaaggcccacttcgggatgcagtgggcttcctcagagggcccatattcacccttttcatgccgttctattcggttgcgtttggtctgccgtatggcagtggtgggatgaaaacgagaaaatggacatttagccatgttcaaaacacggtttggctataatgccatcacgaaaacacgtttcgctaaaatgccaatatgaagcgtgtgctcaccgccactttgccattttagcccttttgtgcattttcgaaatcattttcgctcctccttcggatgacaagacaaaattgcccttcatgtcctccgccgccgccgttgagggagaggagctcgtcctcgccggtcatctccatgtccaccacgagcagctcaccgtcttcctcctcgtcctcctccatggatggcgtctagagcagcgctatatgggatagcctagacggtgaggtggccggcgagtcctccgacatcttcccctccctggacctcgccacctccgccgactacctcgccgcggtcaacgacgacatctctgaggtcacttcgccgcggtcgacgatggcggctaggatttcgaagcggccccatggcctcgccggcgacggaagtgaaggggtagccccatggcctcgccagtgacggaggcgaagggggatgcgatggagaggcaacagcagctgctggcgagccttgccggcgaaggaggcggagagggacgctgtggagaggcggcagcagctgctagcgagctggagcgcaagcctccgctgccacgaggccacctcggcgaccttgcctccgcctttgtggtgccgtatggcggtggcgggcaggggcagcctccacccgcccgacctcgaggatgccgccgccgccgccgccgccgcttcgtctacaagcaccgccgagtcctccacctcgacgacctcgcctccgcctcgtcgagcatcccggccatcgacattggcacgctggtgggggtgggggttcggcatcccggccatcgtcatggccgtcaccatcgtcagcttcttcgtcggcggacagggcgtcgtcgtcggcggtgtggaggtcgtgtatctcccttcgctgcggcgttgccatgcccgcgtcgccatcgttgccgccgccgccgccatgtgttcgctcgccgcctcctccatttcagccacgtagaccacctcgccgcgctcgttgtcttcctcccatgaactggatcgatcctcttttagccggcgagcaagggcaatttggtcccatcaagctacattccaaccaaaatgcaattgaaatgcacaaaatggccaacatggccaagtgg

SEQ ID NO: 20962 - DNA, 2028 bp, Oryza sativa
tgcgtacttgatggaggttgtgcaaacttcttgttctgttactcagatgattaatctagtcttgcactcttgcatgcttaggatgctctcagggtatgccttgattggcaccatttgcttcagtgcttcacattgtcgaaaataacgaatactggttgtccactccacatagaggttttaacgatgataatgcatatagtgtctttgatcattttatcgaggattaaactattcgatgatgcagatatattaactacagtcaaaattgaatattctattaaaataattagtctcctaaactacacctaacattgatattgatcaaattacggttttgggcataagttttaaattattgtgaactatctataaattgtggtcacatagaccaaaacactagctttcaagtttacactaatggcctggaattggtgtaatggtgtgcacaagcatacaatatcttttgtgaatctctctgctcaaacattaaaaatccgcaggagtatttgcaaggaaatccaatgtggatggagtactgcaaggtacccctggtgaccctagggttcgagaacagctacgacgtcttcgtcaaagttcacgggggtggtctctcgggccaagcccaggccatttgcctcggcgtcgcccgtgcactggtgaagatcagcaccgcaaacaaagttactctgaggggagaaggtttgctgacaagagacacccgtatagttgaaaggaagaaggctggtcttaagaaggcacgcaagcgcccgcagttctcaaagcgttagagtatgcacaaccttgttgttagactcatttaaaagttttacattccacagtttgtattggcccttctctgttattttctgtgcaaattatgtgctcctcaccacagacttgtaatcttcgttctctgtaagcaattttattgaggtcacaaaaggcaattatcttgaaatcattcctgatatctgatgagaacagctgctcaactttacatcctcatatagtcacataagacaattataaaggtcttgaattctgaatgcagagtaggagtattttttatacttctttttagccaattaccatgttggaaatgcctttttgtagggaaactagatagaaaatggcggctctaccataaagatcaaatgcaaatatgcacaattctgtcaagcatgctctatcttgtccatctgtgaagttgtctcgaattgtttcaaatccaaaaagaaccataaattttgcttcctcctctcaagtcgtaagtcgtaaatggtaactgcatccgtgtcgccgaagctataaaagcgatcggaaataatcagaaacgttttccttttgttttcataaaaagggggtaaacgtatttaaaaaattcatacttataaaattaactatttagtgttaacttcaacgtgaatggtaaaactttctaaaataaaatcttatatgcgcgaatgagaggtgtataagtgttactccctccgttttaggttataagatgaattccttcaaattgaccaagtttatagaaaaactagtaatattttcgatccaagataaatttattataaaactatgattaattattaatttaataaaattaatttggtaatgtaaatattattatatttgtctataaactttattaaacttggagcagtttgactttaatcaaaatcaaaacatcttataacctgaaacgaagggagtatttatcaagagagttgttgattatgtttagccatgtggctttaaagtggggtctaagaataagtttaaactaaaatgataaattgaacaactaatatgaacatattaaaacgtataaactgagccactttagatattcaaaaaaaaatccgttgcttttttcacccctactcaaaacgacagatccgtacaaagcccgaccgagccattccgactcgcgctgggcgaaaccggttagccccagccgctcgagcccaccaccggaggcggcccgtctggttctccccggagccccgagctccgctccgt

SEQ ID NO: 20963 - DNA, 530 bp, Oryza sativa
ccccccccccccccccaccccaattaggcccattggacttgtttttgtgtaaatgggagtgggaccatgaccttgaaaccctaatccctatttccccaattctccaatccgagcacctagtcaaatcggtgaaattcaacggcgtcacggcgctgaggggagcgggcgcgccggcgtgcggcggcgcggcgggcttgctcgcggtcgcggagggaagcggcagccggcagccgtgcggtgtggcggcggcgctgccgcgcagggcggcctcgaggaggggagcgggctaacggccgccggtagcccgcaggcggcagggtgggtgcggcggggcggtgccaggcagaggcaggctgcaggcaggccgagcaaacaacaaaagaaagagaaggattcaactgaagaaatcaacacaaaatggatagaaagagaaaaggaaaggcattggcttcacaaaagaggtacatattcttgaatttttgacaatttcagaacattgagagagatatattcaaaggacttgattttca

SEQ ID NO: 20964 - DNA, 2943 bp, Oryza sativa
catggattcagcaggcagttcaaaaggttgacctatttgggaatctccggatctatgcttattttcaactccccgaagcatttcgtcgcttgctacgcccttcctcgtctctgggtacctaggtatccaccgcaagcctttcctcttttgaacctcgccattaacgttaaggctatgccatcctaaggtgctactaaatggaaggatcttatcaacgtccatgaatgcgaaatcatagatcgaactgccgaattggcaaaattcggtgctatcatagtatccgctaagttcacgggctggagataagcggactcgaaccgctgacatccgccacagggtaaaccaccgcctctcaggcctccccgacgggttctaccatagaggccaacgatagacaataactcccccccgaacacagcttacaactttcatcgttgtttttggtgaattatcagtgtgcagatgaatttcatccactgctattgaagaagcttttagagggatatcttgtcttgtcggactaagagctcttatctctttcttttcccacggtaactagagattgaataatagaagcctgattcaataatagaagccagattcaatatcataagaaaatagagattgtagcgtagagtcaggctatcccatgtttgcaataacagctttgggatctttcctgttaatgatgaatagcttgcctcaacagagaatcagaattctttttattcggtataacaaccttaaaaacgaatcgatctagatgccccgctcttgccatctttgatggaattgaatcatcaactgacttacttgaggaataaaaaaatctgcagcacgggtccaataatttgatcgatacgccctgtacttttttcttcaattgtagaaaccccgggatgagaagtagtaggattggttctcataattaaaaaaaaaggaatttatagaaatttttcttttattcttgttgaataatgccaaatcaacaccaaaaaaatatccaaaaatccaacaaaagtcaaaaggaaatgaattagttaattcattattcaatgaataatttcgatacctctgagtgcatttagacttgatttcgttcaatgaaagcgaactagcgggcagaattcctctgagtgcaattcccaagcaaggtcacccacttaagtatggtaccgcgcttccctgtacatatagaatccttcctttgcctgaaacaattccaccaaccaaatcaagccagccgggtatcctaggagacaggggaaaaagcactttacaaatcactcgctgggtcgggggatgcttataagaaatcagtagctggggttgtgcttgttgttcattccttcactctggaagtacgcactcattatagcaaaacaacccactaaactccctgctgttcactccattccctactagattatttgagacagtagctgtgaactactcccctccctctttgagagggacgaaaagactctttccattcttcaagctactaacttccactaatacattcaagcacgaagtttcctccaactattggtaatagttgcatcgagatattcgtagagactagctatagactttgtgagtcagtgtgctcattaattacccaattaattcaccaggacagtaaggatggagctgctcattccacgattgacaaagctagaacgagctctctcttacttagaaagagtctcacatacctggtagaagtgtgcattttacctatacccatacctcttctatctatgctccaagcatgatagcaattgcattaagctattggtgcttctttctcacccggcccgagatgggtgttgaaggcacgtgtagtttaacaacttccttacgttgacgcatatcatcatggggaatcgagtgagttcttcggatcgacggacaagaggaccttttcattcatctcacctatcctacgcagatttataatctaattaaagaaaagaaactcttgcttttagaaatgaatttcacatttctctacgcaagccaaggaatctgtctacaactggtacttcacatgccttagaagtagatttgaatgagaatgaatgaaatgagtaaacgttactaggaaggtgaactcgctatcaaactacagcctgcgctagtggctcaatccgttgcttgttgggttgaacatattctttttctttgacggatagcttctcggctcttgcctggcctggagttgaagaaggaactggtagcacttgaatcagaggaagatcggaatagcagacgagttgcagcttttagtattgttcacagcttggatgcctttatgccaattttcccgtgtttatggaaagcccgtctttttggcagaatatagccccactaggttcttttgttctcgaataagcagctctagaagctctcgcatgcgttagactgactacgccttctatctttctttgtattttattctaagcgtggtaaggatattgaattaatggcatggaacatatttgctagcccctatagttggatgttgctcctatctagcgagaggggtggcataggagccgtctataggtccccaaacgaggcggcaccaaggagagaccagagacaaccctgctagtgaatggactacataaccatcgagaccggtgaaagaaaaaaaattgaaaaccctagtgttccgctcttttcaaagttgccaggaaactaagagaaccggagaatcaaaacctgtgaagatgcacaagcaggtaagcctagccggagtaaatattactgtactacacgggaaaaatgcgatcaacttgagtgcaatgagatatttctccttcggtctttcaaaaactgagatatttttttccctttgatccctccaattaatacacagcgaatttcactttccatctcacaccaaaaccacggtcgcaaactgaccacggcaca

SEQ ID NO: 20965 - DNA, 6461 bp, Oryza sativa
cagttgcagataggcccaaaaggctagcgcattttgttggtgtgcgtagccaacccgcgcgcgcgcgcgtctccggtccggggagcgaggcgtacgtacgtacgtggggcgcggagtggccgcgcgcgccgttgctgcccctcgtcacgggggtagggggacgcgcggacaagcctcggcagcggggagccggacgcggagatcacgtggcggcatgggcgtcctaaggctttttgacgtatagtagaggaggtagcctgtgccattgatggatgagagtacgtaggagtactttgctaaagtagtagtagctgggttcagcgaacgctgcgcggtttcgtttctgtgcgtggattcgtcaccgtcggttacgcataggacaagctgcgtccaaggaatagaatagagtggtggagtcactctcttagctcgatcgctaacatatggattcataaattggcgtggctgcatatggaacgcagctagcaagcgtacagacttatatggaagccagcatatattagtagtatcaaacagatggatcgcgccgattgcccatgcatcatgcatgtaactcaagcgactggctagcttatccataggtctgccgcaaactcatgcacatatggtccgtggaacagaaatacagatcaggccagtccaaactccaaagttcaaagtccaaacatggggggtgtccggttggggagcaaaaactcgcgtcaagaaggacgccaaaaaaaggcgcggcacgcaccggcaccattttccaggcccatgcatgcatgcatgatgcaccgatgcgcgcagtcacgcactagacggtcgatcaatccgtgcagagcgccagagataacgtacttaaattatcccggtacaaacgactaaacgagtaaacgacgaatactaccctacgacgcccaggccacggagtgtacagaccgccaccggcgtccgcattcggtttttggctagcactcgcagcagaggcccgggttgttgggtcactgcgcgcgtggcgccgtgcatgcgcgcgacgaaacgatcggtggtgatcgacccatcatctgccttgtcccaaccgggcgccggccacgtacgtatatacgcccccaccccgttggcgcacgacgcacgcgcacatgccgcccggcacgcagggccgcggtgcccggctcgcggggcgccacccgcgccgcacgactgcccacccggtcccttcccctgccggccggcccaaccaatcccccgtgcccgcgcgcaccaaaccgaccatcccgacggcgaatcgcgtggtgtgtcgcgcgcgcgcgcggctagctctcggacgatcgcgctcgcggagtcgcgggggttcggccagtttccgcgaacgttcgctcggcggagggcggagagtagatcctgtccaccgttgcgtggaccggaggcgggccgcgggggaggcaggcggaatcttggggcggccagtcggcacgcacgtctcaacgtggcccagatgcgatccgggggggaggactagtttactcgcggccgtacggtgccgcacctgtacgcttgtactcctacgtgactgaacgaccaggaaacggaatgtgttgttggcctttggttctgaggagagaacggccggggaagctgcagagatcgagtcgatttggatcgccgacgcccgttgatccgtagagaacgatcggttgaaattggtagaggaagaagcacggaaattacaacagcacatgtacagctagaggagagtaggagacagggttttttttcttggttgacccttcatacaaatgccgtgcaaaatattcacaaaacccaaccctgcatcaagctagagtatttaaaccgttcccgtccaatgctcaatacgactatgtacatatttctcgtacaaatcacattgaaaaaaacaaatctagaattgaatgtggcacattctaatataatgaatatagatagagatatattcaaattcgtagtattatgatgtgtcacatataacactaatttgattttttatgggactggagagagcaggtaatactccagtattggtcaagttcctttctgtactgaggtgtacacttggaactaacagactggctgcctgcctgcatgcgaacaaggaactagcaagccgctccgctagctagttgcaaacgattttggactactcattggattgcgtctgctctgttttcatgatgtttgagaggccacttgcgttctcagatgcggccaaattcggttgctctcgtgaacgctcgtaccgttgtccgccaggtgctcgccggccggccggcctccattaactctgaactgacctgtgccccctctcgccctggtcacaaacgtgttgcacagttgcacgcaataatgtccaaaatgcatcattgcacacacaaacatttcgcaaaagaacatacagtagtttacatcactgtaaacatgttcgtaagctcttgcaaagagtcaacaaaaatctgtcatccatgatctgacaagcacccgatctagaaaataagcttgggcaagtacacagccctaaacatcatcatcattgtactactagttaacgtgcaaccaaaccgaagttgtgaactgcagtagtactgtagtagttatccagctaaagcaggctgtggtgcgtgcaaaccagtcaatccaacccctagattttggatgcatcgaaccgtccaagaacgagacagtctggtcccaggggcagcaacatgcaaccatttgttcttgttgcattgcaaaaccgaattcaattataatcgcttttcttgcagaattcatagcacaggctggaaaaggccggccagattgggaggcagccgtgacacatagattcagagaatgcctctcgaccagaaaggagaaccacgtgttgtattccctgaattccgatctgatcctgtcgtaacatggcgctcataatgcgttcgtaagttccagttgcaatggcactcgagtagacaggaagcatttttggccctagcagggtgtatttgccgggaaccagcatgagccaataattagtagggatggataaactgaacaagaaggttggccgactctgccttttagttttagtgtgattactgattaggttggtgattctcgaatcatttttatgtgttaaatatcagtagtatatcctgaaaaatgatggtgagcattagactatatgaagcacagagatttcactttatacctacaatatatatgcatcctttaaagtacatcatagaatatgctgtccatttttctgaacacgtttcaagattaaaagaaacaagaagctccgggcctagggaaccatgaagtaacccactattttttttagtgaatatcgaattctaaatttagaagtgtaatcagggtaagcttatgcctcatcctggttgggaaggttatggtagtttcagtcattggaattactctgttcctatatatatagtccttatcctttttgttattgcgttatgatagagggaaagagaaaagaaataatagaaattgggccatgtttcccgagagaggctgccttctctcaggtcagcagttttataattatagttgactgctcaatgacgatctgaccgctctactcactcgtctacgctccgaccattcagtcaaaatcgaaaaaaaaaaatgtttccttgaaaaagtctaagaaatagtagtagtagtcaagaagtgcacttttcgatttatagggatccctatctttatctctatccacgatgcctatcttctgttttatattgatagaaggttgctgaacagagaacatgcacggatcgatccaccagaagaagaatctggcccgtgcgtaggtctaatacaggcccatgcagatgattactatagatgggccacttagcgcgaagaaccgaaggcctgatgttttgggcctatatggcccttcagcaaatttggcccatgaaatctagatattttattccaccaggagtcatgcaaagagatccctggagtagtttggattgctaccaattgtaggctgtagcgatcaggattttttatattttagccctcgtgtttctctccctcccctactgcctctcttccgccggcggcgagccggcgacggctcacggctgccttccgcggcgtcgccgaacggcagtcttatcgccgtgccgcttctctgaatctccgcccatcacctcctttccttaagcgggaagcactacgtctccgagtagagggcgcggggaagcgcccatggtcgccacgccgtcgcggtctccatcggccacggcaatgaacgttgctgctatggccaccggagcctggtactgaagcgcaccattgaactgacgaggtgatccgtgatcagcgcctcaagagccttccctggtttggcggatgaatctctggcgggtgcattctgggcccgcaacttgctcgacgaaatgccgaccacgtgtttcattcctctgtggctctgtctgacgcaacatggttaccaagatcaagccgttggcaccaattagagccgaaatgatcgaggtaatatttcagtttctttgccaggttcatcgtgactttatttctaatcaatttagaagactagatcagattaacatagatggacaagaactgcattgtggatttgtggtaggttcagaaattgatgatcatgtattcatgtggagtgtaacttcaccactcttcattcagacccacaatgactaaaattacaaaataaatagactttccaagctatagtgctatgcacatacggtatccaaatccatgactgattgtggagtcatactggagttagggcgtaatccagaatcagcaatcagcagtggtcaccgggaggcgatgaaccagaggttgaagagtgaggaagcggccgttaggaaccaggacaagaaagccatcatcgccgacagctgatacctcccacagaatctgggagagcagtgagatccatggaattggagcagaagatcgatgaccgccgcacttgagctggcagctgctagtgaaagtattgccaggacctgaaaaagattgcacgcaaagttcttgatctctatctgatttttacaagagagggtgaaatataaagcttaatgagaaccacaaggagatgtgctctttctacatacccagtctccgatgacgacaatgaccatgacacctggtacccgaagagggcaccctacaagtatggagtacacgtcgatcatggcgagtgtacagctccaggggatcaccaagcccattattgtaactaggaagctaccaagtttacaacaaattcagcataagtaactagaggacatgaagagtttcaagggatggagcctgcagcagtagcattgagcagagtgggttgaatttggttgtgctgccaatttgattgcagaggtatgtaaggagttaaggacaaatttgcatcataaaaccagatggctgatcagctaaacatgtctagtgatcactggggatatggcttaaacctctagaactatggccatgcagtccatgtctgaacaaaagtaggagaaatccaaacggtggcacgctcaggcgagcacttaccagaaggcagtatagctgaagaactcgacgccgacggacatgaacagcagggacgccgacgagaagacggcctgcccgacgcggaggccgaggctgccggcgctcccgacggcgccggcccccgccctctcccggttctccatcccccggcggcgccttcacaccgccggctcatgacatccttgcttcctcggcgagtccaccgtcgccgccggccagctctgcgtggaattcttggccggtgcaacggagatgctgagtgaggctagaggaagacgaagacgaaaaggcagggaaaaaaaaagagggggacaagatgaaaaggccggggctttgggtggatggatacggtggcacgggaggtggagctgattcttgattcttcgtttcttccctttcctctcgagagctctccttcctctctttctcgtcgctgcttgtcatggttactgcttttgacttcgagtaattctcctcctcacgtcgctgtctccacctggatcagaacagattcttccttttgttttgtgcagagcccgactcggagtggcactctagcagctgaaatggcacgatctaattgcactcttgtacgctgaccacgacatctggggagctaccaagcttggcacgtaacgtaaccgtgtgcatttcgactttccggtaatctttttctctattcagtttgatcgatcgtgttcactgattgcagctgcgataatccaatggacaattgattctctcctcttctcttctggcgtgttgcatacgagtggttttggatgatcactgttccacttataggatcgaatcataagaactaagccatcagagggggggtgaatggttggtatacccaa

SEQ ID NO: 20966 - DNA, 642 bp, Oryza sativa
ttatccccaagccgactcccggtccatcaccgcaaatactctcccgagacatcgagtcacctacacatggaacaaacaaagaaatcatattccgagaccaagctatctccaacttgactcattagcagcaaacaatagtattatatacgtatagtatccatctagaagtcataatcatgaaataaactcggatatccaaataaacaacccgaaatcgaaaccgacacagtgtcggcctgtcagaccgcgggctgcgccggtctgaccgcgcaatacacgccggtctgaccggctaccagagcccggtctgaccggtcacataaaatgacgaatcctgcaatcatctgtgaaatccattcatctccaaaaccacttcgtgaataaattccaaataacaaaaccaataatctccgatgcccaattgttcatcacaaaataataatcaaaaacacctttgattttacaatctcccccttgatgaacacattggcaaacccattaaaatgttttggtgtttggaaaaataaaaacaaaagtggtaaaaagcacacttcgtacaaacgtacacatcgtgctaaaaatccaaaagaaaacttctcccccttttgaaagaaagaaattcccaattggggctgcaggaat

SEQ ID NO: 20967 - DNA, 9543 bp, Oryza sativa
gcgtgttaatgagtgaggttcactcccgaacacaccctagctatcctggtaagaacaaggaagctccagtgctaatgaagcaagcggatatttagattagcgccataaagttggattaagattccagggagtcggcgatggtgatggctattatcttgttcattgtcaccctgttctgttatcacttattagccatatggagcaggtgtgcaaattatttgtgactaatgctgagaatcaaacttgatgcataaatactgcatacaattgtagatagccaacaaactttgttcgcggtggcggctatcttagcacttgtgtgaggtcgcattactatgcattaatggctattgtttagagatgaaagtggatggagaaaccgaaagtgatcggtgtgatggtgcccaagcgagactaagtattgttttattttctcaatgttgaacggtcgccttgtccactatcaaaatcccgattgtgcgtgttgaactagcccgtgtgttgtgtgcatgctggcatgctgccacactcaaatagtcataggactggagatggacacttcaacgtactaacaggttacaaggggtgtgtttagttcacgtcaaaattgaaagttaagttaaaattagaacgatgtgataaaaaagttgaaagtttatgtgtagaaaagttttgatgcgatgaaaaagttaaaagtttgaagaaaaaatttagaactaaactcggcgaaggataaccaaagttgtcgcgccagcatttgtacggtcctgaggaccaccaccattcctgtgcgtaagtaaattatactacgtagtactgaataccgatccattatgtaaaagcaggtttaatagtatagctaactactagctccaaatcatctataatcaatgtaatagctaattcatacaatagttgcttactatactattaatacctggtcctgcctgtcatacacacattacgtcttggagtccgtgttgcagcgggctacagatctgtagcccgctgctcttatctctctttttttatctctttacaatatgtttacagttggcttatagcctgctattgtaactgctctaaaatactccacccgtcaacctgaccgacctagctatatgaccctgacccaataaagaggccaaaagatggcttattggggaaataagctaaacgacttaattacaaacaaaaaataatttacaaataaaacttttatatacgtattattaatgatataaatgcaaatactgaaaaataaattttgatgaaaaaaattcttaaaatcaatttcaaatttaaggttgaaaatttaaattttagctgataagcataagcgaaaaaaaggcaagaaaaccccagataatcaaccttgagtaaaatagaagcgggctaacaactatcctgacagtactgagtataaaacagatgcacatgcattcttacctccacaatagtttttgctcggaatctttatggacttgcaaatttcctgtgggcatggagttcgcaatctttcatctggctcggcggcttgacgatcagcacatccacaaaactgcacccggcccaactccctcagctatgcaaaagggataagacatgaagaatacacttcctagtcacagatgcatacagagcttaaaaaagatgcaatcattctttaccttagttgcctgaggcgatccaaaatgggcaggcaaatgggcatcaccttcgcgattgccttgccaacagtgtatctttttggtagctactttcccataaagcggtgcgcactagcacaacactgattcttccaccacatcaaaatcaatcgaaccaaaatgcaaaacggcagttgctcccggatggaaacaccccttggagcttggaattccacaatctgcttattgcacatggcaagctacagcctacagaacgccaccaactgaattgacatatatctaacgttttgttaacacagttatcagtcacataaacgttccagctaatcaattgtaggttcaagtacaatcatacccttacaatatagccggataacaggatcttaaaaaaaataagtacaatcaagccacgagttcagcaagaaaactggaattacacttttgtcgctttacctaaaccatttgatactcatcaccttcctggagacttcttgcacaacccctcaaccctcatgctaaaagttcaacatcctcaatcctaaatagtgctcatgatagcaacctcacctatcaaatcgtgcaaaaaggactttattagccaaccaaaagttgcaaatggaaaggaggggattgcaatcagggtcgacatacttagcaacagaacaaaagagggggcagtggatgctaaggaaaccatacttcaactaaatagctattttagttaattgacctagcataccgctacaaaagtatcaacaaattactattggcgagtggttagcttctgtctttgattgctgcccaggaccattctaagattattatttttttaattattgtaggcttcagtgatgcaaaggcataaaagaggtactataacattgcggtatggaccaacatgtttctacctagatccaaaagtaccttagtttaacatgtggaataatgtgctactggtccactacagctaccatatcaaggtcttgttattgccacgacagtggtctaataacaatcaagattgtgaaaaccatttacaaattgtactgatagttacaacaatggccggccctgaccctgatgttgactaatttcatgaatcacaatattgtaacaaattgcgtccaaggtcaatagtggctgcctatctgtcaaaagccagttataaaccaggaaacctcgacctttttcttgcaacactatagtatccgaacgatgtagtttcttgcaacagaaaaactcagtcgagatacaaaatacatgaaaaactttcatgatagattgtcttgggctacaaacttttcattccaaaatgttcaaacaattttttttccatagaagactataaataattttaagatgcctataaataatggtgcaaagaaaagacagaacatttcagcagatattatgctatggaatataggtatctaacaagaaaaatcatcctacgccaaaagtgtttataatagagaatatcttgtgacgtatctctgattaagtgcatcaaatcatctttagttttaactataagctcatgctggagcttaaattgttgatgacataattaatataggtttgctggtttatgatgcatgtagtctacaggggcattttggtttattggatgcaaatgatggcataaagcgtttaaggtggtgtgacatttccttagcaaatcttttgcactcaaattttaaaaattaaatatttgaacttgtatgctaataaaacaccataatcacatagtacggataatactgccttcttcaatacaaatttgacttactagataggtcttcaagtctagaaaatagagaggtcaggtggtggtccatatactgatttccaggacaatggaatagtccatccattggacccatttcctgaaaattcacagcaggatttgtaaacacaggattccaaaatctgatcacagaatattgaatatcgatattcctaaagaaggaaagtaaggcaaattaccaacggttaatagatgaaaaactaataaacttgatatatagatgtaccatggaactgttcagggccttgagcaacaagtttgcatgctgcctcagccaactggaaagattctggcatattgtccccttctgagcagtagcatagtacacaagtaactttcaagcctttagcctgtaataaaataatgtcattaaacatattacaacagtgacctctaatggtaaaaacaaatcaatcaaaccttgcaggcagagaatagtgctgcaaatggcaagctcgagtagtaatcatttatcgtcatctcctcaggatcaccagtcatatcttctgaaagatgaccaccttcaactaggctagcaagacacttccacctttgctgagatggatcgtattcctcaagcttcttccagcctaagttctcacatttcggatcagaaccgtcctcgttgcaacttgaaaggtaatatacttgcatatcactaatagataaaacaattaatgagaatgagacgcaatcctaatcctaatcataaaagacaggatatgtgaagctatacatttcaattacctggatgcatcaattatccttctcttgcctgaatctaaacttgaaaggataacaacatggtctttttcaatgctgcttataaaattagcaacattttttgcaaatgaaaccaccatcccctgaaccagtataaaaggtttaaaggtgtcacaactcatgaaaaaaatcatcaattataggtgcagactgcagacaacttataggacttcaccaactaccaaaattccaaacaaagagtgaaaggcccaagcatcgcctgcaactctagtctcacccccatcgtacctctttaaagaaaaggtcaatagatcaataactatattttctctaaatcatttcagaataacaaatgtgctatgtaaatttagttcacaaggaacaaatatccaagggacagatgttagtctaggaaatgtaatgtgtgatgtacaaaaaagaaagggaagctgattctataatttcaaacaaatggagtacaattttgatattataatatcaaatacaatagagctcaatattgttctttatgcattcttgaaagaaccctgaagcatgtgcaacaaagctcacaagattctgtaactacatgaatcataatcacccacgtaagcaagtgaaaagtatctttaagtactctttgagatttataaagttaaaaccgaaaatatgtggcaaataggtaaaatcaacatactgtaataattggggaccgttgctgtatgaaggccagcctatgggatggagattcataagctgtaaagagaaaagagacagaaggtgacaaagtaagtagacattatatttcaattattattcacacactaagtagtgccattgctgaagaacaatatgcgtggctgaatcttaaggtattttttttaatttcttgtgccgattattctcttagacctgaacaaggcatttcatcaagtagctggtgtgcagaggaggaattgttcatgccggactataacacatttcatcgaacagttggtgtgcataatagaaggatttaaagtacgaacacacccaatcaccagttcaccacccctaacacaatccaatccatcaagcgtcctgctagcatagcacagcagagcaaaggacagagcacccaaccttccagcgcgagcgcgagatcaccgacggcgtcggggccgaaggcgtcgttgccggcgcagggcagcacggacggctcgtcgaggtacgccacccgcctcgcgcgcgacgaagacaccagcaggtcgacggcgagctgccccacgttgccgatcgagagcgccggctgcagccccccaaaaaaaggatcaccaacccgcgtcatgagccatggaggcaaagctattcaaaccggagagaggagagaggtttagggcgacccggaccatgaggagggtggagcagtcgggcgagaaggactccccctcaacgacggcgtgctccatcgcggcggcggcggcgctggatcccttcaaaacttgggcgagaagttgaagggctcgagtgggctagctatggaggcaggcagcggatgggagaaagacgagaagaaatacgccgcttttgttgcgtagaggagagtggagacggagagaattcgatttcgttgtgggctcaaattgggccgtgattttagttgcgggctttgggagttaaatgggccggattggaggtagcctggacttcctggcccattaattaaaatcagacgtatccaatcggtgcagtgcaggtcgtttggtaaaccggacagttattactgaacggtttacgtgaaccttgataatagttactccatggacacaacccaccctataagctcttcgtttcttggatactcaggccagctacttgattacagagcttcttggatagcacgttactcatcatgcccaggattagatcattcaaacaaaaattcaaagaagatcctaatactttctttccaacaagatttacatacagaagccactgagaattggttgacaagggcaaacgttcaaggttcaagtaaagagtagtccccgccaaaaaagaaagaagaaaagaaagagtaaagagtagtcacgggctcacggcaatagcaagccagttgagaaatcagatgggacatcagacaaaaagttatcagaaccagcactagtgctgcatatattaaccaatgaatcgactccaaatttgaaggattacaacccatatgatacaattgatgcaaaatagcaaggcaaagtggttatatacagagagtatatctactatatacacggtacacgcttccatcaatccattttaccggcgaaagcccagcggccagtgagcggcgtcaggcaggggcgaagcggtccatgagcatgcacacggtggcctcggagtcggagaggaggatgctgctgtccctcgtcctcgtcgtgatctcctgcacaacaccatcaccaaccttactcttgcagctctccccttcgctctgagctcgctggccgaccccggcgtcggccgccggtgccgccccccggcccatcttggcgaactcccccagccaaactccaaccaggcccgccattgattaatgattagtctgttcctctctgcctctccgagctagctgagtgaattcactagcttcgcacacacactccaaagaaaagctcagttgagtagtagtacttgactggttgcttcgttggctaaccgcgcggcgttggggctctacttatacgcgtactccggctccggcaaccgtggggagacgggaagacgaagctacgtgtctagttgttgcgatatgtgagagcggagcgggaggaggaatagtcgaggaaagctgcgtgtggtttcggcgccgtgcgcacggccgcgcccgcctctcttattggcgttttgtccgcttcgggctggaggaggaccacgccacgcgcggcgccatgtgacgcgcacggcacggcgcgacgcgggtctgattcgagggaggcttgggggccatcgtgtggctggtgggtgcccgagcgagcagcgcgcggggaatcagcgtggatataccaccggttgggctcccgcgatccggcgagcggatgcggagatgccgcggtgggatgctaaaccgacggggcgtggagtggtatttgatccgggggatcaaaccggatcggatcgtactactgtgcttcgtgaggtgcaggaacgccatgtcgtggtcgcgcacctcgttgttgtggactgtgttggagtaacggtgtgccaaaactgcgggagcattggagaacatcgatccatggtattggtaaatggtaatggtatggccgatagtttcagaatcaccgaggcacgtgaaattgtactagtatttgtgattttgtgcacctttgcaactgttgcgacacaaggtttgcacgtttttaactcaacgttggttaactaccacgagctgacgataatgtttttactcccccacaaggaatataattttttcctcttctttacttcttcaccatctgtaatggctcaccgctggcacagtcggtaccctgtaccctgaatcccttttttcataatgaatggaagatttagggactgtttagttgatgaaatgaaaattttttaatgtcacatcggacatttgaccggatatcggaaggggttttcggacacgaatgaaaaaattaattttataactcgcctggaaaccgcgagacggatcttttgagactaattaatccgtcattagcacatatgtgttactgtaacacttatggttaatcatggtctaattaggctcaaaagattcgtatcgcggtttacacgcaaactgtgcaattagtttttttatttatatttaatgctatatatgtccaaaaattcgatatgatgtttttttttgtaaaagttttttttttaactaaacaggtcctaggtggagaatctctcccctcctatgattattccaaaaaaaaaatttctactcccccgatttactcagcttcatcgtagagatcagatcttttgtatgtcagttgtcgatcagcttctggatctgagtttctgaattatgatacgtgttggtgttggtcagtaacagtaaaggaggcaaatatctttcctggaagtgaagcgagatatttcacacgtatcaacaagtagaacactcaaatcaaaatatctggttttcaagaaaaagatgaaaatatctgatttaaccgagtggtggcgatgaattatagaatccccttcactcgaatcgtctcatgatcgtgtacttcgaacccgctaaaccatcatatctcgattgaagaaaagtgggctttcgctacagagacttccaggattcagacagtactgcagtgatatttcagaagatttacacaaaaatcacacgagaccgtcgaaatcaccaggttcagattcatagctaaaggtatagtagctattttacgatggagagagtgccctgtaacgccaagctaagcctactctactggccgaagcaatcgatcaggatggacaagaaagcgtcttcttggatcacgctcgccggcgcgccaccaacggcagcggcctgctgcttcttggcagccgtttccacggccgcgccgtcaggcttgttctggccgtcgtcagaacgagccgtgcagcctcgcttcgaagccaccgtcgtcctgaacgcctgcgcgccgctgacccggatcctctcccgttccaccgtccaaatgtctaccaggctcgacatcgatcccgatcgatccgatcgccgatcgaccacagtttcttcagaactcagagcagagatcaaacaaggtggattgatgaaagcaaagatcgaacagagtctggagaggcgtttgtatgacgaccgggacaatttatagggttttttttgcagctagcacactgatgtgctgatgtcagggctgctgggacctagcagaataacaattggaacctagtgacgccattcttggcacacaggattgaagcaggtcagccatctggatgtcgttcttgccgctttaatttagacagtgcaacgcccaccggggccgcggtctgaaagccggcagggacgcgggggaggagctatctgagacacgcgcgcgatcttgataggaggacgagctagctagctgcgcggtgggcgcgcggtttcgtgcccatgccggcggtgagcgggaaattccggtgggtggagtcgtcgtgttaccgtgggctcgtgacggcgacggcgacgacagatgcatcctggactgttctgccacgtcgccatcccgcgtactactgaatctgactccccctgcaagccaacgcttttgcttactgggctgcaggaat

SEQ ID NO: 20968 - DNA, 1828 bp, Oryza sativa
cgtgcaacatgcgcaaataaccttacgatgctaataatcgctcatttggctatatattcattggcaggggtcggagatgtagaccatttcattatataaacaacatgttaataatcgctcatatttttcttaccctaataatcaacgagtttagcagtggaatatgcacacgaagagccgcgcgcgcggtcaccgttaaataaatgcaaatgcatgaagtagagattaataagttctgaagctgacacaggattgaacatgaacagaccttgtgggaatggttggagcaggaggcgatggcactactgccagtggagcagttgctgttgacgtcgtcgtcgcgcagaggaagtaggcagcagcggaactagtcgctgcggcaggcggcgcaggggagctacagatcccaaccatgtcgtcacatgccggcatcatcggtagcaccaccccaccaccaccaccaccaccatttcctcctcctccagctgccgcctccatggccacctccattcctgcctgctgctgcagctgcgcctctcctgcaaatgcgcgcgcaatggtcaatttaagccgccgcgtgcagtgcattcttagttgatgtagaggcgagatgcacttgatagtttagtgcaaatgaatgtatgcaggtttaatttctaacatgcgcacattttttttaaaaaatatatttggaggaacgtctctccctcaaaatctctttttttcttttttaggcagaggctggaagtcgtttcagtacattagaataaatcaccggggtcactgcatatatgtttagcttagttacagctggtatgtatatatacttctcaatcaatggatgatatgctttttttctaatggaaataaattgagctacatgaatacctgaggcaatgtgggatgatctgtctgtgctcttcactgtcctatacatctgcataccagtagatgagtgagtgatcaatgaggtgcatgtcttgtgttgcatgatccaaatggcttgtataattaattacatatgctaaggtggtaactagtttaaaggatatatatctggcttgtcctggttaggctagatgccgtttgtttgtcacttagtacttgacccagggattcaccagagacaaagtacacatgtagttaccaatagtaagaacacccataaaagtggtggaaaaaacaaaaagaagccatcatgcaacaagattcaccatcttctttcccttgcatggtggtagcaatagtagcttcccttttatcacctctccactctttctttctttctttcttttttctcttttttctcttctttttccaagtgatacacgtacctggaggtgactcttgacatgcgccagtgtcagatccttcacgttcatcagctccagcaccgacttcggcgtcgctcctgcagatcgatcgatcatcgccaagaacgagctcgtgagaattgagcacgcaaaacaatggagtaatcaatcgatcaatctcactatctcaggcaaaaggaaaagaaaatgtagctgcacgaattcagatcacattacgagaggacacagtgatggtgagataaggtagagctagctaggcgcttactctcgtggccgccgaggagctcgacggcgtgcacgaagcgggcgtggagcgcggtggtccatcgcatccgcggcgcgcggacgctccgcttcgagcccgccggcagctgggacgccctggccgccgcgcgcttgaacggcgcgcacccctgcggctgcaggtggtggtcgccatggcggccgccgccggcgtccgcgtgcgccggcgtcgtcggcccgagccccaggct

SEQ ID NO: 20969 - DNA, 2084 bp, Oryza sativa
catcattcagagaagtttaatgcaacaatatcctaacagcctaacaaccagatatatgttacagatgggatgacagtagcaagaacagcttcgatatgttacaaatgcatataactatgcaagaatagcctaacagccagataatcagcataagctgctccaaaacaacaaattaaaatggggtcactctgactgagaaggcaaagataagtttacctcaaattagtattcattagctagcctttcaaccatccttgatagtcatccatatgcatgtcagtagttaaatattatctgaaagaaacggaaatagatcaactggcagaggaagctcgccatttgtagaaagaactagcgtctaatttgttcagctagcatagaaattgggggatttgtagagtatccaagaacacacccaaaaaaaacttctggtaagaggtctaacaaggaaaataaaaatagatttagtgatgcatcaacttaaatagaacaagaaaacaaagtgaaacagcatgcatgcccactatccaaacaaaatactagtacacaaagagcatctaactaatgatccaatagctcatgatttttgatggggttaaagctagatgcatccttggacaaggatttagccacaggaaccacaggagacgccggaatcggttgactgcaagctcagatctggatgcaagagaaggaaagggtgacttctgcttagcactaaactgagtaaaatagatgaggcggcagtgactaccgagaatggggtggaaggggacagccgacgcctgctctccccacgacatgttgacctcgacgacgtggggtggtgtggacggcggaccgcttacctcacgaacggatctggcgtcgctgaagctaggactgcaggatctggagcacccaaactcgggatggttggatccgcgacctctgagttcagggtgtccggatctggagcccccgagttcatggttgctgggaccgtcagggggagggtgggggatgtagaagctcgtcgtcgaccggagataagcggcgatggacggaggggcttgtcgatggcgttgggcagcggtgtggtgccccgttcgccgatggtcctgacaccggcgttgtcttcgtctttggctcgatacgacccggatctggcgtggtggaggcgggaaggaggcggcgacccggatctagagtggtggaggcatggcggcgaccgtgggcagtgggtgaaggaggcggcgaccgtgggcggtgggcgaaggaggcagcgacccgtaggcggtgggcgaaggagccgatgacggggcggcggagagacggcggcggcgacaatggggcggagggcgaaggaggcggcgacctttggaggtgggcgaaggaggccggcggtcggtgggaggaagagaagagagactgagaggaggaggagagagactgagcaggtggcggtgggccccatgggtggtgggtgggggttccttttttatatgtcaaaattgatcacctttgacgggcgcaaacttaaaatcagtgacgagccagaagtcatatccgtcacaggtgacggcccatcacccgtgacgggttgtaactccctggcccgtcacaaatgaggtcataccaatgatgggttagaagtcaaactcgtcactatcttacctgtgacggcttaaaattccggtccgtcacaggtaaggtgatacctgtgacgggccatggccagatggctcaccgatgacggtaaacctaacgacccgtcaaaggtgacggtcatctgtgaccaatttataaacccatcactggtgtgccatcacagatgtagggttctggcgttgtggttcttttacaataggattaatctctggaaaaaggcataatatataagtacatagaatgatctttttttagtaatgcatatatgcagtattaaaaaacaatatagcattggtaccttatactggaaatcctagatcaattatcaatatggcaaagtacatcttaagagaaattgtttatgttttaatttcagtgactggcccatcaaattatttaccgcggcctctatatccaatcgaatagagcaattc

SEQ ID NO: 20970 - DNA, 653 bp, Oryza sativa
actcacccatcatgctcatctaaattccctgcgcatattctcagcaaaatctacaaccaaagcgtgagtcgaacaacaaaagatgatatcatccatataaatcttaacgaaaagttgattatcaccatgcttaagaacaaaaagcgttttgtcgacctttcccattgtaaaacctttcgcaagcaaaaagttcttaagcctatcataccatgccctaggagcttgtttcaaaccatataaagctttagacaatttaaaaacatggttgggaaaatcaggattttcaaaacctggtgattgtttgacataaacttcctcttgtataaaaccatttagaaaagccaacaaaagtttaattgcctcaattctagcaacatgagcaaaagtttcatcaaaatccaaaccctccacttgggtaaaactttgagcaacaagtctagctttattcctcacaatcaaaccatcctcattttgtttatttttgaaaacccacttggttccaataatattatgtccaaaaggtggttcaactaaagtccaaactttgtttctctcaaaattttcaagttcttcatgcatggcgttaatccacgattcatcagttaatgcatgtgacacatctttgggttcaaaagaagcaacagacgcagaat

SEQ ID NO: 20971 - DNA, 1088 bp, Oryza sativa
ctcaaacttatccaaatttccagatttcaagacaaagcacttgcaaccaaaaacacgcaaatgtgaaactttgggttgatgtccaaatcgaagttcataagaagtttttccaagtttagacctcaagaaaacccgatttaaaatataacaagctgtgttaattgcctcagtccaaaattttctaggagttttatattcatccaacatcgttctagccatctcaacaaaaacacaatttttcctttcaacaacaccgttttgttgtggaacacgaggagaagaaaattcatgttcaagacctctttcattgcaaaattgttcaaatgaagcatttttaaactcaccaccattatcacttcgaattcttttcaaagaaccaggaaattcaagctccaattgaagaaacaaaccacgaaagtgtttaaaagcttcgtccttagttgccataaagaaaacccaagaatatcgagaaaaatcgtcaacaataaccaacacataccactttgctccaatagattgcactttagctggaccaacagtgtccatatgtaatagctgtcccggtgcatccgtcatcacagaaacaataggagcatgtgaagtagaaaccatcttagcatgacgacacggtgtacaaaccaaatcaagatctttgttaagtttaggcaaaccacggacaagatccaaaccacttaacctagagagatgatcaaaaccaacatgtccaagtctacgatgccaaaacatcacatctttatcaaacttagcaaccaaacatgttatcataggtgaaacaggattttcaaaatcagctttaaacacttttccatagcgagaaatattcaacacagaatcaccacaagaatcaaaaactttacttctagttttcttaaagtgaacctcaaaattttcatcaacaatttgtgaaactgaaagcaaattgtactttaagtcctcaaccaaagctacattcttcaattcaaaattttcatttaccttaaccaaacctgtagcgagaacggcacttgtagcagcatcaccaaagataatcgattcagtcttagatgccttctttagggaggagaacc

SEQ ID NO: 20972 - DNA, 5077 bp, Oryza sativa
attcctgcagcccacgataattagacacattagtagaattagaagatttagcagacacaagcaacaataggagattttgcatgcacaacattggattttgaagaagatgcattcatagtagacatgataccagcagatttaaacacagttttattagtatcaggtttaaccaaaatctcaccacttctagcaccaacacctaacacaacaggaggatgtctagaattatgagcagaaggattaaaacctaaaccacgattatgtgtgctaacctttgattgatccaaaatcatgttgaggttctttttaccatcagaaaatcttaacaaagaatttttcaaataagagacctctttttccaaattagcataattttcacaatctaccatgacacctttgctttgacgacatttagggcaagaaagcacttcattgtttttcacaacatcttccatgtactcaacacgacctaaagcatctttcaatttcaacttattcaaattacatgttgagcaatccaaaacatcatgaggttgttttaactttttagcagaaatcatgttaaacatcaaactagcatgaaaagcaacttgatatttttgcaacaactttttagttaaaaacaattcatccaaagtgcgtgtatgcaagtcaaaactacaagcaagagaagatctattttttaaatcatgtgcagcattaacatatctaatttttgaaatctcattcattaaaacctcacaattttcacaatcatcatcattaggaataagagattttaatatatcaatttcagatttaagagattcaatgataaattcctgttttctatatatcttctcacacttcttattttttgcactcaaaatattaatagcttcctcaaaagcactcacctcattatcttcatactctgtgtcagattcaccacgcgccatgaagcaaacatcggagatgttgtttcccttatcatcatctcctctttcaccatctacatcacttagtggctcgaaggcggcgcaaacttgttgaaaagccttcctaagattctccatcttcctccctttgtatgaacccttcgacttgttgttgttggacttgttgttgttgatcttctcaccatctttgtcttctcttttgcctctcccaagcttaggacaatgcgaacgaagatgatcaattgaaccacattcaaagcaacgatttggaccacctcttttcctgttcctggcattattcatagctcgagcaattctgttagcaaccaaaaccaaatcctcctcgatttgttcgagttgatcatcggatgtggcattaaaaatagcaagaaaagaagacttagaatcaacttttcgagaaagaacattcatctcatgtgttttcaattttgtataaagtgaatcaaagtcaaagtagacatgttaacagattcctgaatagatgtaactttcatctcccaaatagacatgttaagaccattcaaaaagtggcgagaaatcttagattgtggataattagcatcataagaagaatcaacagatctaagatcactcaaaattttattaaaccgagaaatatagtcatccaaagcttctccaggtttcatctcaaatttattatactcctttttgaaaagatcacgacgaagttctttaatattatttgtttcttgatgaaaattacacagagcagttcaaatctcatgagcagtttgaagatgagcaatacgattataatccgaacgagaaatacgactcaaaagaatattgcgagctttgcaattttgttcaaaagcagttttttcagcagcagtattaatagcttcaggaatcacataaggatgagaaaattttctccaaatatcataatctttagccattatataagattgcatcctactacaccaatgagaaaaatccgttccatcgaaaacatgaagcttagttgaaaacctagcgggagtagccatggcaaaaactctagatcgataaaaatccaaagaagaaaacaaggctccgataccacttgtaggaactaagccaagcagaggggggggtgaatggttggtatacccaaaaaccaaaaacttttagcggaactaaaagttaccctcgaaatcgacggatcacggtctgaccaaagttgtcctgccggtttgaccgcctggttgccgtcggtctgaccgcggttatatctccggtccgaccgctgagatcagctgctgctcgctgtcgccgccgccggtctgaccgccgtgctcccgccggtttgaccgccgaaacccggtaaacacaaatcgaagaactcttaaagtagatgatgactttattgattctctctgtgtttacaaagtgcaccaacagcactccttacaaaaatttcgactaaactcgaaaccctaactcaaaactcaactcaattgctctcaaaagcgataccgggaagcctcacgctccccctcgatttatacatgaggtaggcagcctaaagccacgaaccaaactcatactaagagtcctaaacaccttaggaaactctctagtacaagaaagaaactttacataaccagtcgtcttatccccaagccgactcccggtccatcaccgcaaatactctcccgagacatcgagtcacctacacatggaacaaacaaagaaaccatattccgagaccaagctatctccaacttgactcattagcagcaaacaatagtattacatacgtacagtatccatctagaagtcataatcatgaaataaactcggatatccaaataaacaacccgaaatcgaaaccgacacagtgtcggcctgttagaccgcgggctgcgccggtctgaccgcgcaatacacgccggtctgaccagctaccagagcctggtctgaccggtcacataaaataacgaatcctgcaatcacatgtgaaatccaatcatctccgaaaccacttcgtgaataaattccaaacaacaaaaccaataatctccaatgcccaattgttcatcacaaaataataatcaaaaacacctttgattttacaccactagcagtgaagaataatgcctgaaaaagggcgggaggatagcagccgggaagaaggggaatgtgctgtgtttcccaccttgtgtggtcgcgccgcgatgaggaaagaaaaaaaaaggcagagaacttgaaacgacggcagcgagcaagccaggtgtgacactagctagtggcgtccacagtttctactgtagcatacgtgatacatccaaccacaccccactggccccaaatatgatcagaagtagcattggatattcacacaactgcatagcattattgttcagaagtagtagtggggataatcacataagagaacttggataaaagctctttaaatttacagaaggcaacagagatgaatttattgacgcttgtacactcagaacgacgaaacacgggctgatagcaaagctacaacaaacgaaaatgccaagaaaacgtgcatcaggaggcaggaggtccaaacatacattatccatctcctcaaaacgatactaccagatcaccagataccaaatcaccgtacaagacatgtacacaagaacgaacagcgatcggagctggatggtgtagagaagcgctgaagcggtggcgcctacagaaagttcagcaccagggcccagacagggtagatgaagagcaagaggatgccaatgctgttggacactccgttgcccttcctgaaggcgttcctgaatccacctgacgccctgatgtgctcttgaagcaggtagcatccaatgatgaggcatatgaagatgccaactaagtcgcctcggaaggtgctcgcaaacaggttcggggcaacagcaatgagaaggatcacagcaccaggcagctctaaccaatctaatcaacatgacaaagcattgttgtgagacccatgtgaatttttgtcaggctatcaaacaacattctagaaagtagacatcaaatgataccagggaaatggcgaggaaagaagagacgaaggatgacagcaatgatcgcaatccattttccaatttctcccctgcaatttacgcatttagcgataagaattttttttttgaaacctagagataagaaaatttgtttgatatatctatatgtgatgttgtaaactttaatacaacagaatagaacataactattttgtaagtatttacaactatatccctagtcctccaaccagaacgcaaagtatgaaaaactagcttcagcagcatataacttgctttcatcttatgcttataaaaaagctataacctttttaataaaaaaatcctcaattcttcaaaacttatgtttaccaagattatcattcagcccctaatcccatgatgccaattgtcagtttactaatacatctttcatgttttgtgggctaagaaatgcagccagcgtgtcagggtatttgcatatatacctcaacagagagaacagcccaccaggcagtgtaaagaaaatgtaagggaccaagagagcggtcagcatgttggtcttccagtttgtcctatccaatatcaggaggtacctgcagtagaagagaacagagggggttcagtcaaatactcaaatgcacaaatgacaactgatgagtgacatttataaggaccgttctcaggttaaatgtacacagaaagttctaaagtcatggtcttgaaagtaaatactgaagactgagcgaaatcatcaagtttactgagggtggtgcagcaccactggcatatgaagcatattctgatattcagaaagcacaacttccatggacggtcctaataattacaactacaactccatgtgcagcagttatctgctcttcctaaagtacagtatgccaatatcatcgtatcactcatatcacatcacaaattcacagtccagcgcacagtcactagttcattacactgcatacaatgccaaaaatacttaatatgcagaaattaggctgtaggatcctacaaactgctcaacacagcatagttctgtaattgtacaatcgtatctcgacttcctgctcacctgttaaaaagatataacttgtgaatcga

SEQ ID NO: 20973 - DNA, 2943 bp, Oryza sativa
aattcctgcagcccaatttggcgcaaatttccaaaatttctgagctatctctagttttcgaacagaaatcaaatatgccagctacagggtgcgtctctcatgcagtcacggatatcaggtagaacagtagtactaccaattaatcatatccccaaaatggcgtacatttattctcagtactaacggagctagcaacacaccaactatcgatcctccatgcccgtgtcggcgtgtcccgatcagcaacacaaggagcttttgagcccccaaaaaatggcgagatcggagatccccttttggaaccaaagctcactcttggtcctctgcaaagagacaccgaaacgaacaaacaaaggacatggagggggggtgttttgggtgactcacacggcggcgaagaaggcgagccacttgaggaaggtggtgccgaacccgaggccgccgccgaggacgagcgcgtggttggcgagcttccgcgccgccacgcccagctcctgcaggtcggcgtcgatcagcgccgcctgcgccgcctcccctcccgccgcgtccgtcttcatcgccaggtacgacatgaaccccttccccatctcccacgctgcagatcgctcgcaaccctagctagcctcctccacctctccctctctctctcgcttcgtcttctccgcgcgcggatcaaatcaaagcaagctctcgctggcgattgggtaaaatttgactaaattgggtttggttgtgtggatgagtatgtgtacaggtggggaactaggtggcgctcgctcgatctggacggttcccgggggggacgtcgtgggacacgtggagggctccaggtcctacagtatttctgcatgcatgcattattctactcctcactgtttttgacttggctatgattagataatttagatcttgtttagcactaacaaatactaatccatttttagcacattaattaattgccttttgtttgtataaactggatagtaatgcagtattaataccggtatattccccttttcttcgcttcctgccagaatgccagttgtcactccctatgagcatatgagcaaagagcacgtggccctacgattaattaagttttgatgtagacttggttttcttttttatgttttggcgattatttcatactgaaatgctgataatcctatcgatgtgattaattaagcatttactaacaaatgttaacatttctttgaaactgtgtagccgacgtgtcagccacgtgctccacacaccttgcacataaaaacagtcatacagaatcgttttgcatgcctaatcgtggccaaatgggatggataaacaaaaaaaaaaagaaaatcaataatgcaacatcggccagataagacaagctgaaaaagacggtaacaggctgaccattctcatcctaattaaccaatgaaactaattcagcttatcaaccgatcataattagccaagtcgaaacactaatttaatttcaggcgtcgctgtctccccctttatttctggatcaatctgccagctcgtccatggcgtccgggccaatctccccatgatcgtgtcgctggctagctcgatgtgagagacgaccaaacccccaacggtcttgccgaattcgcaactactagtgtccgtccgtgtgtggctgcgtggtggcacgtcggcatgcagagttacagagagagctccgctgacaagcacgtagctgatactgtagatagctgaccgtgttcgttttgtacacgtcgtttcagttatctgaagcctgctttgtctgtacacggccggcgtacgtaaagttcgtcatgttttcgtctcgaaccgacaccttttgtacgttttttttttccttttttctttcgagaacagagcattatgtacgttaacggaaaaacgaggaagagacagaaaatacttatgggtttattgggctagaagttactatgggctcattgggtgcttatagactatattgggctaaaatatacatatgggcttatttgcacgaaactgaaagtctctctattctagtccagtccagtaggcaacagcttacaactgtgggtcggcccaataaacgggcccggttacatatggaccgggcgcgtaaacctcatcgtctttctccctcgctcgcgcggctgcggttgcgtcttccgcttccgaccgcgacccactcccaccattaccgtcggattcggagattgctccgccactccggcgccccacacatcgccggcgaaaatgctaatatctcctatgctcgccgcgccgccccctcctgcagccgctgcaagcccgcgctgccgcggcttcctcccggcagctgcggcgacggggagtcgacgccaccggggagggtgccgcttgcttcgccgctccgcacctcccagggtcggcgccgtcacgagcaccgtacgaacgcggcgtgaagagggccgcctcgaccgtgacgagctccggaggctgtgccaggagcctaacccggaggcagccgttaacctgctcgacgaaatgctcgtgcgaggcggcgctggcgcattggccgacctcgcgccggaggagcaagccgcggttctccaggcctgcggagaggcgcggtcgctggcgtcgctcaggcgagcgcaccgattgctgtccaagtccctgcccgggatcgccacgcccatcctgcacatgatctccacgctgtactgcaagctcggcgcccgcggcgacgcgcggcgagcactcgagggagcgtcgaggccgcgggggaaggatcatgagcaggagcaggagcacggcgacgaggcgaagaggcgggaggcgtacgagaaggtgcgggagctgcacgaggagatacgcgcggcggggtacgtgccggacacccgctacgtgctgcacgacatcgacgaggacgccaaggcccgcgcgctcatgtaccacagcgagcgcctc

SEQ ID NO: 20974 - DNA, 6441 bp, Oryza sativa
tgaattccttcactacggttgtacattgttactgctactggatcatgtcagtgatgaagaaatgatgattcactttgcttagccaacgtatgacttgatgcattggccatccagatggcactgagcaattgtgcaccgctacaattcaatgatcaaacatggtaaaactcaatatctcccaaggaaaacccctccattttccacaaatctaagtaaagaatcaacacgagaaaacaagtggaagctatgatgtgcaagggagaagaatttcaggggctctgctcgattcgtggccggcgaggccgcgccaccaccgtgcgctgctgtgactggcacacctgcgccgggaacttgcacccgaaccgcttcgtcaccattgatccccaccgtccttccatcgccggcgttgctcctctctcccctggcgtgctgccgccgccacgccggtccatcttctcaatggctttcctcatgcttgtgcactcacgctccagctcctgcacccggtttcgcatgctgtccatgtccagcctcagcatttggttcccccttgtcgccacccgccatgttccaccggcatcgctgtcgccttcttcctccccttgaccagctgctccaccttcgttcgccatgattgtccttgcaatggcgcgacgcagctggagctgctcgaagaagagcacctgcaccaccgtccgcagcggcagccgctcgttctgcgccgcgtgcgtgcatgcctctagcgtcagcttgcggccgtcgacgacaccgctcaccttctccttctcttcttccctcaatccaggatgagcctaagaacagaacaaaacaatcactgctaagtaatggcattgtgttgtaaagaggtagaacactcgttgtcagtgttggtttaccttgagatagatgtcgacggcacggtagaggccgtcgtcgtagacgcgggcgccgtccggcaatgcccaggcgaggtcacagaatttgtccggcttcaggttggcatctgcggcgatctcgcccaggtaggcatccatcagcctcccaacggcgagcatggctcgtcggctggcctctctgcccggtgtctccagctcgctgccgtcgtcgttgccgtcgtcggcgtctcggccttcgaggaagtagcgcacgatgcgctcgacgcactccacgtcgtagagcgtctcgacgaggtaggagtagctcgggatgagcaggtcgtcgagggccgcgtcggggagcctcgcggctatgcgccgctcgagcatgtcacgggcggattccgacgcctgtaggatgctcgtcgtgcgcaggaggccgaagaggacgcgcgccgtcgtggcgcccacggccgtgccggtgtgggcgttgctcttgatggtctcctccgggaggttggcgatgacggtctccagaagcgccttctgctcgccgtccgatgacggcgcagccgcggcggcggcggtggcgccgcctacatggcggccggagcgcgacagcccagggatggagcgcttggcgtaggcgatgagagcgccttcaatgatctccgggccgacgttccgctccttcatggcggcaatgacgcgggtgaacgtggccagcgacaagccggcgaggtcgtcgaaccacgtcgcgccggcgccggcattgttcttgcggcgcggacggtcgccggcggcggcggcggcggcggcggcggcatcgttgatgggccaaccgaacagtgcggtgggcgtggacgcggcggccttggcggcgatggcgtcgacgcagcgtgacacgaggccgaggtcgtcggcgagggggaggaggccctcgcacgacctgagggctcggatggcgtccctggggttcctcaggacggtgtgggacatgaacctgtcggcgcgggagatgaggttgtcgtcggagtggtcgtcggacatgccgaggcgctcggcggcgcagcggagcggcgcggcggtggccggcgtgaggtccagcttgacgccgtagcagaacttggccgcctgctcgaacgcctccgcgccgccggggaagtccgggaggcggatgcggtgcacgtcggagtcctcgtcgacctccagcaccacctcctcctctctgatctcgccggcatcctcctcctcctcctcatcttgctctcctccgcccgcagctcgcgactccctgttggtgatgaggtcgtggagcttcttgctcctcgacattaacgggaactgcaaggaaattctcgatatcaacaacaaacgcagaaaatcttcacactttccatagcccgacatcaagaaatggaccacacaagctcatgaatcatgacagagatttggagtacgagatttagcagcaaattaattgagatcaaggaaaagaaagtgctcaaagccaacactgtccgtgcatcaaggagagttgggaaaaaaagaaaaaaaatggaaattatgggagacacaggtgtgggggataagattcaccaaccttgtggagatggaatgtcatgtcgccgacctcgatcacgacgtcgctggggagtccggtggtgcagaacctgatgaacacaagacagacacacagattggggatcagagaacagcaaatcggtgacagagagacagagacagagctcaatcagtcgcttgccatgcttggcctttggagctcgattgctgctgctgctgctgctgatgatgatgatgatgatgattcttctcctccctggccatctccctcgcgctcttcatcttcctcccctgcatctcgtgatcctttggaagaacgaagcagacaacagcaatggcgaaaaaagaagaagaagaaaaaaaaaactctgctatgagctaaggcatttctcgggagaaaggaaggggtgtgatgtgtttgctcatttgctgtcgctatgggaatcagagaaggggaaggacaccagggagagacgagagacgagggagctctcaataatggcgtactattctgatgcttggttttaggtgggagaagtgaaggattccaagtggggaagacgaagacaagatggcgtttttggttttttgaatgccgttcggcttgcctcaaaagcacgtatcctccattacccatttgtttatcctaccatccgtacttgctttctcttaatctaatgctttactgtctctttctgaaagattgtcatctactctaggagtgacagttataaccatgttttacgcattgccaccaaaatcttaccagtaacagcaaaattttcacctctacacagccactgctcataatagtatgttttactactctattatgcttggaactccaaaagaatgtctggtatgcttggagctgtctgatcatccatcatatgtatagtgtgacactgacacaagaattcaactacagtacctggttcatttgtagaaccatttttttcccagaaattttctagtagtaggaaataggatgcattgcaaaacaagccttcacctatcaggtagagtatcaacatccagtatgaagattcggataccacctcgataaaatgaagccatgaaccaaagtcaccattactttaacccaagtgaacgcaggtcaggttaattaagtactaacaacgagaagaatgaaggaatctacggcacaagcgcacaggtaacgactgttcttttccttttatccagtacccaaaaatttttacgtcttgaaagtagtactcctaaccaacgtccatatgatccagccatctttctttgtcaggtgaaggccaagacgtgctctgaaaaacctggattttgaactttgaactccagctgccgcctggccaagggaagaagaagatgatcgcctgatcggacaataataaatgtgaaggcgtgatccggtcatcaagactggaggtggtggtgtcctggcgtacctgccggtgtgtgttactgcctctctcttttatggctgtacacatgagagagagagagagagatgcaggttactggtggatggagtagatcagtgctcatcacaaggcaacaactctggaaggtgagccccaaatccggctgcttcctcaccgcctgaaaaagagaggcttctgtgtcaatacccagcactcgtgccagtggcagcatgccagtgtagtgcgtgggcgtgcctgggggctgggtgtgctggacaatggacctggcaggcgccatggcctggcctggaggacacaccaaaggagaaaaagggctcaaaggcaacaacgcgagtagctacgacaaccttaactttgctcggattctgcaacagattgttcaggagtgcgtgtcactgtagaacagtagaggcttggcatgactcaagatgtctgtggttgtatgggcattggtctcatcagggcttgtgtggttgatgaggttgcagtcttgcagaaacccagggaatctagtagcccagcgatgtgcaaaggcagagatgagctttcctcaactttctgaaagtgttcaaagcattttcctatcagaaacaaaagtgttcaatgcattggagttcgagaaaaaggctaaggtcaagagccatttcagtgctagtacgactgttggagtaacatttgatgtgtgaaagttttggtgtcctcaagccaggtgaagtcgcttctgatgagtgatgttcatcaagactgatgtgtgctagtcatcatcaacttacagcccacaacgtgttgttcggtctgtcccttttgcttcttgttcgctctacatccacatcttctatccttatgttatgttaaaaagaaaaatcagcagcgacacattaatatggaagctgttttttgttatagataacagtgcagaagctggcaatcttggcgagacaaggcatggagccatggactatatggggtgtgagcaactagtgctgtgttgctttgtgaaacctttatggaagtaacagaaagagtcaatttcatgcggtcctgctccaagcaaccttttcccgagccttttgttcatccattgcctttcctaatcttcaggtaatgagtgtgcatgcttaaacaatctttgtactctttgcattcaccagattacatacttcctagtgcagtagcttgcatatccaggtatgtttgcacactaagttcatctcaatcttggtctgttattattgaacaagagtacagatgtaccatccaaactcacaccatgttcatccgacatgacgtatgagccctactctgattgttccttcacaaaacagtactattggaagaggacaattacctctgtaccggcatctgcagatcggaggcggaagtgaagaattcccagagcagaaaagttacagcggtaacagcacggagcaagggacaaagcttctgaattgccctaaacaaatccatcaacattcccttcacagctacgactaatatactgtaagtatcagccaggataaccaatcagagtatggttgtatgctctcacagctcacatgctgcacaataattggacgcatttgcaggttaagcatcagggctaacacacaattggaggcagtataaaactatgcataaatatatcaagatctaggcgtgtagcaaatgtgggcctctcttccactctctcacacggcttgaccaacctcttcttctgaaaaagaaaataaatacgcacaaccactgcccattattgctcttgcatcttgctcctagtatactcctatgcctgcagcatttgcatctcgttcaattgatgaattcttcctttttttgtaattctgcagggacctgatgatggggacaaacaatcggacaagcccaggttggcacgcaagcgagcgtgcgtgcatgcgttgcatgcttgcatggcaaatgcaaatggatgcatcgatcggtggacagaatgatcgcctgcattatcgcctccgccgctggctcagcctgcgtgcgagtgtgtgtgtgaccgatcatccactggacactggtcagctccagctgcgttgatagtgccggcaatcatccagccgcccggaggccgggacccagctcgcccgggttttcgtctccgtcgcacgaagcgcgccgcggccgagctttttgctggggaaaagaggagcttttgggtagacgattctaatcaccaggtgaacggctattcgtttattacatgtcaatcaaatggttatatttttttaaaaaaattaacacgatatattaatatataattttaaattcaacttatatacattataaaaaataaaaaaatgactgtgaatgttcgtatgcaaaatttgttttttttttcataacttgtacaagttaaatttgcaagtttataaagtgatatattatgaaacttttttaaaacaatttcataactatttaattgacatgtacttcctccgtcctaaaaaaaacgaatttatgactggttgtaacatattctagtacaatgaatatggacagagggctgcaggaat

SEQ ID NO: 20975 - DNA, 1288 bp, Oryza sativa
ctgagttgctgggattttacatttttaatgaccactcattcttggtaatggtatactgatctaaacatgcttcattttcggtgagatttatatcagaattcagaaacatgcgctagctagctgcatggcgctaattttcgggataactagcaaaaccatgtttcatgtttacaagactagtgctgtgctatacatcaatgaaattgaattattgatggattgaaagtttcttcgcttcgtcaggatgagccggccgccaaagatgactcgactgaagataaggctgaggcaagtagtgcatcccaggatgctggaaatccaacttttcccaataaagatctcagcagaaggatagcactggcctccactattggagctgtgggcctctttgcatatcaaagactcgactttggaggcgtttctctcaaagatcttgcagcaaatgctacaccgtatgaagaggtttgcagcctttctcctatgagacttatacacttacccattactggaaaaacagaagcaaacaacgtggaatttctaaatgctaaccgcaatccaccaacaagaaaaggggagcaaaatctcttatgtacttaaaaatctctaagcatcacccattatagtaccttttttgggggcagactgatcagaaccttttacgttcacgaaggaagatgaatatgcgagttgacatttttttatgtgcgtcaagacgatgttctgccactaggcaagctaaatgaaacatccaatcatttcagacaagatgttgttttggatattaatctgaaatatgttttcttctgtaaatgtattatatttttccattggtcgcaagatgctgtctttctttgggcagttgtcacagattgatgatgcattcatttccaatcaataggtccgatgcctttacatgtgaaaactttcacttgtatgacttgtcaattggttaagcaatatttatattttcttcctgtgctaaggtgaatagcttgaatgacaaataaaccttccatgtttttgcttcaaattggtatctggatttgctgcatttcctttgtttggtccgctttgtacataaattttacttcttcttaatacaatgatgcgctccttgggtattcccaaaaaaggatttgctgcatttcctgtgaagacattttctttacatgcctatgaatgtaacctgataatatatatgcaggctctctcaaatggcaagcccactgtagttgaattttatgcagactggtgtgaagtttgtcgagaattagcaccagatgtctac

SEQ ID NO: 20976 - DNA, 1971 bp, Oryza sativa
cggcggtggaaacccccacctagatccgcgccgttttggccggatctagcggggctgacgccgggcgacgacgggcggcggggaagcgggcgtgctggcggcggggaataggcggtggtggcgacggttgcgggggcggcgcagctgggcgaggtcgcgggcgcgtgtgagcgtcaccaggcggcggttgaggctttttgcccggaagccggcgaggatggcgacgcagggcaagctcgtggcagtggcggagcaagctcatggcggtggcggcaccgcggagctcgcatcgacgtcgtcagcggcaacggcgcgggagcacggggcgacggcgacggtggcaacggcgcggatttcatggcgacggtggcgtcagcggcttgtcgacggcgacagcacgatggctggttgacggcattggcggctgtcggctgctgtggcattagagctctcgcggcggaggcagcggcgcggaacttgtggcgacggttgcagtagcggctggacaacggagatggggctgcggctggctggtggcgaggtggccgtcggcagcagcggccgtggtggtggtgggaggtggcatggtggcctcggtcagctagccgaggacgtggcagacggctgcatctggccggcgcgggagagtacggaggaggggtcggagaccggcttggcgcagagaggcgcagccgatggcagcggaggccggctcggcacgagaggcgcgggcggcagagatggaggccagcttggcgcgagaggcgcgtccggtggaggaggccggtttggtgcgaggcgcagccggtggaggagccggtttggcgcgagaggcgcggtcggcggaggaggaggcgaccctggtgcgaggaggagatgccggtgggcgtggcacgaaggatggccagcgggggcgccagtgcgggggtcccacatgtcggcagaggttgtgtggtggtggagcatcgatgcgtcagccgtagattcgcaggtggtgtgcggcgggtgtaaacccagtccggccttagccgggccaacaacgatggttaattccccctcctgagggcgttgtcgtgttgtctcacccctcaagggcagttgccgggcgaaagcccagtcctggctcctttgagcccggacggacggcggcggcggtttttccatcgcttctcttcttgaagacgtcattttggcacccctagctgtagggcgatctcgtctgtgttcctttgttagtctagcgacggcaggtcacgcttagcggcggccggtccggtgctagcctccccctggtcgtgtgtgttggcgctgtcggtgtgtgggggtggtgtatttttctttttttctagttatgatcctccagggttataatcttgtaattttttcctgctctgtcaatagaacttcgcaccgtctcgtgcgagtcgttcaaaaagtagaaaaaaagctgcttgtcaaactgtactactgcttgtgtgatcgagcaggatggaaccgcatggttcgcgagcctaccacttcgtgcgaggggagttgttctcgcggaccgcgcaacgctgactggccgcacccacggcgcacacgcggtctctttggaatcagcagacgatgcatcgaatcgtatgcgaagcggtgtgaaactgcacgcgcgcgcggcgtcagcgtgaaacgggagtgcgacacttggggtctattcgtgatactacactttgaaaaacagagcatttgactctgttgcacccaggtcttcttttctctttgcctgaaacagaagtcgtcggtcaataagacaacactacctacgaaaagttgcttagcaactcaaagaaccaccacatctattactgcgtgcgtcgccgaccagttcgccttgatcaagctgggagcttccaaatcaagtgagatcacattcacatcacggaggaggcgtgacaaaaaaatgtgtcggaaaggaggcgcacccgcacacaa

SEQ ID NO: 20977 - DNA, 1133 bp, Oryza sativa
agtacatagctcaatattagataacatttttttttccgatgcaggtgtgaccttatggagattcaatactcacccaatctcatgtcgtggccataggcaaccataaccttcgatcgttaagaaaacaaagacggcttgtgtgtggggaagaccctgctacttcacggttgcatgtgaagtggatgcagttcagttgtaaggctagcttaagttattatctatttggttcggtgatcagatcttacaggtgaaaaatgtcaagcacctcttctttccctttctcttgtttgtttggttattgtttctgttggtcaatgtaattccctagtatttttttcactttattattctctaatacttgtatgcttgcatagtcaaagcatgtccgatgtaagattgtttagtttgatgtaatgccagtggacatttctaaaaagatatttttggaaatcacattttcggtagaataacataaataagcaatcgaatggaaataatccagccgattaggaagaacggggccattgtaccacactctgtaggctgtaggcctgtagcctctgttccctaatcccagacaatctcggtcgttgattcccaatctaccggtggagacgccaccactgcacgccgagaaattcaggcgagaagcggaaaagcttatccctctcccatcgccgcggcggcctatccatctctctcccccgcacacgctctccctcccatggcgctctccctcaccaccgccttctcccacctctccctcccctccacctccaagttccacccgctccccctcctccacctccgcttcccctcctcctcctcctcccgccgcgccgcgcgcctcgcgctcgccgcctccgccgccgaggccgccgagcctgtcgaggtggaggaggcgcccgccgaggacggggcggatgaggtggtggccgtggaggacgagctgtccggaccggcgctgcgaaagtacgtgaagcagcggcttcccgggggcttcgcggcgcagcggatcaccgccacgggccgccgcaagacggccatcgcccgcgtcgtgctccaggagggcaccggaagggtgttcatcaacttccgcgatgccaggtgtgtgcccgtgccctgcgcgctta

SEQ ID NO: 20978 - DNA, 1709 bp, Oryza sativa
gtagtagctaggtgtagttcatcggatcaagggggggatggccacggcggcggcttgcatctcgttcgcgtcgccgtcgccggcgcgcgtcgtgatcaggcggcagacgcgggcgtcggcgtcggcgtcggcgacggaccggcaggaggtggtgtcgccgaagcggcggctgccgctgcggaaggtgccgggggactacggcccgccggtggtgggcgcgatccgggacaggtacgagtacttctacggcccgggcggccgcgacggcttcttcgcggcgcgcgtccgcgcgcaccgctccacggtggtgcgcctcaacatgccgcccgggccgttcgtggcgcgcgacccgcgggtggtggcgctgctcgacgccgcctccttccccgtcctgttcgacacgtcgctcgtcgacaagaccgacctcttcaccggcaccttcatgccgtccaccgacctcaccggcgggtaccgcgtcctctcctaccttgacccctccgagcccaaccacgcgccgctcaagaccctcctcttctacctcctctcccaccggcggcagcaggtgatccccaagttccgcgaggtgtacggcgacctgttcggcctcatggagaacgacctcgcccgcgtcggcaaggccgacttcggcgtccacaacgacgccgccgcgttcggcttcctctgccaggggctcctcggccgcgacccggccaagtcggcgctggggcgcgacgggcccaagctgatcaccaagtgggtgctgttccagctcagcccgctgttcagcctcggcctccccaccctcgtcgaggacacgctcctccactcgctccgcctcccgccggcgctggtgaagaaggactacgaccgcctcgccgacttcttccgggacgcggccaaggccgtcgtcgacgagggggagcgcctcggcattgcacgggaggaggccgtgcacaacatcctcttcgcgctctgcttcaactcgttcggcgggatgaagatcctgttcccgacgctggtgaagtggctgggccgcgccggggcgcgtgtgcacgggcggctcgccaccgaggtgcgcggcgccgtgcgggacaacggcggggaggtgacgatgaaggcgctggcggagatgccgctggtgaagtcggcggtgtacgaggcgctgcggatcgagccgccggtggcgatgcagtacgggagggcgaagcgggacatggtggtggagagccacgactacgggtacgaggtgagggaaggggagatgctgttcgggtaccagcccatggcgaccaaggacccgcgggtgttcgcgcggccggaggagtacgtgccggacaggttcctcggcgaggacggcgcgcggctgctccgccacgtcgtgtggtccaacgggcccgagacggcggcgcccaccctgcacgacaagcagtgcgccggcaaggacttcgtcgtgctcgtcgcgcgcctcctcctcgtcgagctcttcctccgatacgactccttcgacgtcgaggtcggcacctccacgctcggctcatctgtcaccgtcacctcgctcaagaaggccaccttctgaccaccgccggtcaaagtctccggcgcccggtcatcttattttccgtcctcttcttcttcactaaatattttagtagtattagtaattttttcactctgtatggtgtgatcaatcagcttgtacggatacggag

SEQ ID NO: 20979 - DNA, 5548 bp, Oryza sativa
taccaaatgttatcaatttatattacagcaaggacatatttctagctactgacctttactagtgctgttccaagataaacaacagccgcttttacacaagtgccaattgtgtcatactctgacctgcagaaaatgactgggcataagaaagcgaagaacaaaaatcctttgatatacaacattatttttatctatagattgatagacatctaactagtaaccactacccactaataagattcttaaaaacaaagccctccattcatcaatgatcgtctgcaaccctccatcaaaagtaaaaggccaagatctatgtgaccatccaaaaactctctgtcattagaacatacacagcagctctgtttccaactcttatcttcacaaacctccgccacttattatccattatgccagaagtacactgttaccacttatcaccaatacattttgaaacaaccacaacattgatcaaatagggatatgttaatgagacatcgagcttgctctgattagcataagaaaatttacatgctctgggggaacagggaatttaagatcaacatgggagcatggagtaggttgggtccaagggggaactccaacatgtacagcatggctttcaagagggacatgggacagaaatccaaatacccaatatttgcaagtctgaaaatgattgatattttattcaatggttcttatttctagtgtttgcacacgatagtatgcaacaccttattactagagtacatgtaaccaacgtttgatcaacaacaaccacaggaagagagttggaagttgacaggggccatgttgcacatgtatggcatctgcatcgccatcttcatcatctgctgctgcccgagtccagcacaaataacttgttgcatgctctgcatcatctggcaactggtgccacagtggcactgaggcatcatgccttgtagctgcatgcaacattgctgctgcaggagcgccattggctgcgacatgaacatggctgtggagctacccatgcccaacgtttgcatcatgtactgcctacacggatccatggtgcccatggctaatgttggtgggaaatactgcatagtggtgattgcagtagtggcacttgcagaaagagcaattaaggcaaacagggcaaagatcttgctggtgtatgctgccattgctgattctacaatactagtgttaaacaagattccagatggtgtagacaatattgttgaggatgatggaataatggttgcctaggggcctatttatacatgctggtagctgtgtaagccaggaaagagtttggcctttgcaaaaccacctagtggaggccacataagctggaaatcatgaggcatggaatttatttggacatttattcaaccaatacttttggaatatctacacaaagataattctgccagtgctttaatgcgtggaaagaaaatatgatgataaggttgtgccagattgctttggcattttgcagttttgtaaattatgagctggacaaagaaacttttgtgaacagaattcgtatgggacttgtagaatgtgttacacaagtcacagcttacacagataacaattaagagtttgagtcatcgccatatgtgaatgattgagtaggtaaacttggagctttgtaaatgtgccttaatagcatacatacatatgcagtttggcatgtatttggagttttgttaataagaattggaagtaaagaacattgttgtaaagggaaagaagtaaaggagaaacaaattttgggtccatcccaaaaaataaagcaaagattagagtttggccatactctttgctatcctactttccacatatctagttctttatcttacaaataaagagaaacgaggaagtaaacatatttcatgtaatcatattatgacaagacacatttcttaggcaggcactactgacaccatgcaagtatgaagttgcattattttcaattttaactgatattataattatccagtgcagcgatcactgcagggtgaattgggatggagaactatgcaatgtccatgttcagaatcttcatgtttttagtactagagtagtagagatgtaccaaacgtgatgtatagatctcaaaatttccatcctggattgaagaaagattcgaccccattccgaagccatacaacaactcacaaattgcaattgagttcaatgtggtctgccggtctagatgactagattgtgataaatctagggttaaggcttcatagaagatagaactgattcatatgctcatgtgtatgagtattgttcatcgcttgagtagataagttcaaggacaaatgattttcactgaacttggatggagaaaactgttgcacaaggtaagatcaatatattgctgaaatagaaaatatctatctgacatgctgccaggtaccaatgtgctatgaataaaccatcctagctacttatcttgctaacatattatatcacgaataccttcaatgtgatctcccctcagctagaatgaagttttctttcactgtcacgaagttactctactaatgagatgtatatggttggcaatttggcatgcattttccagtttcacaacaacatgttcatcataatatcaagtggcattagttagatcactttatatttgctgcatttgcctcataaaaattgtattcccagatcgtgatcccgtctagctctgaaaacgagctaaccgctcatctgaacttacttgatactcggaggtagacataaaccaatcagattcaattcgagcaacctagttcagaaaacagagcatccaaaccagaacgagcaacgcgatttcatgttctccaacaaacggtcacacgcggaaccaatctcgtgccaatccaaccgagttgagcaaaatccactgaaattgcactgactaaaccccatctcacaagccaaaaacacacagagaaccggcagcatcagggattcaagcacctccttccgctgacgacgcgacgaatctctgtccagaccgttcactacaagcagatctagcacgttcgtgatacggatctcgcggcgcaaggggagatggaggggggggggggagagggagtatacagcggggtggccgagtagtagacgacgtgggggccgaaggtgagggcggcgcagttgaggaagtggaacaccgtcatctcgtccccgccgccgccgccgccgtcgtcgtcgtctccggcgtctgagcaagcaacggcgaggtcggatcgcccgaggtgcgcgacgacttgggctggactgcttgagtgatcgagtcgcaccccatcgaggctaagtaaaagtatctcgggccacgtggatcagttaatgggcttcgcataatcactcatgggcttggagcgggaggatgatggcccataaaacaacatcccgcaagtcggtgacagtacaccatcccggcccaactaacaggccactgttagtcggttaggcttaggcagcaacgttgtttgatccagtgatgggtcacactcccacgtgggaatacaagtgtaaatattgaacataaatcgaaactttatttcatgattcttattctagccagtcgcacacgatagtatgcaacaatttactgttggagtacatgtaaccaaggtttggttaacaacaaccatagggagagagctggaagtaggcaggggccatgctacacatgtttggaagttgcatcgccatcttcatcatcatttgttgttggccaagtccaccacaaatagcatattgcatgttctgtatcatctggcaactagtaccatacccacactggcactgtggcatcatgccttgtagctgcatgcaacactattgttgcaggagagcaattggttgtggcatgaacattgttgcgtagctatctgtgcccgtcgtttgcatcatgtactgcctacacggatccatattgcccattgctattgttggttggagatatggcatggtggtgattgtagtagcggcgcttgcagaaagagcaagtaacgcaaagagggccaagatcttgtatgctgccattgttggcactacagtgctactatgatattgttgagggtgatggtatcgtggttgctgaggaacactatttatacatactaaaagtcgtgcgaggtaagtaatattttggcctttgcaaaaactacctaatggaggctagataagctataaatcatgaggcatgacatttatttggacaattgttcaactaatattttggaagaatacatggtagatactaagatgacgttgtagatatattcaaaaggctatcttttgccaatgctttaagaaatacgtggaaagaagttatgatgataaggctataccataaaagtttggcacttcataaaacttaatttgtagtatagttatttatcgaggtggatcaagaaacttttttcaacagaatttgtttgtgtcttacaaacatgttaatcaacaattcacatataaagtaccttttcaaagctttgtaaataggctttaataatagtatacagacatatgtagctaccatatatgtttggaattttgctaccatgtatttggagtgttgctaaagaaacatgagtgagtgaggttttttgaagggaaaagggataagctacttctgtgactacttgtttttatctttactcattacttgtgtatgtttattcctttatttttaaaaacagaaaagaaatttgagaaactcaaagtatttgtttattcaaattatgaaattaaattttatttaattattccagacactacaggaaatatggagtctttaaactgaaaatataactatatttttaactagtaagtaaagtcgtgtagggatgaccaattcttcttttggatcatcacatgtcaaattggaatggtggggtggtgaaatttagaatgcctgtcactcttgatgtgattagtaatggagacaccaaaaatgatgtctagattgcaaacatttcatcttagataggataaacatgttttgttcaattacaatctcattatggaagtgatacgacagctcacaaaattgcatgagttcaacgtgttctagacctctagattcttatatataaaggtggggttaatgtttcaaagaattatttcacatggtccttgtgtattgtgattgcttgagtagataaggttcaaggacgagtgagttttgactaaattaacatgataactagatgagcaggggcaaaaccacgttggccttctctgataagcatgacccaagttgctaagcttgttcaccattacatattacctctaaacaccaatttatgcttattatacatgtaatattatgtatatgggacaccggtaattttgttatagactcgtcactgtagatgggataaattgttgcactaattaagctactatttattagctagtattgtgtgtttcactagcatcaagttcatcatgatatttaagtggtcataacttaaataatttgagcatttatataagatgcgacatgattttcgagaaggacaagggctgcaggaat

SEQ ID NO: 20980 - DNA, 1299 bp, Oryza sativa
atgtatttaatttgtgtgtagtttttaggatttgtgatggatttgatttgtgatgttgatttgggatgtgcatctcattcgattcgggagaaaatacatagattaacactagccattagcaaatcaacaacaaaataataataaaaaaaatctcgaggaactgtcgcttcccctctttagtcccggttggtagattccctctctttactcccggttggtgttaccaaccgggactattatttgaaccgggactaaagatagcgatctttagtcccggattcgtagtcccggttggaaaaccgggactaaaggggggttatcaaccgggactacaaacggtttctccaccagtgtgagatgcacacgatagtatgcatcatacacttgttatttgactatacaagtaattgaaattcgatcaacaacaaccataaggaaagagttgaaagttggcgggtgccatgttgcacacatatggcagttgcatcaccatcttcatcatcatttgttgttgcccgagtccaccacaaatagcattttgcatgttctgcatcatttgacaactagcaccacaatggcactgtggtatcatgccttgtagttgcatgcaacattgttgttgcaggagagcaattggttgtgacatgaacatggttgcgtagctacccatgcccaaagtttgcatcatgtacagcttacagggattcatggtgcccattgctagtgttgatggaagtatggtatagtggtggtgattgcggtagctgcacttgcagaaagagctagcaaagcaaagacaaccaagatcttgtatgatgccattgttgacagcgtatgggagatgcttaacaagattactagatggtgtaaatgtagaagattatatgttgagggtgatgagataacaattgctctaggggattatttataggtaatagcaatattacacgccaaaaaggatttgatttttgcaaaactacctggtggaggtcaagtaagctagaaacaatgagtcatgaggtgtatttggacatttgttcaaccaatattttggaagaacgtggcgagatgatgctgtagatataaaggtgtttgatcaatggtgcattggtgctttattgagaattgcgtggaaacaaattctgatgataaagatataccatattggctcggcactatgttaaactaaatttgtattctaacaatattcttttagatgggtgaagtagtattttgattataagcatatatataatttgtccaattttaagagcgtgttacataagtcacgacttacat

SEQ ID NO: 20981 - DNA, 4526 bp, Oryza sativa
  unsure (1)..(4526): unsure at all n locations
ttagtttattctggtcctttcaggtttgttcatacttcataggcacttagtgtttttctaggtttgctatgttgcattctgggatgaagtcactcgtgcagctcaagaggaggaagggaacaagattggtgaaaacctcatgattggcctttggcggattattcttgtgagagatcttcctttctcagatcaacgattgaatgggaaaattcccaaggtatcatttgaaaactatgtgtaaattatcttcttagctgcaggataatattggctcaactcttcatattcagttttttttttcatattctggtagtccgtgaaaagaaagattctgagggagcttatcgtaggaatatcttagttttgatgatgtcaatgtaggatattcattttgcaaagctgatttccgttttggtgattttttttttctcttcagctgataagtcatcgccttttccctatggcaagatactcaatttgggtggattcaaaatctcagtttcggagagatccacttggagtccttgaagcccttctgtggcgttcaaactcttctttagcattatctgaacatggagctaggagtagtttgtatgatgaaggtaaagcaattgttaagaagcacaaggcaactccggaagaagttaaaatacaattggatcaataccgacaagatggcattccagatgaaaaacgattcaatggaaagaaaggttcgcttctagtcttcttttggtgtgcctatttttatttccttcttacagttgtaccatgtcttgcatttgtataatattccaattttgattggcactgatctaatgtttttttttccaatttggtttttttagttcacatatcgatatacagcaacttctacatggctatgtagctatttttttttttcgttggatcaccatctttaaacactactcacactcaactaagtcttaattcaatactaatcaccttcagaattcagattcttaggttatgttcttcctcatgtcccagttagtgatctttctatcgtgtaacataagatggtttgccattcatatactttagttcattttgtgaaagagctccacccagctctactcccagttttggtggagctgaaactgtttggctgaactccagctccaggaggggtggagctggagctgtgccaaacaggccctttatgtgagaagtcatttctatagcatttacagtgtgggccaggaaattaaaatgctggggctcacttaaataagtagaataacagccggtgttgtagataactttggttggtgttactgcacagctgtagttgtgcaaaaagcataagctataaagttggccaggctgcatgcgtttagcataaaagcgagctcctttctgcacttgaaccagtgtccagtccagtgaggcagtgatacaggacacggcatgtctaaagcccagttaccccacaggtgggctaagtagaaccagaaccaccgcccaaagtaacataatgtttcgcctcaaatcatacttgtccgaaatgaacagatatgtccttgcaattgcaagtggtcctctgaactgataagttagttaatgaattttctgcccttttttacagctctcgcagaagcttcagttattgtgagggatcatgcccctttgaccaacctcttcatgtgcctttggttcaacgaagtggttaggttcacgtcccgggatcagctgagcttcccttatgtgctgaggcgtctaaggatgcctggtgtccacctgttcccggtgtgcgcccgcaaagaccttgttaacagcttcgggcataggcgcaaggcgaagcctcttgccagggagcgaagatgagcttctgaaacttactctacactgcaattttggtaatgcaaagcatcgatcagattaaccagcttagtctgcagttgttatcccattcatgaactcttgtgtagatgagtagatgatgctaacgtagacaaaggagcacgcactcattcgaggtgcgtatctgctgctagtgtttataagtaagagaaatggttgtaaccatagtcgtagaaatgttccgatagaagaattcgtttcttgcaagttgcaatacgatactgttcattgtttggcacttgcaaacgtcgactgtagtagctctgttgtttatgcagatacagccgttggaggatttccggtcgattttgtccaaatgtgttcgccgagacagggttcaataaataccctgaactttacacatacctttcgggatagtggagtactgtactactactgcatgtacctacctatactcatcaagcgtctctctgcccaacatggtggtgtatatgcaaaagtgagaggctgacatgagggaggggtacaccgtcactgcgtgccaggacgcatttatcatcttcatttacccgtgtgtatctgaactgaagaaggttggtaggcgaagtgaatgcctctgtgttctgtgtgtagtgtgtgcccgtctatggaatgggcgtgcagggagccagagagcgtctgctcgctttgccaaacgcttccaggcaaaaacttctgctggaccatggcgataaacttctgcaggaccatgacgttcttctgattgagacaatgtcctgttcttgttactgtactcggtggagcagacgtaacagtggacgttttgatgagctacagttgagagatcgtgttcggtgttccgtcctcccttccgaggaggcacatttgcaaatgatttgacgcttcctattgccacatttgggaacgtgatagtgatacttcatactactaattcatacttcatactactaaggctgtgtttagatccaaagttccttttccatcacatcaacctgtcatacacaaacttttcagtcatattatctccaatttcaactaaaatctaaactttgcgctgaactaaacacagcctaattcatacacttggagtacagcagtagtagtagtacaaattgcaccaaaagcagttcaattcctcagctttgacttttgacgcctttctttttattagtattagtatttcttttgccgtcaactagtgtcatgggtgatcatgattcatgaaaggatgaactcaaaggaagtcgccggtgggcgctggtggccgtcgaatccaatgccgctttggagagttctctcgcactgtaccaagtgccaccaccacgtatccgaagcgtcggcatcccaagtcccagagcccacgcacgcacgatcctgtttactaccagcaaatttatccacaaaacgctcgtctttctggcacaaaagatggctgcgaaactcggcctttcgccgcttttcccctctctttttcctgccattttcttccgttgcgtcttgcgtgcagcagcagcagcagcagcaaagccacacaaggtatctggctttccctttggctcttctcgtgtaacctttctctttagatttctttctcttctcgcgtttctctgtctcaatcgccgtgtaaaaaatgagtaaaaagattagccgcacgtagcagcactgacccttcgctccgcttttgctacgggagaagcgaagcaagcccaggattcgcggccggtgtgcgtgtgtgagatacgccgtgttcttctcgcagtcgcaggcaggagtagattatgctggcggtttggtcactttaaagcaaagcgacgtgtgtttgtgttggtaattgtgatgggtttggaggctttctgtcatcaaagcgtatggttttctgcgtcaaatcttccttctgacacggttttttttactttggagtacagtaactgcttatgtacagtaaaatatttggggatgagatgttcattggtgcagcttgcttgaaaaccaagtactgtactgttttttctgcgtcgagaaaccggttagcattaatgacagcatactcagatgacaaatgcattcatatttttcagcacttctgtctccccttgatactgtagctgttcaagggtgagttgggtaggttactgttcttgagacttcacaagatctggtgaccaggtcatgacacattgacactaaatacattcgtgagctggtttatttacaccttaaaggcacatgctcctattacatgatggaactcttcatgaacgtaggccccgtttggcacagctccagctcccaactcctacttacctagagntggagctgtgccaaacggtacaaattctttgttttttggagcggagttggcagagcagctccacaaatttgtactacggggatggagctgggtttttgctgctccacagctccactccacttcaaaagacccactacccttttaaattttgatgtatttacacagaaatgccattgaactacccctaaactcctcctcctcctcccatcctctctctcctctcccatcttctccggcaagattcggcggcaaccggcggcgggcaggctggcggcggcggagcacgggctcggcggcggcgtgcgggctagcggcggcgcgcgggctcggcggaggcgtgcgaggtcgg

SEQ ID NO: 20982 - DNA, 3872 bp, Oryza sativa
agtgtagcagtagtacttgctttgttccattctttagggtttgtgcccctaaagaatggcttaaacattctttcggcaaatgcgtgtgctcttgtctttaatgactgtttgtcttagcagggtaggagtaggttctagccttttgttcctgtagtttgtactactactaggatcatttcaggtttgggttgctttttcaaagacaaattgcgtgaaatatattcttttctgcatgttttgtttattagtgtaaacattattgtttgcatgaaatgtttacagtgtcacattcagtactgttttcacaaaaaaattttaccttaagagaataagagtttgtatcttctctttgaaaaatcgtacagaggatcatgtgtgcatctctttttttttaatgttttgtttagtgttcaaattgttgcatgaaatgtttacaatgtcacattgggttctgtataaaacattattttaacttacaactactgcatctgtcccaaaatatttttgaatggaggggagtatctctttttattttacaaacaattatgtatacagcggcatgcagactcgaaaactgtactacattttacggattggcaagtgccaacctttgggtaatataggtgttatggtacatcacgattgcttgagactcaggagtcaggaattcaagatagctgcaccaacccattgcaaatttgcaatgcaaaaggaatatatgagatggttggttgcattagtgatgagttccctttacttccaaatgccaaccaattttagtttgtacaatcaatgtgtggtactatcacgggatagtatatgtagcgtaaacctataaactattgtaggatacacaaatggatgtctggaatttgttcacgtccccctgattaatcttttacttctagattaaagtatgattatttttttattggctaaatctcagatgataatttgtgtatcatataacagttttcaggtttgtattacatacagatggtttgcactatatattttctccgctatcgttgtgtctctatctccaggccatttctagtcttctctacatgagccaatgggaagttggcttgcattgaaatttgcatcattgttgaccatagtggaaggacgagtgagtattaacaagtggactcattagtcattagtcatggtggttagtatgcacgtacgctgattaatttgaaacaaaccaataatgatgcccttctccaaatggcactgcagactacctgctctcggctcatttgctggtctgtcagtatcataaaacaaactcatcgcagggcagaaaaaactattatggtcacaaagatttctgaagagctatgtcaggcacatctggaaacctgcctgttccattaagaaccccaaactccaaagtgcaatttcaacatactactaatattctgatgctgaaatccctcaaccaagtttggtagacaataacctaatttaacaatgctgatgttttgtcggttaggtatgcaagcttggctctattagcagctggatgcagtaatcctgagttaatataatcccacaatcttactgctgctcacaaccccaaaaactgttactcgaggttggttgaggtagaaagcctaagacacatataaccaagctgatgttagaaaaaaaaaagctaaccttttcctagttttgcaagctgcagaatacaaagaagccgggagggattaaaattttcagacctgtggatgcaaaaaaggtacagtgattagtgtatactactactactccatttatccagcaaagaaccaagggaaaagttgtgcgtggcattttcacgagatgtcacagtcaacggcctttttgcaggcgccctaaacactagtgtgcgtcactggttgtggctgtgctgtatataacgcagagtgcggggtttctgcagagctggagtggagaaaggagagacctttccattccctctctgaaaaaacaacaatttagtttttgacctgaagggtggtagtagtgggctagttggcggtagatggcattgacactggttgccaagcacagtgcaggttttgttggagcctagtgtggcttcagagctcagaagcagccacatttctgcattcttggatcatttggagctctccttgtttgttgttgggtctcttctctttcctgcttccgagttctgtgaaccagccaactaatctctgtaagttctactatcttgttcttatttctcctgctcctttgcccccaaggatatggctactactgcttgatgtcctgttgcttagagtgttcttggctggttgctttcagttcttgattggttcataccttggtgccaagaaatggaggtggaggcgatggagaagaagggacacagagcctttgctaaggcaattaagtctttcggttcttcagaaaggcacaagcgttctaagaggtttgtgtctttggatttcttatgcaaagttctctgtttctgttgttacgaatgctaataacgagatctagatgtttttctatggcagtgatcttgaggatatgtgtgctaaagatgcgctgtatgcttcagataaaacatgcgttcagcctaagccagtgagtttattttctgttctctgttctctgttctgtcttccacgtttttctactgtattctgcagtaaatgcataatagttctgcatagtttcagtaattttgagcattctgtgttctggtttactcaggatgctgtaaaagttaaggtaaaaagtgatatcaacgctgaagtgcaacctgggagaggagcgcagagcttcttgagaaaagaggtaatgagtgtaaaattctatttttcttcattgattttatcgccaacctgccctttctggacttaaaaatcttttttagtaggaaaagaaaagaatcacatttcaattacagacaggaggttgcatttcctttttgtatctccatgcttgccaaatgacactttttttttaaattttcgtttttggccgaacaatgcaaatccttaaacagaccaggtttttttttgtttgttttacaaacaaagcatgattttcccagtgaaaaataatcctggtaaaaatttctctgcaaatggtctaggataatgtcacttttctgctgaattcaacatagtttagactcatcatgacggcctgatgcagattctccagctagaaaagcacctcaaggatcagcaggtcatgcgtggcgccctggagaaagctctgggaccgaacgctactgctgctccagtcaacgtatcaaacgagaatccaatgccaaaggtaactcctttgcctaaccacatgaatgagaattcaccaattttaagtttttaaccccttacctgagcaatactgatctgaagataaaatggtttttttttcaggatgccaaagaacttatcagggagattgctacactagagcttgaggtgaagaacatggagcagtatctccttaccctgtacaggaaggcctttgagcagcaagtgcccacattttcccctcctgaccaccggggagctccgaagccgccggtaccggcgatggcggcagtgagctcgcagcctgtgcagctgcagaaatcacccagtgtcaaggcatctcgcaagaacaacagagctgacgcaatgctgcgatccagctacccgccaccgtcccgtaggacgttgaacgatccagtgatgacggattgctctacgtcgggttgctctagcaggctaggtgaatctgatgttctccggtgccagtctgcggtgtcgtaccgcggcatttgttcgtccaggatttcaccatcggaggacagtcttgcgagagctcttcggtcatgccactctcaggctgcaggaatt

SEQ ID NO: 20983 - DNA, 2937 bp, Oryza sativa
atgaattttgtgagcaggaaggagagagtactgcagcaggagtgataagcttagcagagtatctaggcactaatgtagctgaccacattcctgaaactcccaacaacctatcggaggagatggtgagatgcatggcaggggtgtactgcaaacttgcagatccccctttggttcaccacggctcgtcgtcttcgccaacgtcatcgttctcctcgacgagtgcgatatccccgcagtatctgggggatatctggagtcccaattacaagagagaatctactctggactctcgtttgataaaccctttccatgttgaggggttgaaggagttcagtggaccatacaatacaatggttgaggttccactgatttgccgcgatagtcggaggctaaaagaagttgaggatctgctccagacttacaagtgagctgttctttcttgtctctgtttggtgaatgcagatatttttcttatatgttcaatgtcctaatacgatatactgaattgtatacttcaggttgattttgtaccggttggaaaccgtcgatctcaggagaatgacgaacgaagaaaagattgcattctgggtcaacatacacaacgcccagctgatgcatgtaatgcttctactgtttcagttcactacaaatttctagcattgtctcaagttgtttttttgttaatgggtataatttgtactacctccacaggcttatctaaagtatggcgtcccacagaacaatctgaagaagacatcacttcttgttaaggtaaacattttcctttgtagaatcaatggaatgcacctttcgtgtacttaattcagacgaagtttcttctttccctgacatctgttcaccacaggctgcctgcaaaattgctggacggagcatcaatgtagctgttatccagagcatggttcttggatgcaacacatactgtcctggacaggtaaagcaaacatgattattaggtcaaaactagttaaaagtgtaatattcacactgtactgattatatagcaagcatgctaattctatgtgttgttccttttaatgcagtggttacgtactttgcttcacccaaggatcaaaagcaaagtgggcaaagtagggcatgtgtggcaagcctttgccgttgcacaatcagagcctcttttacgctttgcgctttgttcaggaagccattctgatcccgcggtaagctcattgcgttttctcaaattggtgtcatcttcattgtacctcgatctattttaaactaaccaatgcttccttttatcaagccatacttgagtaattcaaccctttttagcttttaggcacaaattcggtatgaaaaagtctcacgtgtcctgaggaaatcataccctgacacattgtcaaaacatgctaatgaaatgaaaacctttcactgattggggaatattgttaggaatcattcaatcattctccatgtttggaatctctcaccaaagttactgcaggcattattacttggtggtgccaactactgccaagccagtcaatcccctttagtcacaatcatctcacaaactcctctttttctgcaggtgagagtgtacactccaaagaggctgttccatcaactggaggctgccaaggaggagttcatccgggcaacggtgggcatctggaaggagcagaaaatactgcttccaaagctcgtcgaggcgtatgcgaaagacgtcaagctctcgtcgcagggccttgtcgacatggtgcagcgctacctcccggagagcttgaggatggcaatgcagaagtgccagcagagcagatccagcaagatcatagaatgggtgcctcataacctgaatttccggtatctgctgtccagggacctggcatttcctcacctgaactgactaatcttactgctctctgctcaaataggctgtgaaatgagctgaagtatatgcattgtatcatatagatttagacgtaaggattgtgtagggttgatgtgtgagtagtgtttatctttgcctgtaaaaatttttgtagatgaacagtaaaaggggaagaaatgagaaagaagcatcctttggttatctgacaatttcggtatgttgtgtcattgtgtgccatgttaagcctctttgtgtgggccgaaatgcaggtttaatttttcggccatgttggactgacttgattacatagatgggccaggacttttgcccatccaaacaaccaaggttcagaccatttgatagctgacaaatgtttaggtaacaataatctatttgggctaagagaacaccacatcggggttttttttttttggcagtttcagagctgaagattccaaatgaacactgggctataaagaaagctactatctcaattcagagcacattggacggtgtgttagctagagattggagaatacattttgctctcttggtagattaatcgattgattattcttttattcagatgagtctgttgactcttgtgttctgaacttttgatccacatgccattcaacaatttcagtttttgaagatgcaaaaggcacaaatagaagttatgagcttaggcagtgatttggcagttggtagcacaccatttcttatactttataatagtagtagtagtatcatttatatttacatttaaatctacctacattttcttctcatgtttttggcgcctaaattaaccgcaccaagaacggacgcaggctggctaccgttgctacacatcacaacgcaagcgcaagctcaaagcatcacaaggattcccagccgtccgatcgagttgggcccacccgtctccccttggcgtgggacccactgccagtgagacagtgcactgatgcttctcgctgtctcgaggtcgttggccatggcggcgaggccggggcgctctactcggactccggaatggcggtcaggtcaggagagaacttgct

SEQ ID NO: 20984 - DNA, 4323 bp, Oryza sativa
  unsure (1)..(4323): unsure at all n locations
tttaggccgtaacatttagcaaaaaactaatcttaaggtcctgtagatactagtgcaacattccctattcatagatccgcgcccgcctttatcgagttagatacgaaattatccatctttgaaactggtattaaggtggtcgatcttttagctccttatcggcgtggaggaaaaatcggactatttgggggagctggagtaggtaaaacagtactcatcatggaattaatcaacaatattgctaaagctcacgggggcgtatccgtatttggcggagtaggggaacggactcgtgaaggaaatgatctttatatggaaatgaaggaatctggagtaattaatgaaaaaaatcttgaggaatcaaaggtagctctagtctatggccaaatgaatgaaccgccaggagctcgtatgagagttggtttgactgccctaactatggcagaatatttccgagatgttaataagcaagacgtgcttctattcatcgataatatctttcgttttgttcaagcaggatcggaggtatctgccttattagggagaatgccctctgcagtgggttatcaacctactcttagtacagaaatgggttctttgcaagaaagaattacttctactaaaaagggatctataacttcgatccaagcggtttatgtacctgcggacgatttgaccgaccctgctcctgctacaacatttgcacatttggatgctactaccgtactttccagaggattagcttccaaagggatttatcctgcagtagatcctttagattcaacctcaactatgttacaacctcggatcgttggcaacgaacattatgaaactgcgcaaagagttaagcaaactttacaacgttacaaagaacttcaggacattatcgcaattcttgggttggatgaattatcggaggaggatcgtttaactgtagcaagagcacgaaaaattgnnnnnnnnnnnnnnnnnnnnnnnnnnnnnnnnnnnnnnnnnnnnnnnnnnnnnnnaaagtatgttggtcttgcagaaactattaggggatttcaactaatcctttccggagaattagacggcctacccgaacaggctttttatttggtgggtaacatcgatgaagctagcacgaaagctataaacttagaagaggagaacaaattgaagaaatgaaattaaatctttatgtactgactcctaagcgaattatttgggattgtgaagtgaaagaaatcattttatctactaatagtggccaaattggcgtattaccaaaccacgcccccattaacacagctgtagatatgggtcccttgagaatacgcctcctcaacgatcaatggttaacggcggttctgtggagcggttttgccagaatagttaataatgagatcatcattttaggaaatgatgcggaactgggtagtgacattgatccggaagaagctcaacaggcacttgaaatagccgaagctaacgtgagtagagctgagggtacgaaagaattggttgaagcgaaggtagctctcagacgagctaggatacgagtcgaggctgttaattggattcccccatctaattgaagacaacccaacggtttagttgatacaaagaaaaagggaagaggggtagaaaaaattattagatagcgaagcgaagtagggccaatgctatctagtaatttttctacctacctacctactattggatttgaaccaatgactcccgccgtatgaaagcaatactctaaccactgagttaagtaggcaatttatcaccacaaaggaagaccctttacttcgatcgattatagatcgaatcctttttataagcaaataccgcttcgttattggtatgttattatagtaaacagatcaaaggatatcctctactattagagaatattcatcttgacaagaaattctctatatattaagatatctctgacaagggctatagctcagttcggtagagcaactcgtttacacgtgcgccaatgcttttcaagggagcttattatgcaatgaacatagtggatcttcttgcaaaatcaatgtcttacttcatggattcgagagaataggagaacagtcgcctgacaaatagttggttcagtccgattcaggtaccaatccaggtgcctaaacaaatagaacctttattgatttgctagttgataaggtaaatatccagcccactaaatgctaggcttaatgaggataagggcctccaaaaaaattcttttcgttctatgaactttaaggtgtatgaagtctcatagtcaactcttgtagcggaacgatagagactctatttcacttaggttgatttaatttaggccggaggcagacctaagtcaaggtaatcctcctttgaaacactttggtattgctcttagatagatcataatacaaataatcaatcagagcgcagggagccatctcattatctttccgtaaagaaaaactatggtggactaactgatctttctatcagttgataaaagagcccaatgcaaaaaaatgcatgttgggtctttgaaacagttcgaatcatttcgataataatccgtttgatctgttttaccgagaaggtctacggttcgaatccgtatagccctaatatgtcctttgctaattctcaaactacggaaccaactgctttcgcaccgggggaacaagatccgtttcaaggaccctaagaatttggaagatatctcgagaaaaggttttagcaccggtctctcatatatgtactccagtttatccgaagtatcccaatggtgtaagaccgtcgactatttgggaaaaaggaggaaaatcactctgatctcagatttcggagaaataagtggctcacgaggaatggagagacagattctctatttgatctcgaagtcctcatataacacttcttccagtcggatcacttgttggaaaaaaataatgctcacacatgttccacacgggcaaggaagcataatctaatgaaagccgtctgagattctttctataggaaccctgaagagaaaggaccctcaaacaaaaggttcctgaataaagaaggatgtaaggaagctgtcgtaaagtttcgttgttcgttccgtagttgaccctatctatgtttctacgatggcccaagaacacgctcattcttcagccgtagagagacttttgaattgtgaggtaccattacgagctcaatatatacgagtgttattctgtgaaataactcgaatttcaaatcattcacttgcttcaactactcatgctatggatgtgggagcatcaactccgttcctttgggcttttgaggagcgggagaaattgttggaattctatgaaagagtcccgggagccaggatgcatgccagtttcatacgacctggtggagatgaattcagaggactcaatgaagagtgctctaaaagaaacctcctcgcatctaagttttataaaactagtgggtgtcaaaatcccaaattgacagatctctatcatcatgtacatgaaacataaaaaactttaaaaaaaaactacaacccgaaaaaacaaccacctgtcaattgaaccataggcagacctcttgagctacccacagcaagtccggtggcattgtagcccacactcgcccatccctatgcttaaacaacccccaaaagacccctatgaaaatacctgtgaagatcgtgcatttcagtcacattcagatccgttttttgagtccatgatataaccaaattggatggatcttccacccgtttagctaagaaagaatagatgcagaggtggataatagatcgatatgaagatcatgagctgccccataatgaaaccaccaggagtcgcgaatatctccttcttccctaatccaagattggagaaagaagatctaagagggacccatggagaatgtggtcagaaacccataatagagtccgaccgcaacgaccgaattaattatcctcatcgagaaacttagactactaagtagaaaagatttgaaaatcatggcatgggtctcctttttttctttctttagagttttctatatgcacaatttctcgatgtttcgatgagaatttcttgactttccatatatagaaagagatagactataaatgacatctcttatgtcaataagaccaaagggatggatattaaatgataggaagtgctaggaagtgaaatagaatgaaatagagccactctgggcttacctatgaaatgaggcatggaacggagccactacgaagaaattccgggagttacgaaagaagcttcggactcatattgttcatgggttgagagcgggagttgaactcta

SEQ ID NO: 20985 - DNA, 764 bp, Oryza sativa
cgaggaccaatgtccgtctggcccgaggaaacctttgcacgcctccgttaccttttgggatttggatctttttcgtatttcaaaatagtgaaaaagtcaaataagaggtgttaagctttttatcattctggcatcgagctattttgccgcaggacctcccctacagtatcgtcaccgcagtagagtttaaccaccaaattcgggatggattggtgtggttcctctacgcctaggacaccagaatatcgaaccatgaacgaggaaaggcatgagagaaatattggctagtaattgtgaagccccaattcttgactggaagggacaccaaaggcctctgccctccctctctatctatccaagagatggaagggcagagcttttttttggttttttcatcttttcatcaaagagttgaacaatgaagatagatggcaagtgcctgatcgatttgatcaggtcgtgtaggaacaaggttcaaatcgttcgttcgttaggatgcctcagctgcatacatcactgcacttccacttgacacctatttaaacggctcgtctcgccgctaccttatcctatttccatgcttctgtcgctccatccccgtatgggtggagaacccgtcgctgtctcggctgtgctaccggaggctctagggaagtcggaggagagagcactcatcttggggtgggcttactacttatatgctttcagcagttatcctctccgcacttggcttcccagcgtttaccgtaggcacgataactggt

SEQ ID NO: 20986 - DNA, 1042 bp, Oryza sativa
acttggggagatttgattcattctttaatgtaagaataaagaattgaattaaagggcttgctttgacccttaggagtaggtaacccgttcgctatccttgtttctattgcattttatctcatcgtatcacattctgttctacgattccacttcgacaaaaggaaagagcatacccaagttcaatagctttacgtccgctatcccgatcatggttttcctaccctcagggggaaagtaaaggcccttcccctttggaaggctgtgggcgaggagggattcgaacccccgacaccgtggttcgtagccacgtgctctaatcctctgagctacaggcccaccccgtctccactggatctcttcccgggggtaccccccaaaaggaacctccctctcctcagccatttcatttcgggttaagaagatgggaaagcccctttctctctataagaacagtgcgttccgaggtgtgaagtgggagagaggggatgtgatgattgaggttttgaataagacgacctttgcattttggatttggatctttttcgtatttcaaaatagtgaaaaagtcaaataagaggtgttaagctttttatcattctggcatcgagctattttgccgcaggacctcccctacagtatcgtcaccgcagtagagtttaaccaccaaattcgggatggattggtgtggttcctctacgcctaggacaccagaatatcgaaccatgaacgaggaaaggcatgagagaaatattggctagtaattgtgaagccccaattcttgactggaagggacaccaaaggcctctgccctccctctctatctatccaagagatggaagggcagagcttttttttggttttttcatcttttcatcaaagagttgaacaatgaagatagatggcaagtgcctgatcgatttgatcaggtcgtgtaggaacaaggttcaaatcgttcgttcgttaggatgcctcagctgcatacatcactgcactttcacttgacacctatttaaacggctcgtctcgccgctaccttatccta

SEQ ID NO: 20987 - DNA, 664 bp, Oryza sativa
tcaccgccagcctgcatcagtcgccgccgactggtgtctccgcctacacagctgacctattatgccgtcgctgttgggtgtctacgacttcaccgccggcctgcctccgtcgccgccgattggtgtctccgcctacacggctggcctattatgccgccgttgttgggcgtctacgacttcaccgccggcctgcctccgtcgccgccgactggtgtctccgcctacacagctgacctattatgccgtcgctgttgggtgtctacgacttcaccgccggcctgcctccgtcgccgccgattggtgtctccgcctacacggctggcctattatgccgccgttgttgggcgtctacgacttcaccgccggcctgcctccgtcgccgccgcctggtgtcttcacctacacggctggcctattatgccgccgttgttgggcgtctacgacttcaccgccagcctgcctccgtcgccgccgactcgtgtcctacacggctggcctattatgccgccgttgttgggcgtctacgacttcaccgctggcctgcctccgtcgccgccaactggtgtctccgcctacacggctggcctattatgccgccgttgttgggcgtctacgacttcaccgccggcctgtctccgtcgccgccgactggtgtcttcgccta

SEQ ID NO: 20988 - DNA, 6098 bp, Oryza sativa
tgttcctgggcaacaataggtttgaaggggtacttcctgtttcaatctcaaacctttcagtttatcttgaatacctctatcttgattttaatgcaatatctggaagcttgcctgaagagattggtaacctcgttaggttagaagctcttctactccataacaactctttcacgggaattcttccgtcatcgttgggcaggcttaaaaatctgcaagttttatatatagacaataataaaataagtggatcaatcccattagccatagggaatcttacagaactaaattatttccgccttgatgtgaatgccttcactggtaggataccaagtgcacttggaaacctgacaaacctagtggaactaggtctttcaagcaataatttcacaggttctattcctgttgaaatatttaagattcacacgttgtcgttaactttggatatatccaataacaacttggaaggatcaataccacaagaaatcgggggcttgaaaaatcttgttcaattctatgcagattccaacaagttatcaggtgaaatccctagcacccttggtgaatgccaacttctccagaatatatctctccaaaataatttcttgagcggtagcgttccatcactcctgagtcaattgaaaggtctacaaattcttgatctttccaataacaacttgtcaggtcaaatacccacattcctgtcaaaccttaccatgctcagttatctcaacctttcattcaatgactttagtggtgaagtaccaacttttggtgtcttttcgaatccttccgcaatttccatccatggaaatggcaaactttgtggtggcataccagatctacatttgcctagatgctcttcacagtcaccacacagaaggcaaaaacttctggtaattcctattgttgtttctcttgctgtaacattactactcctcttattgctctacaagcttctctattggcgtaagaatataaaaacaaacatcccatctaccacatccatggaaggccatcccttgatctctcactcccagctggtaagagcaacagataatttctcagcaaccaatttgttgggatcaggatcatttgggtctgtgtacaaaggagaaataaataatcaagctggtgaaagtaaagatatagctgtgaaagtgctaaaactccaaacccctggcgcactcaaaagtttcatagccgaatgcgaagcactgcgaaacctatggcatcggaaccttgtcaaaataattacagcttgctcaagcattgataacagtggcaatgacttcaaagcaattgtgttcgagttcatgcctaatggcagtttagatggttggctacatcctgacaataatgatcatacagagcaaaggtacttgaatatcctggaaagagtgagcatactccttgatgtggcttatgcattggattatcttcattgccatggccctgcccctgtgatacattgtgatattaagtcaagtaatgttctcttggattctgacatggtggctcgtgttggagactttggacttgcaaggattcttgatgagcaaaactcagttttccaaccctcgacgaactcaatactatttagagggacgattggctatgctgccccaggttagtctgtttcttgttcttcaaatgaagcccacatttatacaataatattagagcaatgctccggtgctttctacttggagtattatactacaagtaaaattaatctcgaccgttcattttaaagggtagattagtaatctcctaatatatattaggggcaattttggcaggatctattttctctgtctcggtcggtcttggcttgatcgcatcaggtccgacgaaaagcaccgcatctcgcccgacgcacgttgcttatcgctactcctcccggcacgccgtggctcggtgcggtgaaaccctcaggcgtcccctcctcccacctctcacctgtctatccgttcctcctcctctcctgtattccacgtcggcatcctggttcgccatcgtggccttctgtccgctgcgagtggccttccgcgcgcgtccgatttcgccggagcccctgcgcaagacctaagattcttggcagcgcccactttggaggattcaatccattccgccggcgggtagtgatctccattccgtgttgctctgattgtgtgggctgcggccacttgggaggcagctgcgatacattccagcgccgtatccccggtccccctccgtgcgtgcccgagtcttgtggcttgcatcggcgagcacctcctcgaccgcgagcacggcatgagatgcagaatatgcaacagtgtcgctcgctgcgtgttgccgtggaaggcgtcgccggcgaacctgatagaccgcaatgctcagaggtttcagcacatccgtgctcgcggcggcgtcaggacactggatcggacgatgaacgatgcatgcggcatgcccgatctgctagctcaggatggtggccggcgactgtccgcacgctctccaacgggcatgacttccacgaggattgcaacatcgcgaagtggctccgtgacaacaagaaggcctgcccagttcattctgcttgtaatattcagttgtatggtgtgtcgaatacttcattgactaattgacgagctttgagatactgatgtttattggatcttgtgactgtcccaatatattcattgttcagtaatggtttaagtaaaaaagaaaaggtgaatagtgatggactactagtaatgtcaatgtgttgaccatgttagtgtgttgtgcattttttttgtgtgcaactgtgatggggtgagatgaatccaagcaatttgaactgaaatatgtcatcctgctcctggatcagtaaacaagttgttttgctcctgaaagagtgagactgaaaaaatctgataaactgcttaaatgagatttttcactatcagagttttgcccatatgtaaattgcatttcagtcagagctgtaattcaggatttgttttatatttcataccatcgaaacatctaactgcattctgtcatattctggcgctctgaatcatcgctacatgattcctttcttgtgctcatatgggggtagctaagccctcaattgccactaaattgattttttttcagtcataggacaatgtctactaatgggggcttagaacatcttgattcactctttgctgcaaactccctggtctactgtcgtgtttatgcaaaagcatttgcattagctccgcggcagcttgtgaagtcatgcacagtccctattcatgtagcatccaaacacctcattcccaagtcccttagctgctcgtacggtcgccggcggcgaccaaatgccaccgcctcactcgagctccgccactgcacgtcgccggctgccatagctcatttcttggccaatccgagccgtccaccacatccccatactacactcgttcattcccagttgcccattcctcctacctcgccgccgttcgccggaacccgttgaatttcgtccgccgtccaattgcccggcgatctcctgtcttggtcaaagctacatggcaggactagtcgtccgccgtgggcaaggaccttcagcggcttggcgaagaggagaagggccacccttggtcgctggagggggaggagatgtcgatcgcgctggagatgatggaggcggagagggagatggacaagcgacgaagtcaacgatggatggggtcagccgcttgagaatggcgaaggtttagagttactgaataataatttacgataatacccttacatgaattattatctatggacaaatatacccctccacgtttctactaccactatgagtggtggtagtagaattagatctcaaccctacgattatatacgatcaacggctcggattattttctactataagtagaaagcaccggagtgaggctcataatattatgggccatttgcagatgaaattagttttaggggaagcattgaatttttatttttacctaattgtatatcagtacaacttatggtaaatttatagctatacaagttataagaattctaatatttctggggaatgttcgatgcaacagaatatggtgctgggaatactgtgtcgacgcaaggtgatatttacagctacggcattcttgtgttggaaactgtaactgggaagaggcccagtgacagcgaatttacacaaggattgagcctctgcgagtctgtaagtctgggtttacatggtaaagtgatggacattgttgacaacaagctgtgtctgggcattgatcagcatgatcctgagacaaccgatgatttttcaagcaagcaaaagatcgattgcctgatttcattacttagactaggactttcttgctcccaggaaatgccatcgagtagattatcaactggagatatcattaaggaactgcatgcaatcaaggaatctctcttgctggaaatagaggatacagaaaaatgaagacactgcatttcttttttctgctgggttacttttatgttctaataaatctgtcatgcatattcttgagctccctcttaagtatctgcagctgagtcctgtagtggtcattccaactatttgtatcctatgataactggatcactgatgttcactgcagaaatatctgttatgtttcttttgatgcaattactttggatcaaatccaaattgtttacagtgtggccggttgcagtcatgcttctacagtctgcatgatacctttgataatttatacaagagtactatgcaaaatgaatattcccttgttcatttctggttacagtctgcatgatactccctccgttaaggttataagacgttttgactttaatcaaagtcaaactgttttaagtttcaccaggtttgtagagaaaagtagtaatattttcaacccaagataaatttattattaaaatatattcaattattgatttgatgaaactaatttagtattatatatattactatatttatctataaacttagtcaaacttgaaatagtttaactttgaccaaagtcaaaacgtcttataacctgaaacggagggagtaccaaagtacataacaaagtaatacattgattcgcatgataatttcgacgattttagactgggtaagttattgcttacgttttttttttttggagaatacgcaaggagcgcatctttgtattatgaggaacaaaagttatttactgggaaaattgaaaaaaaaaataagggacgggatacaagcgataaccaaaaacactaagctagacctattctcgcacgagtattgtgcgacctagagaagactaggggctggacattcaacgccggaattgccgcgttggccaaacgccagagttccgcttcagcaatcattgccttcgcaacctctagccacgttctatgctctcttcgtgttgatcacaaatgacgcaacggtctaggtgtgggaggccacggttgtggaggaggtccacgatccagcacctgttgagagcaaccaaccataagaagtagcggcatcgcggggcgccatcaatttccagattggtttggactgaaaccagactcttcctaggaacaatgctcgataggctgaactggaggtgtattcccccgagcagtcccacctccaagagagggagtccggttgatccggcaatagctccatcgagtttagagtggtctaaaggtggaggtactcgagaatcgcttggatccctagagctccatagatgtctctgacccatcttctaccttgaagtgcctcaacgatcgttttgcgacgtttgaaatgctcgacctcagggacacagttgtagacggctggtgcaaaggagcgaacagagtatccttctagctagttgtcttcccaaaagagcgcagattcaccattgcccaagatacacaccgtggacgccgccacgaagctgcgttccttgggtgagattgggatgttcagaccttgccaaggcttatccaagcttgttctctgcagccaagcccagcgagatcttaaagcgatgcccattcgctctaagtcgggaacacccaatccaccgtactctttaggggcgcataccttggcccaa

SEQ ID NO: 20989 - DNA, 11208 bp, Oryza sativa
atatatgtgtacctagatttattaacatatatatgaatgtaggcaatgctagaaagtcttataacctaaaacggaggagtagtatttatacccaccaaccaatctatattgaccagttagtttcttgtgacttgtagtagtactttttattatggaggttataacttgtacggattttgactttttcttgtattatttgaccacttgtcttattcaaaaaattttgtgcaaatataaaaaacgaaaagttgtgcttaaaatactttggataataaagtaagtcaaaaaaataaataatgatcccaaaaatttttgaataagacgagtggacaacagtacaagtaaaaagtcaaaatcatttatattttgggacagaaggagtactaattaactcttgttgcccaacaccatttcatgacagattggaggcatcgttggttaattataagagaaaaatattacccactgacatgtgggaccaatgtgtcagtggtcttttcgctgtttttgtcgcactgaaatggcatggagggtgaatacttgacccctagcctactctgtttcgtttgcctcaatttgtagagtctattggatggtctacctctgttccaaattacatatagtcctcaatcaaaaatgtctatttttttatcgttaattttaaatatccgtgtaatttaacttgtgaattatatattatgaaagtatttgttttgatgaatctaaaaataaaatcttatgatattaaactaaatcaatggttaaagattgaaaatgcttaactttaaataaacctaaaacaactaatttgaagcggatggagtattataaagttgaaaaacagatttaaaacagttttcaataattatatatatatatatatacacacacatatatatatatatacacacacacatatatatatatatacatatatatatatacatacatacatatatatatatatatatatatacatatatacacacacacatatatatatatatatacatatatatatatatacatacatacatatatatatatatacatatatatacatacatatatatatacatacatatatatatacatacatacatatatatatacatacatatatatatacacatatatatatatacatatatatatatatatacatctatatatatacatgcttttgctaaaatagtgtcatttaaaacaaggtttatatgtatcatactttttctttacttcacccctagataaatctggtatcagaaatactttatagtatctttattactatatcttaatttagagatgaaaagttaatggtcaaagtcacctcaaatactctagtcaaaacatcaatcgaaaaggtaaaacatcaaattatcactatgttcaatcttgcatctacaagacgctaaatccataccaaacaaaactgaactctatagcagacaagctgacctgccgacatcaaattcaacaaatagcagacaaactgatctgccgacataagaaattcaacaacttggtctgggaccatactcaaactgttgctgttgctcagaagaatctctgaaggatgactgaaacttcgaaaatctggtgaggttcatgtcattaaaatctgatagcaattccttcattcactgatatcagcaccaacaagctgatcatgtgtttggtcatgaggattgtacctacctagaaccccccataaggccataacagaattctcatgaaaacaacattgcacattttagatgatgaagtacaattcccagcatctgcattatcgagaaacatcatcgggaattatgttacaacaatacaacagctactatacaacttatcaaggactggatctgctcttggtaactatcacaaggtgccacctgggttgtcgttcgattccccgtgtatttcgcaaactatcaatttttttataaattaagactgctttgtgtagtgcattcaaaattcaatggttaactcagcaaactgaatgggcctctcatcatcctgtggtgctaggggttaagcagcagagccaactgtttgtcttccttttccttgttcgtttagactctttgtccttgtggaaaccgttctgatgtaagccattggtgtcaaggctctcttctccgtgcacccgtgtcgtgctcctccttgtcatggacatagtttttgttacggtagaagctgttgtgtatcgttgcgagtcactgtcaagagcatctttctccctatgattaacattctcattggacaatgaataagtgtgctgggtctctctgcattaagaaacataccatgtaataactgtgcatcaactttagtgcaaatgtaccacagaagaaattaatatcatttagtgctgaccttgaatctcgaggtggcaatgtagcaggatgttcatttggaatattgtgtgaatttctagagtcagtggtactgccatctaaagttacatcgtaaccgataaacttttggaccacactggcacttccagcattgttgcctcggataattgcaatagctttgtccaatatgttcaaagcctgctctacctcaggactaatgtaaggcttattttcaacatgttgctcttgctcagccggagggtttgaagggcctattgcatgatgatccagcttgaataatgccttctgttcactctcctcttcgactatctcactgttcgaggtgatattagtaaccgcgagaacattctgcaaagtgggattgtcagggagggcttctgttgccctttcctccactggagtgacatttgcgatgtcagtagaaccccggtgctcacggattctaacatagagtggttctctcaaagctttcttgtaatcctcatcacaatttgccacagtactgactgcctgcaaagataagtcaatagcaagtgtttaaacaggggatctcttgtgtcagaatttgctcaccccacatagcagtaccacgaaatctatgtaaagaccatactgcaatgggaaaagcgctatgcatattgatatcaaatcatcacaaaagtatcgaggtagtatgccactgaccttctgatagagtttatggccgctgccaattagttgccttgatatgaagttgataagccatggtggaacgaagtctagcttaatatccatattagctattgccctgagtggaggatttggttaaaaaatggagtatcagcatatttattaaactgaaacttgttgagcaaaaagaatcacaaatgaataaattttaaaaactacatacaattatatctttcttaaagttcaaacgtgatttaataacaatctgttcaaaaaaatggagtcaagacatcatgtaaactagcattcaagacgcaagaatgatgaaaattatatattgctaaacaattaaaattaagcaggtaaaacaaattctacagctcaactcacaagtacaggaataacatggcttaataatgaaaaattaactagtaaaataaaaattatagcatgtatccagaacatgcatatcaagtcagaagtacgtcatagaaaaatgaaaaaacttaatggaactctacctttttctaggacaaagtcatccagtccttttacagtcactaaaaaatcactttggttgacagaatcactaatttgattccaagtttccaacaaaagtgggtacaatttcaatagcaaatggagcgatctataatgcatcttcgtgctttatattaaataattcaatgcacaataggattggatgttttacctgaaaagcttttctcctttgtaatcctttgcaaaacaaagcctccgactacatctatccgaacggtgtcaccagcttcaggaattccatccctactaaatccatgtgtctctatatttatattgtccgtatccgatatctgcaacaacgcaataagcagaaataaatgaactggaggcatggacaatgaagtctgtggatcaaggttcataaaaaataaatagcccagaaaattcagcatacgcacagttttcatgattacaatgacaagatcttctttaagatactctaattcgaagtagtgaagaagagcttctctctccgaaactggccatggaaccttcaccctttcttccaaatagtggatgcagatgttagtcacaacatccatcaaagagaaaatccaactaaaatttgtagaaaaatcatggactgtaaagaagatttatctttagccaacctgaccaaagaaatttcttcaccaacccgaaccttcttcaaacagcctgactgagcaactttaaaagttggaaggttgtattgtggaaacctggaacacaaaaaccacatcagcatatgagaaagaaagtacccatttgtctatcctttttgtttcttgggttcagtggggctgccaaaactttagtataccgctggcaaacatgttatgtttcataaaaagtagtcgaaagtaagccatagaattatccccaatttttttttgcaaacattgttggcaacaattagtccaatctttatgcatatggctgaaatgaacattatgttgtctttgtcagcttactgcagaaagggactttacatgagcaatggtgcaacatcaggtagttgctaaagtaggtacatgtgggccatatcgcagagtgactgctataagcaaaataggcaatatttgagtacacttctcaattaagaacagtcatgtgttaactcaacaagaaattgagtcatgtgagtgcacttcgtgaagaacaaaaaacagcagtaaagaaattgagtaaaaaaacacaagaaactgataatctgaatatctgaaattgttgtgtatagattatccattctctaagtagttttcttagtatggttctatcaacttgatgtaatcgtctgagattaataaaagcttcctttatcaaaaaaaaaaagtagtaaaaagctgtactgccatgttctagataaaagtttttgtgttgattccacatgctaaagtaaaagctgagtcaagcaggtcctgatgctgcctccatgaacttttttttagtaacaaatatagtgtccgacgatgcaaaattctaggcgaacaacatctgaagttgtccttaatgaatgtgctcaccattttttgtacagagacgattcccatgaaacacatgtacctatgcaaaaaacagtgtgcttaagtgactgtgtgtattgtgagaccatagcattttactcactactagttagatttcatacaaacatcaattggtccatcagcaaagccttcagcaaggagggtgtgaaatggggtcccctctggtccctcgcgatacataactcgtaattggtccgtgtcttgcttcacctacagaacagagagtaactgcatatcattgcaccaatatagtacaatttgcatgggaatgtaacagacaatttaatcactcccaaaaagaagggagaagaagacatgataacagcaaattctgacgcaaataatataaatgaggcagaaattgcaagcataaatgcatccttacgctctggagattgatcataacatggcatatgaataagtaagcaagaaaacaatgaatacatcacattttttggtgcaaagtaaagatccatttctttgtgctctaatcacatacacgcagaacatattctttaaatgttttactttggttcaatgcataccttccattctttatgtgatgcctcatgaatcttcgaagatcgttcattccccgaagtatttagcatttcaagaaaattcgagatctctttagaccttgcttcagcaatcaggtcaatattgcctaaaaatgatacaaaaccaaatcataagaaaaaccaacaacagagagatcacacaagcagcctgattatgatcaactcaaatagatctttcaaaacaatcaactgaaatagtagcaatcattcaggaaccagtaggatattcacacatagacgatgaaacaatagaatctaaacgacatcacatgagagaatattttctcaactgcaaccataacagctcacgtgcagcacagataaggtaaaactaaagtacacaaaaatcacaacattaattacatcaacaagctaacctactcgatccagagaagaagaaaagaaaccaaatcaagcccccaaaccttcatcgttgccggcggacagcgacgacgcaagaatctgcctcttcacgagagatctcagcaactcctcgtcggcgaggtcgggcagcgccagcgtccggtccatccggtcgcgaagctcccggatttccctccgcttctccatggccgccaccatcaagctctagctcccctcctcaccaacctataccttcattcacccaaagccatataaaaggtataagatgagacctttttctctccaagagcaaagaaaaaaccccaagataggaaaccacgcaatcaatcccccaacgattattcctttttctccccacaaaaaaggctcccatcacccttgaatgaatgccaataggagggaaaaaaaaaacaaagaaggcaagaaagctggagactttatgctctcatggctgcaaaggagggaaagcacacgctctccaccacctccataaaagttgccgaatttatctccaaggaatcgatctcactgagatgccaagattgcctacttgtacttgatactactactacttcttcttcttcttcccaaagccttttccacataataagcgaatatatgggaattgggaggagaatccaacccaagcagaagctagagatactctacttaccgctcttgtcaatggagattgctccggcgatgcgcggcggcggcggcgaggatcggcgaggaaggaggaggaggagaagtagtagagagagaagacgcaaatgaggagctttggttggtaaatggatgctggatgtggggcccacctgccggagttttattattagtggcatttcatttctccgaccgagtattttgactagtatatatattttcgtttttcaacctgactgatcgcaactgataactgactaatatattttcgtttttcaacctgactgagggactattaaaaaaaaaccttatataggttttcttatatagttatcaaaatattggcagaattttttatataggtactaaaatttagcagaaaactaaatgtagccatttttttagtaactttaccaaaatttggtaaggttaaaaatagcattgaacagctcataaattcatcaatcaaagctactctatctggtagctgtacccagaatttgtggtgctccacttgacctttatgtacttaccttgacaattcgtagaaacttcggtaggatgtattcactccgtttttaatacatatcacttttaaaaatatatatccgtattacttacgcacttcatgctagaagtaactttaataataaattaaaacacaataaaatagataatactacctccctccgtactaaatataataaaatataatttatatactttaaaacaaaattagtattttctttttaagctgaatgtttaaacgtttgtttaagagttaacggtattatctatttaaagtaaaaccggagataataatcatcgacaatgcgttacgggcaatggtaaagtgcacaaatagacaatgtattaaaaattcgagaggcaatttcgttggcctaaccgcctaagttggccggtcatacaacatcgcgcactaatttgattgtaattgtcgttaattatcacatatcaggaaatttgtatgacactctctaattccaaacatattattttagaccagtgtaatggaacttagggaaactgctaaagtgaccatgtaactacatggtaagaggatacctcttttattaatactattccctccattttataataataataagtgtagttttagctcttttcatttttcttaaaataagtttatgtttagtaataagtggatcataatttatgaaagtagaaaatatttatattacgagtagataaagtgaaaaataattatattggaatttgataaattagaggtattttattattttttttctattgatatgtgtgggatgggtgaaaaataaatataggttgtgtttagttccacgctaaaattggaattttgaagaaattggaacgatatgatggaaaagttgaaagtttgtgtatgtagaaaaattcgatttgacggaaaagttggaagtttgaagaaaaggtctgaatctaaacagaccatagatggaaagagtatacgatagcggcaaccagaagcaatttacatttagagataaatggagaattatatgacatcctatgtttggaatcaaatgaactgtaggctaaaaatctcactggtagacgtaggcctggtttagttcccaattttttcttcaaacttctaattttttccatcacatcaaaacttttctacacacaaactttcaactttttcatcatatcgttttaattttaatcaaacttttaattttagcgtgaactaaacacacctgtatccaacaaatctagagccctaaccaaatactattaccccatcacaatcacaatgaaggcacacattgagctataaattaaaggattcctaaattaaatgcaccggctagagctagcaagaaaacggccgcagcttcaggagggggaccaaccaccatctaccagctgatcgaccatcatcttctgcttggctggttcgagccacaccacaccgccgcagcagacgaagtcgctttcactctcgcctccgccggtggtgccggccggccggcggtgcgccacgccgcggcatttatttcgttctgtccgggccgggctgttgagaagaaatggggatttgggcggcaagctagccggcaatgccatggaacaatagatgtggttttggctgtgtttagttccacgtaaaaattgaaagcttaaaagagattaaaacgttgcgacagaaaagttggaagtttaaagaaaatgttagaatgtaaacagggccttttttttattttttttataagaaatatgtagatgcccacgatgcgggcccatttatctctatgaacacacacgtacatcttatcactacgagcaacctcgaaagactggaccgacatatttttgtttttatttttttatttttacttttcggtggttgctaaactgttgtaagtaagatgattggataaagagggggtcagcgaattatgttagccgtcatccctccgtttcgcaataaaataaaaggcgttataactttttctctatgttaaactatcatgtttataaaaaaaccaatatctatatcatcaaattagttaaataaaaattaaatatatattttggcattatatattttttaaagtattataatttttctataaacttagttaaaattaatgaagtttaatatagaaaaatatcaaaacgttttactccataatataaaactagatgaggaggagtctgtccgctccatgtcacattagtgcgttagtgggtaaccacagcctcttcgagaaaaccagaaacgaaacaaacaacccgccgaaccaatattaaccaagaacaaaaataaattgagatgtttagttgacaccaaaattaaaagtttggttgaaattgaaacgatgtgacggaaaagttaaaaatttatttatgtaggaaagttttaatgtgatgaaaaagttaaaagtttgaagaattattttggaactaaacacgggcgtgaatcacatccaccaacaaaaaaatcagaagaaaaattgtaaataagcatactttactaggaaaaaaaaactaaagcataataaagcatagagtggaataagattatgttgtaacacaccgacagctagcaatcttctctgcaacggggataaacaacctttttctttccttgatgtgtacacctaaatttacaaagttcacccccttgctaagagttataaatcttatcgataacttactcataactaaatgtccctatgataacatctcccacaaaaatctacaagactaaaatacaaacacagaaagaattaagaaaaaaggagcagcctagcaatgtcagtgggcatatggacaagcacagcagccatcaatgaaaacaggcagcggaactttcatcacagttgagcgtaacatccctgaatgtctcactctttctagcacttcatacaggctaactgttttgctgaattaacagatttagctggcagatcttgaccgatttgttatctccataaaggccaatttggcggcagaatagtcgccactcgcccaccgtcaaattcttgacttatttggaacagtgtgaagaaaagaaaagaatcattcaaggttggtttggtttgtggcctaaataggccttaccaatcattcaaggttggtttggtttgtggcctaaataggccttaccaatcattcaaggttggtttggtttgtggcctaaataggccttaccaaattttgtcagtgccaaattttggcaagttttggtatgactaattttggtaaggtaaagttgtgtttggattgaagccaaaatagcctaagttcactattgaaatggccaattttcttaggcatgccaaaatttggcttcaaaccaaatagacactatacactattaaaattgccaaatattggtaagcctaatttaggcctcaaaccaaaccagccctcaatccatctgtagaaactataccttttgagataaaatccattgtacttccaaaatctgatttcaagccaaacagattctatagtaccacatgcactgtatgtatttagatagcgagaaccttgacgaaatttattggaccgactgcggcagtaataattaaacaattccaaaattgcactgtcaagcgttaaacattccatgttgctttccaacgatttccaggctttgatggatacaatgaaatcttggtttaatagtgattttcacggctcaaccaacaactaaccaactgctgccgaatctaattcaagctggtcaattggctacttctccggtggtgaggtcagctgccttaagttgaactttgcgagctctttgtacctctcgaccaccccaatcatgcatatagtctgtccaaaaatcaaacaagtccatcagaaactgaaccgactggcttagcacagttcagcaggtgaccagatgcacaattcacacaacttaatgtgagctat

SEQ ID NO: 20990 - DNA, 762 bp, Oryza sativa
caccgtgcggagcgagcacgcggcgcacgcgcgcgggcgggggagggatgcggtgcacgcgcgtggttcgcggtggaacggatgcggcgggcccacgcgcatcctcacggcttgcggtggaacgcgcgcacgggaggggctgaccggggtcggcccgatccgatctcggccgagctggcgccgacgtggcgcctacgtggctgccacgcgagctggcgggaggaagacgaaggcgccggccgcgaatggacggcgggcggcggcagtttctccggggcgccttgcgacgatgaggggcgacggggcgtacaccgggatgacgaggaagaaggagagggagcgagccaacggctcggattcgccggagggagtccgtcggcgtcaaccggcggagggcaaagggggaaacggcgacgaggtcacgaggggccaattcccggcggtgagagcatctacgcggccacgggaatccgttgctagcgtcggattgagtggagcttcgccgagcgaggccggcgacgagcgggtgctacggagctcgggcggcgacggcggcgagcacacggcgagcgacggcaacggtcggggtggcgccggctagctacggggaagctactcgtgctaccaccgaaaactaacggggggagatggagcgaggaggaagaacggagggaggcactaccgagatgaggagggcgctgtgacgagaggccgacggtgcgggagtaatctctccggcctcgggccggggaggaggaagga

SEQ ID NO: 20991 - DNA, 778 bp, Oryza sativa
cagaataagtcgcaagcaatcaagataaatattatgaaaattgtttaaaaaatatgatataacatctgtaacccccgactcactagtcaacggcgaaccagttgatgtagtgaggcaaaggaaaaggcaaaatatcatataaagaatgaaataaatgatgacttagctttatcgtattccctcgatgacagcaaaagtagccgatgtgggaacgaaacagtccatcaatggtgacaaaaacaccagttggcgccagtggaaccaagccagtggtgtagatgatgaagcccattaacggtggcgaagtccgccaaccgtataagcgaaaacaccagtcagtggcggcagaggcaagccggcggtgaagtcgtagacgcccaacaacggcggcataataggccagccgtgtaggcggagacaccagtcggcggcgacggaggcaggccggcggtgaagtcgtagacgcccaacaacggcggcataataggccagccgtgtaggcggagataccagtcggcggcgacggaggcaggcgggcggtgaagtcgtagacgcccaacaacggcggcataataggccagccgtgtaggcgaagacaccagtcggcggcgacggagacaggccggcggtgaagtcgtagacgcccaacaacggcggcataataggccagccgtgtaggcggagacaccagttggcggcgacggaggcaggccagcggtgaagtcgtagacgcccaacaacggcggcataataggccagccgtgtaggacacgagtcg

SEQ ID NO: 20992 - DNA, 5702 bp, Oryza sativa
  unsure (1)..(5702): unsure at all n locations
ttacggatgaaaagaaaatccagcgatcagctcacagtattctagtttcttacttcgcatgtttaattaattccctacaagctaggaaagaacttttgcactttacttcacatttcctttatttttctcagcttgactttccattatcaatattgataattgatttcatttcaggtcataataaggaaaatttgtattttagcatgtcacagttcatgaattagataatatgagtgtgtgagaaaagggaagacaatgtgcatattaaatttccttttttttggtgattgtaatatactcatataatcgataatatgagtgatgttgcaatgcacagatggccaattggaaaaactaaaggtttatcattgcaaatcatattgatagaggatatagaaattgagatttttctagcaacacagaaaggaagaaattaaaaatatatatatatagcaaaattaaaactgataccatccgacaacaaggttttgcatcttggtctttacctgaattgacatctatctatctatcttctatctatctatctatctatcttctatctatctatctatcttctattatatactaaaagtccattaaacttcctacaaacgctcctagatcgccatgtggcgttcctataaacgctcctagattgccacgtggcgttttaataaatcctagaaattctaagaaaaaagcaaaacatctggccatcgatttttcatttaatctggtggacccaatattttaaaccattagatctttgttaaaaaaaacccaattcaatctataaaaaaaaattcccacgttacccaacggtgtccccatggacctgtatacgtacgcgtatcccgtgtaagtctttttcttttttcttcttcttatattcttaggttagatgaaaaactaaaaagtccatgttaaattaaagttgtaaaaatatatgctatttcaagttttattctaaatagcgcatctcatcaaaacatccattaaaaatattaataaattaaaattgtagattatattattgtatatctcttaagaacatagttaaattggacttatattttcaaaaaataaaaagaatttaaattatgagcagcgttctaaaaatttactcactccctactgtataatatacccaaatgacattattaaattatcatgaatatattttcatatattatatgttcctttattcatatatttttggaaaattaacgatcatatattttttgacaccatgtggatgtattttttatctcttaggcttcattcggtctacctcattagatgagcttatctaagacatgcgaaaaaaaagaatgtcgtcagcttaagattaattaagtattaaatattacatacttgaatatggatttatttgatctttttaaaaaactttgcatagaaagtatttgaaaacatgcatcgttccaggaaacatctcaccataaagggactagccaatccaataagattttagaactcaaccttaaatttactataaaatatatagtatataatatattttatcaattaggaatagaaccaaatatatcaatcatatatccctactaattcctatgtgtataagtttcatatacaaatcactatccaccaattatcaagtcatattaattacttatgaggcatccgtgcttaatgcacctaataattagatgacatctaatatgcagtgtgttatcaagtactgataatggacaatactaagtgagaaaccatcaacaaatgatatgtaagtattgataccaccaagccacaacaaataatagttgactacaaatatattggtattgggtaatagtgttcccacacacctacatacattcctaggatgccacgtgacgctctaataaattagggtaaatctaacaaaagttataagaaaaagtaaaacatctagccattgatttacacttaaactggtggataaattatttttaaccattagattagatatgttcaagtaatccattacgactatgactaaaagcattcctgcacttccaagatgccgcatgacgctctaataaattagtgatcatataagaaaaaatatattaagaaaagcaaaatataactgtttatttacacataaaccagtggatatattattttcaatcattatattatatctattcaagtaatccctcactatgtacgtacacaacagatgttataaaggaaaaaaagaaagtgtgtatacgatcagccccatcaagtagttttctctttctttctttgcagctctgagattttccacaaattgtgtatatgagtagcgaccactcctggcaaggctgttgaagaagccacgctgcacagcaccgctacacgccatctcgccaattttcttgaaagcattttttttactattaatgttaaaggcaatctcgagcgcatatataaacatgcggacacccatcataaaaataggcatacgcacacctacactgagagaaaaaatatttgtcaaaaaaagaggaaaaaaatatgtacttaatatttgccaggaaaaacatagatatatagcatcgaaaatgtcgcatgtaaccacattatatctttttaattatatcattcccatctatataatgatatgctaattattaacattatagattattccatcgtatattacccatgaacatgcataggtgaaaaaacaaaacaaaaaatatattaactcatatgttagcgaatgatggtgatagacgagtttagatataaccggaacaattcgcatccgcactttcattatagtttaagggtgtaattcagactattaccttttaaaatagtcacttccacataataaggattcataatacaaatttaaccaatactaatttagtaaagtgcccgcgcatgtgcgcgggccaccttcctagtttatgaattaaataaacataaaaaaattctaattataaatttaaggtcctgaagatttgcatgctctgaaaccttttcaaattataccatcatataattttgaggaacttttaagccatgcacctaaatatctcttttgtagatcaggcttacaatgaatcctaatccttcgtattagtacatatatttacattgtttctcatccagatgcatacttcttaatagtaaagtttgcgttagtaaatttgatgggaataatcaacaaatccagaaatttatagctggtgagtaagtcattgaatcaagtccttttttttttttggtttactgattgaaggctagcataactgaaacgcacacaaaacatcgatgtttgacggaaatatcaatctttgtggaactccgcttcagaagaattgatcaggcaataaaaacaatattgagcatacagtgaacagagaattggaaactattcatagacttaattatcctctacttcggacttttgtaagagtttgtggttggcctctgagtggtgtcctgcactctgccgttaaatcaaaagaatcctagagagtttttgtagtgtttattgttcatacctagggcaggttagctaatgggtaacttccatttggttctgcaaaccaactaatgccgttgctgcagccaaaatacaactgtctgttacataatgacagcaaagaagtaacgttgtatatatatacagtagtttatttttcatattccagtttagcatctttttcttgacaaccgaaactttattatattgccattggcagggaatgagcaatacagtttgactcggtacagtctagcccagtagacacattgctacacaagagagacagaaggagtatgttgtcaatatagtaaactggaggtgcagtagaaaaaaaacatatgaaatgagaagctccaatgtgttcttaatttttgtaggtnttcaattcgttaagntntnntggttnttaggtttcccccggttatcccggggggaaaaaaggggccccttaaattnttgaaaanantattnttcttaaaaatgggggggtttttttccccccccctttaggccaagagcttatcaaatggatctatcgacgtttgatgtcgcgattccggtatttgcatggtatggggatcgttggtactagggtatacgcgagactgaggtaaaagagacagagacaaggatttttatacaggttcgggcccctgaattgtcagataataaccctacatcctattggccgaagccggtattgctcttattcaccataatcacaccagtataatacttggggtagcctatctaactgttgtcgtcatggcggtctgaaggtctgactcgtagtcgacgacagggtagtcttcctccttgaatccatgcccggcgagatcagagataacgctttcgtctctcctgacagtatccggagacaccgtaggggactagccgtgcttatccctgaagtcgatatccggcgtcttgtcttggcgtatgttggcttgtattggctttgtggcgtctatgttgattgtggtgggtgtcgattgtccgtatcccctctcctcctagggggccttgtatttatacccataggtgtccccttgtccaagtagaactagggaaaccaatatggatacaatccgagtagtccttgtcgtttccatgtagaactctggttatccttccttatgcggaacttctcctatatccgtaggttgtttccgtataggacatggtatgtggtgggtcctgccgagatttaatcaactactattaggtatgtggtatccataaccctgacaggatccttgagctagctacaggcattgtcaattgagaaattgttacaaacaagagaagattgtctgttagtagtcccatcatgtttatactcataacagattgttttagccttccaaccagttttgcatatatcatattgttaaagtagatttaaagtttattactatttttttataatcctccaaactttgcaaattgaaacaatttatatcacgagaaaaaaaatatcagtcatacaagagcctcagtagcacctgaggtcctaggttcgactccccatgggagcgaattttccaggatttttcggcgttgtgctttcagtggtaggcgacgtatccgtcgacagcgaggcgcctatggtgacttcgtcaatctctccaggatttgctggctcagtcttcgaagatgtttataggggtagggtttgcgtgcgtgtgttcataggggtgagtgcgcgtgcgttctgagtgtatgtgttgtacagtgtaatttaaaaaagaaaaaagtgtcagtcatacggatagctactggtcgcgcgaatgcggaattttttttatttttaattttttttattaaaagttttacaaaagtaatttttcattttaaattgacagaagtggtcgcctaccgccctctgggagggctatttttaaaaatcgccatcccagagggcggcgaaagtcacgtggcagaggcccgttcgctctcgggcgacgcccgtcaacgaaatttgcaggcggcccccttgccgccttccgctagggcgattttgtagtgtgggggggccgcctgcaaatgggcggcggggggcctggaattttgcaggcggcccccttgccgccctgggggagggcgatttttgcctcccccctataaagcccagccctctctctctgaaatttcattatattcagtaaaaatccaaaaaaaacgaaagagagag

SEQ ID NO: 20993 - DNA, 21556 bp, Oryza sativa
tgttttcatcaggcacaatgtcaaataaggtcacattttagatagttcacggtgaaggaaatattagatttggtccagatggtgttgatctgtcagattttgtaatgacatctaagggcatcgataggcctgcggagagaacatttcagtcaatttatagttggttgttgagaggatttagaatagaccaagaagtctacacaatgtcagtatcagttgtagtgagtcgtgcaacagaaggttatttttgggaactaatgcgatggacagcactgctgcttggagacggtatgtggaaatggcttttgaacggtcatggcccctcgttatatttgtgtcggtacaagagaaagatataaatgtttcaatgcaaaccgaagatgtagagggtcctatcaatgcaggggatgttgttggaccatcgatgcaaaatgaggaaaatcaaccaagggaggagcaggccatgggcatggcggatgagggggagagagtcggtataattgttgatgaaatggagagggaagattcgataatgaggaagcggacgacgacgcatcatccgatgaggaaggtgatgtaatggccactgattgggcaaatgaggacttctctggacttgttatattagagggtgatcatgtaccctgggagtataaggagaacgaggtaattgagggtgcaaggtatgctcataaggatgagatgaaggaggcggtgaagcattgggcagtttccttgcagagagagtttagggtggtcaagtcaacaaattatgtgtatgaagtgaggtgcatgaaggaagattgtccgtggcgtgtccatgcatataagggtaaatggaatgattattggaaagttagcattgtgaccgagcacaagtgctacttacaaggggtggagaagtatcaccgaaacatcacttcagcttttgtggcaagtgagatgtacagcagtgttgttggtaacattggctttgaaccaaaatcaattattaggcacatcgagagcaaattcaagtacaccataagctatgcaaaggcctggagagccaaacaaaagattattgagatgaggtatggcacatttgaagcttcttatgataatttgcctcgtttgttagccaccattgcccagaggaataataatacttactatgacctacatacatttacatcggttgatgatcgaacaaagagtgtgctgcaaagagcctttttctcattgggtgcttgcatcaatgcttttgtgcattgtcgacctgttctatgcatagatggaacttttatgacaggtaaataccgaggtcagatattgacagcaattgggtgtgatgggaacaaccaggttctacctatggcttttgcatttgtagagagtgagaacactgaaagctggtactggttcctagagagagtgcacattacagtggtgcgtatgaggcccaacgtttgccttatacatgatcgtcatgcgggtatgttgcgggctattgactacttgcagaacggttgggatgagaagggacttccagctaagtggcctgatgttcggagtcggtggtgcatgcgtcacatgggtgcaaatttctacaagcaattcaagaacaagcatcttatggagctctttaagaggctctgtgcacagaaccaagagaagaaatttaatgagttgtgggacaagttggatgagttgacaacgaagcaaacagatgagcaatctcgcagaccacaagttgaaggtgacgagcctcccatacctcttggtgcattacatgatgacccaccaacaatgagaaggaggtcagggtcgtccatcagaaatttcactcagtggattgagaatgagcctaaggagaagtggtctctattgttcgataccgatggatctcggtatggcataatgacaaccaatttggcagaggtgtacaactgggtaatgcgaggagttcgggtacttccattggttgctattgttgaattcatcattcacggcacgcaagcctactttagggatcgatacaagaaaattggtccgtccatggccgataacaacatagtgtttggcaacgtagtgacaaagtacatgaagataaaatcaaaaaggcacggagacatagagttgttgctcaaggcacacaagtgcatcggtatgaaataatgtgtgttgataggagcaggcgtggtatctatcacaagcaagtcgtgcaggaatgtgtcttgaaggcggatggtggatgtacctgcagttgtatgaagccgaagcttcatcaccttccttgctcacacgttcttgctgctgccggtgattgtggcatatctcccaatgtgtacgtctcaaattatttcaggaaagaagcaatctttcatacatggagtgaggagatatatgggttcgggatctcaggatcttacacaacgctgagtgcccaagttttttatattccagatccatctaagttaagggtgaaaaagggtcgacgccaaactagacgcatcagaaatgatatggatgagtcagaagcaggtgggaggactttacgctgcagcaagtgtggtctgcgcggccatacttacaagaaatgcccgaagaatgcagaagttccaagcggcgcagatgctagtccatctggacaggcaagtgatggtaggcgaccacctggtgaaggaacaacaagcaggcgcgcaaggccaaggcgttgtcgcgcagcaggcgattccatggtgtaacaatgctatcgatttaggaaataaaatgctgttgtgatgtgatgagtgttcggactaaatacttctatcgtgtaatttcaattgaatgttgttgtaatgagtacctccgactattgttgtactagtagtattgcgaactattcggtgttgtatcataatgtatcgtgatgagtgttcggactaagtactcatatcgtgtaactgcagttattgttgtaatcagaaatattccgtatggtgacacttttgtttgtttgtactcttgtttaatatgtgttaataattcgcttatgaacatttattacttatgttgaactaattatttatatgtttctgatcaatctatttgatgcaggtatggcgtacgacacaccggcgctgttcaaccgtgggattgacaggaaccaccgctcgttcctgtcagcagtcgagggtgcacagctcggcaccttccgtccacgcacgtcgcgcgagtggttgcgtgtcgacccccgtcacgttccttggtacgcgtatgttcacatttcaactcaactttgctttgtgttgtacttatgtttgaagtttgctctatacaggttacgtgcggcaggccttctaccactttgtaggcttgttgaggcggcggcggacgaccgtgacccagcgaagtggtggaatgcagaccggtcactccttgccgctctggtagaccgctggagacctgagacgcacacgttccaccttccctgtggggagatggctccgacactacaggacgtgtcgtacctgctcgggctaccgctggcgggagcaccagttggtcccgtggacggtgtttttgggtggaaggtggatatcactgcgcgcttcgagcaggtgatgcgccttccacacctaggaccggccaacacccttcctccgtactctacagtcgggcctagcaaggcttggttgctccagttcactgtaagtaaataagttgttattatcatacatgcttatttgcgatcaacagagtgttttgtactaacatttcattcttaattgtaggcggaccttctgcaccctgacgctgatgattactcggtccgacgctcccttgaggcgtacctgttgtggttgttcgggtgggtgatgttcactagcacccacgggcacgctgtggacttcgggctggtccactacgcacggtccatcgcggatgctcagccacaggacgtgccgcagtggagctggggttctgccgtgctagcagccacgtaccgtgccctctgtgaggcgtgcacgaagactgacgcgggagcgatcatcgctggctgccctatgttgcttcagctttgggcagccgagaggtttgccataggtcgaccagtggtggacagcgcaccctacggggttggtcgcagcgcgcagtggccagaggacggtcccacgatggggacttactggtgtcgacgtggggttagtgcaacttcgctgcgttacaagtttatcagtcgtcttctttttttcttcacataacatgtctaattccgatcatgtttattgcagcgtcgttacgctcacgtccaggtgagacgaggttacccggacttcgtgttcgagtttgaccgtctccagccgagcgacgtcatctgggagccgtacacagaagaggccgtcgctgcgagagcaccgctaggactttcgtccttgtgcacacgcgaccaggcttactggctcaccatcctgccgatggtgttcgacattttcgttgagcctcactgcccgcagcgtgtgatgagacagttcggacttaggcaggtgtttccgggcaacgtgcagccgaccgtcctccctgccgaccactcgtgagttcggattgttcatttctaaatttttatgataattacttcatcgagccatataatttacctctcttcacaggttgactcgacggggacagctagcaggcgcactttgggctccacgtgtacagcagtacgttgacgactgggtgttagctacagaggaggtgatcaacgagctcttcccacacacggaggagaactaccgtgactaccttcgctggtaccttcctcgcactcgtgcgcgtgtgaccttcactccagacgccccagagccgcacgttgccgctgtcacggacgcgtatcccacgcaccgtgaccgagactacttcgtgggggtacgtcgaatttgtatagttcttacaattatttcatttatcttgcataatataggacaattactgaattttttatttccatcttgcataggctgatgccgcacgggatatcagtgccgatatcaccgcagtccaagtgaggttgaacagaggtttgcacttgactgacgttgagcagagggtgaccttcgaccggatgcaggagaagatgcatgcggtcatgcgcgtcttctcctgtcacagcgccgtggacgtcgtacctccagctggtccggtacaaccacggcctcgcgcgcctaccgtcggagcaggacctcgacctacggcacctgttttgcacggtactgctcagcccaaaggtttcttaagttttgtttctgtttttgtacgaaaacatcaccccgtcgtaacttgatgttccatcctcgcaggacctcgtttgccttcgagcgcccctagcttcggagcagtgcgacctacagcaccggtttcgcacggtacagttcagcccagagattagttcatttttgtttcagcttttgcacgaatatgtcaccatgttttaactgcacgtttcctcatcgcaggacctcgtctgccttcgagcgcgttcgcaggcacgaccggcgcttccgcgagctccgcagtggcgttcgccacctcttcgggcgcgttcgccagctcttcctctcacggagcgtcgatccctcgcccacacggtactttactttttattaatactattaaatacctgtatgaaactgatggtccttgtccagcaggatttgcagccgggatcttcggtactggggcctcttcgtctcacgccggtaggactggtcctactagccagttctacgacgacgacttgcacggtgcacaccaccacgacgtactaggctcctctcagcttggaggagctccagaggcgcacactcaggagcagccagaggtcacacctgtacaggcaggacgggttggccgtgccgtacccccggaccgactcacgtactcccaggggcacattagggcgcagggtaggagggacaggggtaagaggcctcgtcagtagtgttctacctctcagtccttatgtgaccgtttcttttggcttacaaacttgtaaagcagtactacttttgctattactactgcagtactacttgtgtttgtctcgtctacatagttcttttcattcatatggtgctagaacaacttatgctcacgacaacacactttcggcgcttcacggtagtgtcagatccagtagcgcgcacagtccacaacagcacacatgaaaagcggcagctcgagttgtcactatcaactttcggcgctgcctgttgacataaagtgaatcacgcccacgcgtgatcgtcttgtcacatctaatgaataatgtatctcattgagttcacatatattgcagtgaaaacgacgctatataattgacaatctgaaggcaacctcttcatatcttctttcccactagcacacaacacacgaaaatggaagcgccattccttgagcgtctcaactggcgaagcgatccttttgctggttggtttccaccatggtgtgaccgtcctttgtgcgattgtggggatggatgcatactcaagtcttccctcatgatacaaactcggggaaggagattcttccaatgcgcgaactttgatcaggtatgcttcatctattcgaagttcaaatggataaaaaaactaacttcttcgtacacaattgtaacatcttacgcagacatatcgtccaatgtgcaacttcatcgagtgggtagacatggagaacccacaaaacgacggaacacgtgcttacccacgtagtgaaacaagatcggactaactaaggcggaaggatgagcatgaacgtcgaattgctgctgaggctttagaatggcacgtaaatcccctaggactccccacgtggcgtgagcgtccggagtgtcgttgtggtgaccgttgtcaggtcataaggtccgtaaggcaccgaactcgaggacaaaggtgtttcgtgtgtccaaacattgtcgacgatgatttcgtggtaattacaactattcttttcatcactccttagtactatcattaacttaactatcccaaaatggatgtacataggaggatgtaaggaaatgtcaattcgtacaatggattgacacagtcagagttacttcaagtggcgggccgataacgcaacctgaaccgaccatacagttcattcatgcttggatggagtacgaacgtcgggtggaaattgcaagcttagactggaggaacaatccattagggttacctaaatggtccgagcgtccaaagtgtgggtgcagagatcgctggcaggtggctacatcctttgctgaacaaacatttggaaggagatattttgtctgccccaatgtagacaacgatttcgttgtatgtctaaccatttacaaaatccgctatgatttgcacaaaattactacccaaacttaataacattactatttttacagggcaatccaaggatgtgtggatttactcgatggatcgacaatgtcactccatcatatcatggacagaagataacagagtcagaaacacaagtagagtatcaacgattgaaggaccacgagaatgcaatgcattctgaccgacctagaaggggccgataggttaccgcatgcttgattcgtcgggatcgacaaatttgtaccgtgtatcgatggcacttcttatctatcttatcattacaatgtttaattatggtggtgattttttgtatgcgtaagactaagggcctatttggattgctaccaaaaacatgccctaccaatattttggtaatttgaatagtacttgtgtttgatttcgattgaagcctattcattggtaatacgtaatctagatttgagattatgtagaacattcttcactacaattttacattttggcagcaaaccaaatatgatcaaatgcaattttaccttaccaaatatttggtagtgccaaaacttgcttatattttggcactaacaaaaatttgtacggtaacattccaaataggccctaaaaaataataaaattatattttaccagtcttggagattttaatcttgtatagttttcaatataaaaagatttgataactattgatatttataaaaaaatataaagcacagtataaaatcgccctcccccagggcggcaagggggccgcctgcaaaattccaggccccccgccgcccatttgcaggcggccccccgcacagtacaaaatcgccctagcggagggcggcaagggggtcgcctgcaaatttcgttgacggccgtcgcctgagagcgaacggccatctgccacgtcactttcgccgccctctgggatggcgatttttaaaaatcaccctcccagagggcggtaggcgaccacttctgtcaattttcaaaaatgaaaaattatttttgtaaaacttttaataaaaaaaattaaaaataaaaaaaattccgcgaatgcgcgacttccgtggctggttctaattggtggagatccagattctggtaggccatactaatgggccgcacgatccaggcagtgacgttctgccctcactacaatgggccaacggaagctgtccctgtacggcccgtcgctactgttgtttgcagcgtatacatggccacgcccacgcgcgtcccggcggccacggcacggcacggcacacacgcacccgtcgactacagtaaaaacaacaacgatacgtatacgatacactcgcacactcagatacagacccccccggttcttactagtccaccaatccaccatgcgtcccactaccaccgccgctctcctgatcctcagcgtcctcgccgtcgccgccttggccacgaccaaccatgaagtggaggcggcggtggccgcgctgccacgcggcgccacacgccgtccggcgcccgcccacggcaacgtggcgacggcggccggctgctcgccgcgggagcgggacgcgctgctgacgttcaaggcaggcatcaccgaagatataatgggtctcctcgactcatggaagtacgacggcgctgggcctgggcaggcggaggaggaggccgattgctgccggtggcgaggcgtccggtgcggcgccggcggccatgtcgtcgggcttcacctccgcaacgtgtatgccgaccagagcaacgactacgacttcatcacctccgggtacgacctggccggcgagataagtccctctctgctcaacttgacgtatctggagcacatcgatctcagcaagaaccagctccagggacagaccggccgtgttccggagttcttgggctctctgcaaaacttgagatatcttaacctctccggcataccattttccggtgaggtgcctccccagctgggtaacctcacaaatctacactatcttggcctgtcagatacaggcatcaacttcacggatatccaatggttagcgcgcctgcattctctaacgcacctcgacatgagccatacgagcctcagcatggtacatgattgggccgatgtgatgaacaacattccttctctcaaggtccttcatcttgcttactgcaaccttgtttatgcggatcaatctttttcacactttaacctgaccaatcttgaggagcttgatctctctgtcaactatttcaaccatccaattgcatcctgttggttctggaatgcacaaggactcaagtaccttaaccttgggtcgaccaaactctatggccagtttccaaacgttccaggacaatttggatccctacgatttcttgacttgtcatccacatgtaacatagacatcgtgacaacaaacctaacaaatctatgcaacttgagaatcatacatctcgaacggagtcaaattcatggggacattgcaaagttgctacagagattaccgcggtgctcgtacaacagattgaatgaactatatttgtcagacaataatatatcaggaattctaccaaatcgtctggatcacttaactagcttggtcattcttgacatctctcataacaaactctctggacccttgcctcctcagataggcatgttcagtaatttaacttacttggaccttagcagtaacaacctcaacggagtgatcatagatgaacactttactagtatgagaagtttgaagacattggacttatccggtaattccttgaagattttggtggattcagaatggttacctctatttagtcttgaggttgcattgttttcaccttgccatatgggccctcgctttcccggttggctgaaacaacaggttaatattacttatcttaatatgtcatttgcgggtattactgataggcttccaaactggttttctacaacatttttgaatgctcaacttttagatgtttccaacaacgaaatcaatggtagcttgccagcgaacatggaggttatgactacattatctagactatatatgggatcaaacaagcttaccggtcaaatacctttgttgccaaaagcacttgaaataatggacatctcaaggaactctttatcaggacctctgccatcgaactttggagatgaccttgtcttatcttatctgcatctcttctccaatcgtatcactggccatattccaaactctatgtgtgatttgcatcaccttgtttacttagatttagcggacaatcttttggagggggaatttcctcgatgtttccagccagtgtttttgagtaagctatttgtcagcaacaatattttgtccggaaagttcccgccatttttgcgtagtagacataatctagagatgctggatttggcatcaaatgacttctatggaggattgcccatctggattggagagctgtcgaatctagcaatagtacgactaagcaataacaatttctctggaaatattccaacaagcattaccaaccttacaaggcttgttcaactagatctatcaaataattctatttcgggtgttttacctttgcatttgtccaatttaatatgtatgaagaaaagtggtcattgtgatatcgtaatggtcttcgatcgttactcaatttctggtcgttatggtcgcaatgttggcattgcaaatatgtctgtggacaccaagggccaaaaactttactacaaactacccatagtattagatatcgtgaccattgatttgtctttgaactacttaactggtgaaattccggaggagctaactcttctcgatggcattaaaaatttgaatttatcatggaatcagcttagtggaagaattccaggcaacattagtgtcatgcaatcattggaatcactagatctctcaaaaaacaatctttctggagaaatcccatcaaacctatcaaacataacatctctaagcaggctagacttgtcatacaaccatctcacaggaagaataccatcagggggtcaactcgacaccctctatgcggaaaacccgtctatgtacaatggaaacactggtctttgtgggtatcctcttcggagaaattgctcagacaacagcagtgcatcaaagcatggtgttgaacagagaagggaaagagattctgagccaatgttcttgtactctggacttggttcaggatttgtggctggtctttgggtggttttctgtaccatcttgttcaagaaaacatggaggattgcttacttccgcctcttcgacaaggtgtatgacaaagtgtatgtgtttgttgttgttacatgggcaaccttgtctcagaagtcaggcacacgttaggctattgcgtagtagcagcgttcttttggtggaatatattgtaccacgtcgctgctgctactactactagtactactgtcgctttgaataaatcgatacagcttagttcttgataaagatgagcatgcttaatgtatgaaaaaaaaagagagaagttaatgttgttctatttatgtgaaataaattaaagatggctgtttctcaatgttgtgcagagattaatgttgcttaatttatgtaaaacagagatatgtctgacgaatgttattgatcagtttgtagcactgccgcactggtgaatccagagtttttttttttaatgactcgcaccagacagtgcgaagtttttttgattgagcaggaaaaaaaatccaagattataaccctgggaagtcgtaaccaggaaaaaaaatgaaaaataacccccacccacgcaccgatagctccaactcaacatacctaggagaaagctagcaccgaaccgaccgccgctatgcgtgaccggtcaccgctaagccaacaaagaaactacatccgagaacgttcaaaacttaaccctaataaccgacaccaggccccactctagccacctctttgggattatgagagagaaggatggaaccgttctcccccctaggccctccgacgtggctaccttgcataagctagagcgccgacgaaggggacatgcatctagagcaagcttgcaccagttgtctggaaggattcggcaaggggctacctagacggtgtctccaaggagaggagcgacggatacacagccaccgtcgtccgtcaaggtctcaaataaagtcgaggctgagttttcacccggcagccccactggaggtgaaggggtggcacgacattgccctcaagaggggtagagacattcgaaaacaccgtcgttgccggcacggccaaggccgggctaggttttcgcccgctgcctacgagtctatagatgacaccccgatgctccaccaccatcaagcctccgccgacgcatgggcactgctgcatcagcgccccctgttggtcagcctccgcatgccacactagcctccgccgccctccgaccgcgcctcatcgcgccgcgccggcctccgttcctattggtcgtgcctcaacgagctgtgccggcctctgaccacgctccgtcgccgccacccacacctcataccgaccggctagccacgtctccaaccgcagtccaacaacgactgctcacgccgtcgttgttgcccacaacccaccaccaccgatgccacgcccgcacgcggccgccgctatcctccttccccgttgccagtctcgttccccgcctcctctctagttgtcaccatcgtcgacgcgccggtccaccgcgtcccatctcctcccgtgcaccggccacatcccatctcctcccgtacgtcggtgcagctccagccgacctcgctcccaccgctgccagcagccgctgtcgccatcaccacccactcaaaccccatcgccatcgccagccgccaaccccgctagatccagccaaagcggcagcccgatctgggtgtgtgctccgccgccaccaacgggcgccgtcgccaccgcaaccgaccgccagttgccacctccatcactcagccccgccgccagccgccaccccgtcagatccggccggaacgacgcagatctagatggttgccaccgccgctgcccaggcagctcccccggccgtccgggtgcatgctgggcaaagccccgccaccgccgtccttgcggccgcgcggctttgccggcgcctgctcaggcggcggcgagccagggaaaggagggggaggagggagtcggcagcggtgttgcctctcgtgttcgtgttgtgaatccagaatattgaatgcttctccaaacatgcatgtttgcgcttgaaatataatgtaaagtgacatagtataagatatgaacaggaccaatccatgacagtttgaatcgaagaaacgtgcagacttttaattttgtccaataacagggcaggctctcgaaaagcttgtaaattctgatattgttgatcaagataattttgttttcgaagaaccttcgcaaaggacatggagttcatgccaatttataagataaacaataataagatgtagtgttaaagtcatattttacaagttactagaaaaaatgccctatgctattttaattttatttatactgtttagctagaaaaaaaatgtttgcgtgttgcaacatgtaaatattttaattttattattgttatacggtttagctaaggtaaaagttactgtgggaattcgcttggatatttttttttagtaaatcatgagcttttcatctcatgttaacatgcgaatttttttcttcaaaagatttcttatacagctccttttatacttttaaaaggaaagaagcttaaaatccaactcaaacacggagctgtatttgcaaaagcgaacgaacttaaaaaccgactcaaatacggatgacgtaccaaaatatcggcaaaaacatctttaatttttataacagtagagataagttgttatacttaggataaaatttaaattttagaagtggaacagaggggtagctccgaattttttttatctgaacacatgcaaaccactaattacaaatctgagcacgcaaaagttagaattctacttctaatcaacctgcccatgtcaccaccgtaaatccggttggcccggtagtctattacacctccctcatttcttattcggttagctttggctcagtgccatgacggtagccttaacacgatgatggtgtgcgtatatataaaccatctaggataacctttggcaataacagtgttagcgtggatatagtgtaactaaaattcatcaattctgagcacatgggattgagcaaactagcatgcagcaaacaattgatcgactaatatgaatcgctagtattgagaatttagtagtacaataccgcattgtttgtattttctttgtgatttgaacaatgaataaaactcgccgtatgcaaccctaaaccctatgattttgatatactaccggatgaatgatttgaacaatggagaaaactccccataatgatgcaactaaccaattttagaggtgggttgttgggctaacgtgatcaattcagcagcccaatacggcccaatagtttgttgggctactcgttcgatggaaacatatcgctgcatatgagcatcttgtctaaataattaaatgtgattattgcgtgctcacatttgtaattggtggtttgcatgtgtttagataaaaaaaattcggggagtagctagtaagtgaaaaactcctaagagggcaccttcagtaaagggcattgctggattcaacacgaagctagtactagcgctgacgatcagtacaactgataaagaggttctaatttccaaactgataaagaggtttcaatttccaaaggtttcactctcagtgtcaccgcaacgcgtggaaatatttgcaagcctgaacgcactgaagataagaataactaatgtgaggttccaatttacaaaggattcactctcagtgtcactgccacctccaatacaaggaaatgatgatctctctcccaagtctcgagagtcttgaagtagatctgaacgcggagctagaggaaagcaggcgtgcataatagagaaaccaactgaagcagctactagtggccatcggtgatcaaccagtagctagcaggagttgccggcgacgtgccgctcggtgcaagtcttcggcatcacattcggcacaactgcccaagagctcgacgttggcaatatcagttcttttctggcagtcgcagcccaccacgaaagtcagcccggtcgtgtacgtactatccgcaatcaaaatcagtatcggcccaaatctacatgggcctcacgtgctcggctatcctgatccggctgaattaaaccgaggagattgttttgtaggaaaaagtatactttgactaactcatgtgattctgttgatgcgaaaaacacgaggcctgggagatctgcttaactttagtgaaggtccaaaaatcttgtctttgaggtttgtgagcgtgccggttgatttgatcctgcaatcaacaagaaacaaatacaggaaaatatcacttaaatccataaacgatagccgatcggtcagtcgccaatgacatatcatttatccttgagccgatgtcatctttgcatcgatcggcagtcatgaataaataagaaagaactaaatctattcaatcggctgtagatattaatggtacataatccctatgttgatatatatttaagtcaagtgattgggatagatcgatcgttatgccgagacagtataaatcacttagatcgaaatatatattaacaatgagattataagcgctcatagcatagccgattagatagatctagcatgtatcggctaatactccgataccactctatgttaagatattaaagcaagcaaaatatatcaaacgagaagcttaatatacctgaaagcaagaagatctcaatataaagggcggatctagcatatcaattaagcacataaaatataaggctaaatcaggtaagatcggttgaaaccccgatactaccctaatcggcaaccaaagacaggctagagattgatattctaatcacgacttatagggtcaaactcaactgatgcagctataagtatgaaaagaaagacaatatttagacaatcaagtcgttggatgtttcatagggtggtggataccctatataatctaagtcaacgttggtatttaacctgatcggctgccttctagtgatagatgttagccaactgaaggttaaataacaatattgtcagagattatataggatatatgataactcgacaacttacatacacaaggttagagtgtcataaagatggaagcactaatcccgagaacgcaagccaccataacaagttttacctctagttgaagatcgaaaccgatgcagctcaaactgaaagcaagaacccgtcgaaataaaacgaaagcaaaaagggtggcgatgtgtcgagattgtattgaacgtgtgttaatttgattacatagggctcggggtctatttatacccgagaattacacaacatgtccatgtcggacacgactcttatctctaacaaactctaagataccataagtctttgcggcagacttttgcccaagcttatctctaaggaaattacatcaaatatcctaattaatagatacaattgtcttctcagaactcaatccgtgcatggcaatccatatgaagtacttcaacccaaccctgatgacgtataccaagtcgtattgtcgaaatcggctcaatcggctaaccttgtccgactcgaactctgtcgattctggtcgcagccgattcgaacttctgccgattcttgctctgtttccggaacgatctatctcttggattctgcttcagttttatcttcatctccgataccgaaattaccaaatttggtcgttaacacatgccccccaagtctggaatatttggtaatgtttcggatttgccatattttcatctccaagaatatcgctcattgctgtttttccgaccgttaccgcagcgctttaaatactaaccgtcacccccgagaaatttcacaccgttacttccgttctcaccgcttaaacaaactccgtcttctctttctccggcgatctccttggcgcaaaaaggcgacctcaaggcgatcccaactccggccaagcttccgcctgcagcaatgtcgacttccgccagcccatccgccgcgccatcggcaaagtatgcagaggtgagcacccatcggctagatctctattttgtgcagtagatcggttttcctctatctcatcttattttcttcttctttattctcttttgcatctgtagcatctctctaatctgattgcaattcccagtttgtctcacgagcatcagtactttcttggcccaatcggcaattctaaccccactgagttcattagcgccgaaactaataggataccctttagattggccagcccaaatctaggtcattggaagaatactttcaagtcttggccttcccttgagaaaagttctcctgagagaagttggctcgtatggtgcaagcgtgtatcggctagcaagcaggttcactgggatgaactaggaatcggccaagcccttgctcttactttagcaaattcggctaaggacgaacccctaatggcttctgcaacgtatttctggtccaacaccctcaatgccttcctgttcaatcaagggccgatgactcctaccctgctagacatcaccatgatcactggcctagatatcaccgcatcggccaaccccatgaatttgaattccaagaaccagtttgagttcaaaactaaaaccataggtggctggtctggctacattgctgcatatatgggcaaaggatctgtcacccctcgagaacatactgcctttctgctcatgtggcttgagaaattcctcttctgcggatcaagttgtggccctactatcaattggcagttcctagccgaagcccttgaaaccaaaaagcaaatcgctttgggcaaaatccttctcgactacctatatcagacgttgatcaatgcatcggccaggatagccacaggctcaacagtagctgcaggtggaccctggtggttcctacaaacatggctcaacttagtcgccatgaaagctgtgaatcggccggctctatcagaatctcagtttccaagactagagccgattacagatgaagatggggaagaaaagacccatcggagatgcatgtcgtatggagaagctgcttcaacaccagccgattctggagctaagttataggctgagctactgaaggactggttcttcagtttttatgatggcttccggaaagatgctcgagtctggtttgtatacggagattcaatggactttgagctaccatcggactttagatttgaagagatcaactctgaaaaatatgacaagtctagagaggtcttctcggctgctatcagtccatgcattcttcctgttggcatccatcaaggaagaaacatacaagtgtcttacgagttctatcacccaatgagctcggccaggcaatttgggatgggacagctgccaatcggcttgtattttgccgataaaattcagtgtagaggagagatctcatcgaccttgatgatggatcggctgctcaacatcccaagacctcccttgggcagtattgagaacatagagctggcaaggttcaggagcagggcctttgataggtggtggggtgaatggaagctacacttgttccatcgatcggcttccatgtatatgacagatctattcctggatgtcatccctcaggtaaattttactttgtcaattctgctaaaacaactgttagctgacttgtatcttgactaatctcttcttctattttgcagacaacagaatcctctcctcctcgcaaagacataaaatatgctccaggccttttaccaaacggaggtggtctagctcccccagtcatcggctatcatgcccccaggacctcaagtctgctccaagggcaaataggagaactagccgatgctggcaggaagaggaagactaaggcatcggctgttgatccatcggttctggctctgaagaagaaggccgaaaagaagaaatccaagccaaccgacgacttgcctgccttagatccatccatcgaacaagccttcgatgaagaggaaattgaggaagatgacgaccaagcggcagccgaacttagtgacttaggagaaaaaacaccatcggcttcgcccaaacagactcctccaactcctgctgccccagctcatttttcaagggtaaacaactcatcttgatcatttctcgaaacaacttgcatagccgattacttattagccttgtatttgcagaaaaagaaaactatcgtgaagaagaaatcggcaccgacaccatctaagccagctccaccggtaaagttccctctgcaaaatcctttaaatctgatcgtaaccggtgttaattaacacttatcttttttagcctcctcctcatccttcacctcctgtgcagccgacaccaagtgattgtactccatcggccgcaggcagccataacatcgaagaagaagaacaaccagcagctcctgtcattccagtaagcatttcattgtcataaatcttagattggctatataatttgtttcgatatttaactgtcttcaattttctctcttgcaagtcttagccgatctgttctctttcgatataaaggattactttgacgaagaggcagaagaagaaacaaccaataaagctttagcccctctgaccgatgatgtgaaaagaactcttgaagacatttctcatcggctagagacatcattagacaacttggtggttgactgcggttcaatccggacaagatttgcagagattcaagccctaatcccggatgatctagcgaaaaccatttctccagctgtataccttgagcaacatcaattcaagctggaaaaggccaagcaaaggatagccgatcggcgagagcgaagagatattgaagccactattaaaaccaaccggcaaaccgttcatgaagagaaggctaagttagatcaactctcgattgggccgattcagtccaacatagatcggcttgaagctcggaagattgatctcatagctcaattggaggaatgcaacgccgaattggctcttgagcagaaaaagttagccgatctcccaaaggctgtcgaagaacagaagtccagactgagatcggccatcaggaatgtggctgatatgaccaagtctctcaaggtcatctctggaatcgacgcccaagatatccaagctatcgaagaagtagaccaaatcagacaatgggctgtatcggctatccagcgttacttgtctggatgattatctttgtaataggacttagaaaaaaaacatttttttgtaatcggctaagaaacctttgtacttcttctgattggctaatccttcgtgccgattaatataacatctcaatttgcttgaaacttctcaattttcgtatatatgtatgtgcctccctaattttacaacgatgaaggcattgataaaattataatttggactaacggcgatatattaaatatcggccatcatacatcggcagaacaaaaccgattatgagaaaacaacaaaaaccactaagggcaatataaccatatcggccgtcatacatcggcaaaacacaaccgattatgataataaaactgctaagggcgatataactatatcggccatctaaaggcgatgtaaatacatcggcttaacatgtatcggcaaactcagctgatcatgaattgacccaaacacttggataatatttcttcaagtattttccattaagtgctcgtctataaacttctccatcaagtccttgcaacatataagctcctttggacacaaccttatagatttgaaacggtccttcccaattcggctaccacttgccgaatttgttatctcgagttcctatcggcaagattaacttccaaacaagctctccctcagaaaaagacatagacaccaccttcttgttataatgccatgcaaccctttccttatctttgaaaactttagcaagagctcgcaatcttgattgaaccaaatcttccttttcgtcggccatgagattataatattcatcggctgtcaattcattatgtaaatttgtcctcctggagccgattctaacttcccatggtaaaactacttcctgcccataaacaagcttataaggaggaacttgaatcgatccatgacaagccatccgataagaccacaatg

SEQ ID NO: 20994 - DNA, 3199 bp, Oryza sativa
atattgatacacatcatacctccaatcatcggctgatattgtagcaacttctatcttgatatctctcatcatcggcttgtaccctgatgccccctgagccaaatcattagcttcgacattttgctcccgagatacatgcttcaaagttaccagccaaaatccatccatcaactctctgcacttctcattgtaaaccatcaatgtatcattcttacattcatattctcttgccaattgactgatcaccaacaaggagtcacccataatttcaatagcatcggcttcaacttccttaagcaattgcaatcccttgagaaccgcttgatattcagcctgattgttagttgcatagggcttaatagtataggcaaactcgaaacttgccccccgaggagaaattataaccaagccgatactacaaccatgagtgcacattgatccatcaaaaaataaagtccaaggcacaatgtcaactgagccgattgaatcatcacgatgatccacaataaaatcggctatagcttaccccttaattgccttcggtgactcataccgaagatcaaactccgttaaagcaaatatccacttcctgactcttcctttcaaaattggagccgacagcatgtacttaaccacatcggctttacatatcacagtgcattcattggacaatagataatgccttaacttcgtgcaagagaaatataaacacaaacacaacttctccacaggagaataccttgtttctgcatccaagagcctgcgacttaaatagaatacagccctctctttcccttcaagctcctgaatcaaaaccgagccgattgacttctcaccagccgatagatataatctgaacggtatccccttctgtggaggaatcaaaactggtggggaactaagatattctttgatattatccaaagccctctgttgctctgccccccaggtgaattcttgatcggctttcaatctcaacaaaggtgtaaaaggttctaatcttccagataaattagagataaacctcctaacaaaatttatcttgccgatcaactcctcaacttcttcttgtcctctggaggatggatcttcttaattgcattaatactcctttgagtcacctcaatccccctctcatgaacaagaaatcccaaaaactggccaaccgatacgccaaaagcacattttgttgggttcatcttcaaaccatatttcctagttctctcaaaaaccttcctgagatcgactatgtggttttctacttcctttgacttaacaaccacatcatcaatataaacttcaaccaaccagccgatcagatcgtggaatatgtaattcatggccctttgatatgtagctccagtgctcttcaagccgaaagtcatcacaacccattcaaacaaaccgattgcaccaggacatctgaaagctgtcttatgaatatcctcttctgccataaagatttgattgtaacccgcattgccattcataaaacttaatatcttataccctgaagcagcatcaaccaactgatcggccaccggcattgggtactcatccttcggagtagccttgttcagatcttgaaaatcaatgcacaccctgactttgccatttttcttgataactggaactatattagaaacccactcagcatatcggtatggacgaatgaaaccagcatcatataaacatgcaacctcagccttgacaacattaagcatatcggctttacatctccttggtggctgctagtatggcctaacccctagtttaataggaagccgatgttcaacaatcgatcggctgagtcctagcatctcataatactcctaagcaaagcaatctctgtattcttttagaagctctatcaacttggttctgaattctggggataagttcttactgatgaatgttggccttggtctatctcctagacctatgtcaatttcctccaaatcatcagccgacatgaaaccctttccttgcttgtcatcgagatcatctactgtatccttggtgtagacgtttgaaccctccacgacgccctcaaaataataatttggactctccatcttcaattggctgtatatcacaattggacacttttagaaaatctccatcccaaacttttccaataggcaatcaataccatccatctcccaaagagctaaatcggcactagcaacattaactgacctatcggctagcacaatctcaatcttgtcaccttgccatttaatcaagcattgatgcatggttgaaggaatacaacaattggcatgaatccaatctcttccgagcacacggtatcgaccctttccatccattaccaaaaatggtgggggcacaatttttttggccaatgtcaaatccacgtgaaaaactcccttaatctcccatgggttggcacccaaatccctgagaaccattttccttttgagcaatcattttcccttctgtccagctttatgaaagtagcgtttgggatgcaattcacagcagctcctccatcaaccatcatcttggacatcggcttcccattaacaaatctattgatatacaacggcttgagatgccgattttttgtcccctctggcttctcaaaaatcgctgctccggtgacaaaaccaatcaagcagaggcttcatcaacatcatcaacatcggctagcctagcttcaaactctgctgctagcataaaaaccatattcaccgatgcagacgcagtagccttgcccttgagcaacccttttggctttatcagcttcaacttcatcggctgttgtgaccgagctcttaacacgccacacctgcttggtctttgttttcctcagccgatgattgatttcttgttctacttcttgaaagcgctccatgttccttattctttgaaccattctcttttgattcttggtgaaaatgcctgtaggacaccattgtgttttcctatcttcatcttcatcatggtgataatcttgatttacatgtcccaatctctgatgaacaggtatcctcttttgaatcagccgattacctctattacaggatcggcttgaactccctgcagtgtcactgcatccaggacaattctcgatcgatggcagcctcataccttcattccagcagaatctgaaaaactcacagtcccaatgaggatcaaaaccaccatcatcttcttcataatacctttcctgcta

SEQ ID NO: 20995 - DNA, 20892 bp, Oryza sativa
ctccctgaacctctgaatgtaatgctgcacagactcatcatgcctttgcctaattgccgtcaagtccgatagcttcatttcatgaatttcactgtaaaaatagctgtgaaactgtttctccaaatcggcccaactattgacagagttatatggtagagaagaaaaccatgtaaacgccgatccggacaaagataaaggaaacaacctaactctcaaggcgtcaatagccgatgcctcgccacattgaaccaagaatcggctgacatgttcataagttgaaacattgttttgccctgaaaattttgagaagtctggtaccttgtatcagccaggcaatggaaccctttcaaaccactcagggtatggatgctgatacaggtttccatagtcctttggcttgagcccaaactgcttcctcatcacatctgcaatcatgtcggcccaaggtctctgctggggtactccttgcatctgctgtggaatcggctcgaactgattaaattgaggagcaaattggggctgaggtgatcctctttgctgatactgaacatgaggcaatggaggctggtactgatagctcaaattacctccataataattctggaaattcggctgaatattatgcactaaatgctcaggaataacttggggcaacaccgattgatcctgttgaacattatggaccaagtgttcagggataacttgattcacaacatgttgcctctaccgattgtcaggtgttcctagcccagccgatgtatgctgcaaattctgctgttgaatcggcagaaccgtctgctgtcttggtggtgtttgctgaatcggcattgactgtgctgggttggccaccagtgggtttggtagaaacatcgcagcaacctgctcctgggtcaaccgattgatattttgtccaacatgctgtggctgttctctggtcaacaatcgaggattggttgtttgccttggtgctgacgacggtgcggctggtgcaggagccgaaactggtgccgtcggttgaactggtgttatgttggtagcaggctgttggttaccagttatcaaatatctgtaatttgggaagacacctcctggaagataaactggtcctgtagcttgatgcttagctattgttccatcgaccaaaaacttcaccatgtttgttaaggtattaaccagcactcccgattggttgatcaaagcatgttgcacggtgtagtctatccaatcttggaagttgttgaactgcaattgttctctgttgctatcttcaccaagatcctcaaccaagccatcctggagcccatcacctttgtcgcccaatccatctgtagtacctttgctgcctgaatcatctgtgctgacttgagttttttgcacctcaccatctttagaaggacctgttccagggacatcagcaactagcttcaacttgtatttttgaacaactctcccttgccgagtctctgtgaatgaattcatgaattgttgttgtgcgttctgcatcattagttcaaattccttttttgctctggtgatagcttgccaacagtgactggaataatattcccagtattaacctcagcctcattggttcccgtaggctttggaatcttggtctgaggagggaccacagtctttgttgctgatgatggtgactgtggtggtttttcagccatgagagaaaattgtcgtaacttggtcccactgggcttgccaaaagcgtgttgatgcgaaaaacatgaggcctgggagatctgcttaactccagtgcaggtccaaaaatcttgcctttgaggttcatgagcgtgccaattgatttgatcctgcaatcaacaataaacaaagacaggaaaatagcagttaaattcataaacgatagccgatcggccagtcgccgatgacatatcatttatccttgagccgatgtcatctttgcatcgattggcagtcatgaataaacaagaaagaactaaatctattcaatcggctgtagatattaacggtacataatccctaagtcgatatatatttaagtcaagtgattgggatagattgatcgccatgtcgagacagtataaatcacttagatcgaaatatatattaacaatgaaattataagcgctcatagcatagccgattagatagatttagcatgtatcggctaatactccgataccactctatgtaaagatattaaagcaagtaatatatatcaaacgagaagcttaatatacctgaaagcaagaagatctcaatataaaaggcggatctagcatatcaattaagcacataaaatataaggctaaatcaggtaagatcggctgaaatcttgatactaccctatgaaaaatacacgttcgttgtaatgggtgaatattattttattattattattattattattattattattattattattattattattaattatacaatttagctaaagtgaaaatcattgtgagaatttgtttggatactatttttagaaaatcatgagttgtaattaggagtccgactcttatctcatattagcatgcgagttttttaaaatgatttcttatacgataactgttgtgtttctaaaagcgccccaagttagaatgtgagttcctttaaaataatttcttatacgactccttttatattttaaagagcgaacgagcttaaaaacggactcaaacacatatatgtattttgataagcaaaacgaaattttttagcgtgtcacgttagatatacggacacacgagtattaaacatagactaataataaaacaaattacagattcagcttggaaactgcgagacgaatttattaagcctaattaattcgtcattggtaaatgtttactgtaacaccacattatcaaatcatggagcaatcagatttaaaagattcatatcgtaatttacaagtaattagtttttttctatatttaatactgtatatatctgtctaaatattcgataagactgggtggaaattttttgtttgggaactaatccgggcctgacgcaatgctggtgctcgcagaagagctcggtgcgacgtggcaacgattaggtggagacccgaccagagcgcatgcattgagtagaggaacagatgtggatgtgtgtgttcttgctataaggtagtaaaagtaaatatgtatttaattattagggatgttatcatagaaaaatatggttaaatatatatattttggagatcacgtcgttatcttaaatgttaaggattatataaccagagggagtgtggttgtgtgttgaaactcataaagataaaaataaaattgacgcacataaaaaaatcattagtatatgattaattaaattttaattattataaacttcataaatagatatattttatattttaaaacaatttttttagaaaaaaattttatacaaaatgcaccgtttagtagtttgaaaagtgtgctaacaaaaacaattataaaatcttaatcttaaccttagtcttcctgagccagtactgtacatggttggtactgttcatcgggttactgtgctcgcgcatggaggtctggaacgcagatctggacagtggtttggtggctgtgtttgttaggctgactcaaggtggcatttgcatgtggaaattgagtgggctgcatggaacttgatcaattgggccatgctacatgtcgaaggccaatgcaagtagcaaggcagcagttgtgtatcaatattactttctccgtttcacaacgtaagacgttctagcattgtccatattcatatagatgttaatgaatccaggtatatatatatgtatctagattcattaacttctaaatgaatatgagcaatgttagaaagtcttacaatctaaaacggagggagtactatattaggactcgacggaggcagtgcgcgggttgagaaaaaaatgttatagtggtaaattttttggtttattcaaggtgataataaaattctcaaagtattaaggattcagtctagatacagacagcgtggatgatggattcattagctcgatccataagaaaccaagcaagaaaggattctcttcatgtttgttgagtttgatttgtctatttgatgatgatattagttatctagctatgaattagattaagtcaaatttaaaacgggagatagatgcaaacatggtctttagggagtttgggatataccaactataggaggaatccaattttgcttggcaacacgactgtgacgagagaaaaaaaggtggagcactgttgtaggtggagttcgaaggaagacattacaagatagcggagtctcttgattacggtgagcgtagtgcaggcttgttgggactgctcagcgtgagtagtgaaaggatcaactcaagtccagctacacgaaaatttgtgcaagggacaaattcagattgacgaggcattttcgtcaaagttgagttatgatatgctgtaattatgctggatcagggaagagtgttcgtaatcaatgctctaggaaagtaggcttcggttaaaccttattaataaatatggtgtcttggtgtcattatcgtgtttgtatcttctatagtgtttcttatgtgctcggttaccaatgatgattttggaccggttttataagaaggaaccgcatgagcacgaagctgtgtgacaaaaagcgatggacctggccgtacctcatccatagtatatattttttagtttaccttttcctccctcggtcaaataattatggccaacacgggctctcaaggaagcaatatgtagtacatacttatgatttctgtaaattaattttagatttcacttaatttacttcctaaagaaaagtagtacttttagtactgactcaaaagttacttctattgccctgtacgtttcaaattacttcgtcaggctttgcacattatactttttaaaatcctattagagagctttgtgttttaactccataccataaagctacttcttctaatactagaacaaagagttacttttgttatcgtatttagttacttctacaatttatttgaattacttttagatttcacgctgaacttacttcatgtagcttcatgttttacctctgcactatgtagctaaccacctgtattgtttacataaaaacattataatattatgactcactctaaacatctaaatatgatccgtatatatgaaacataattattttcttcgggtattgatatagggtgcatgcatgtgtaatcacgaacttcaagaaaatgtttatgtaactatcccatctaatctacttttaatccgctagattgttacatttacgttttgaagaactacaatcaaatgaagttgaaaaaaagtactatgaaaaagacaacaattacagaattactactcaaatggaattgacaaaaaaaagggtgatcacagtgtacatgcgacacgcaaggagcggaacaagaggccaattaatggtggaaaatggaaatggcatctactaatctcatggtttttggtgtgatcttcaagctagtgcacactcttctcatatggcaccgatgattggattagctagatgcaattgacaagcatatagactttcgttcaataaaggccatcaacaaacccaacttctaagaaatataatcgtataaactattttatcttggaaatgtctttgccatcacttttattctgttagacgtcgttaattttgtcaaaatgaccaaattaccctcctgaagacctcccatgacaaattctcttcccttccaccgccagccattcctcttcaatttctcccctccacttgaactgccggccactccctcttccacctcttctcgattaatgctaacatctagttgtaacaaaaaaaaaaagtagcccggccgtcatcatcgacaatgcctatatatatcaggccgagctttggtagctgcagagatctcaaagctatagcggctatttcatttcctcttagagtatagttgccgtccatactccaaatacgtactgcctgatgggatcgtcaggggcaccagagttgacacatgaaatgagcagcaatccttgtgccggcgggagagcaacaatcctgggaatcggcacggccgtgccggttcatgtttatgagcagaagtcattccctgattattactttgagattaccgatagcaatcacttggtcgacctaaaagccaagtttgcaaacatctgtaagtgcatgcgaaattactaccattttgtatcttttcccgatcgatgaacttaattaacaaccataaatatataggtagaagctagcagcctcatcttttggcttatacttattcttataagccaaaatttgaatttccaatcttatatttggagttaattttgagatttttcatcataatttattcttcagcctttgccgttagatcgctaagaacatgcatataaaagttttatttacaaattattttccgtttacaaatataccgtttcgcttattccatcaataaacgaaacgatggagacgattttcatggtgcccaagcaattatatagcaatggttattgcattattgcaaatctaggcgagaagacatcgacggagaagcggcacatgtacatctctgatgagtggctgagggccaacccgtcggtgacggcgtacatgtccacctcgctcaacgtacggcagcaggtcgccgaggagggcatccctcggctcggtgcggaggcggcgcgcaaggccattgacgactgggggaagccggcgtcgagcatcacccacatcgtcttcgccaccaccagcaccggctgcctgcccagcgccgacgtcgtgctcatcaagctcctcggcctcccgctgtcgaccaagcgtgtcatgctctaccaggctggctgcttcggaggcaccacggcgctgcgtgtggccaaggacatcgccgagagcaaccacggtgccagggtgctcgtggtgacatccgaggtgatgtcgctggtcatccgtggcccctccgaatcccacatcggcaacctcgtcggccaagccgtgttcggcgacgccgcgggcgccgtcgtggtggggtgctgccccaccgccgacgagcgtcgtcccgtgttcgagttggtccgggcatcgcaggacgtgataccggggacggacgacgccgtggtggtgaaggtgcggcaggaaggggtggtgatcaccatgcaccgcgacgtgccgctccacgtatccaacgccatcggcggcgtggtcaagagcacgttccacgagatagacatgaagatcaccagctacaacgaggcattctggctgctgcacgccggtgggagggggatcgtggatggcgtggaggagaggctgggcctcggcggggagaagctggctgcgacgagggaggtgatgaggcagtatggcaacacgcgtagctccaccatcttcttggcgatggaggagatgaagaggaggtcggaggagcgagggatggcgacggcgggggaaggcctcgagtgggggatgctcatcgcctttggccccggactcaccttggagaccatgctgctccgtgcagtgccacgtaacagctagctatacatacgccaacatgtgatatcgatcgaccggtaacacgaataaattaagcagggcaatctacaagttatattttccagtgcgtacatgttatattttccagtgtgtgacaccagtaaaaataagtctacatgttatatttttccagtataagtgcgaatattatgttaattgcttcttgattgttactccacggttaatttagttggtttcggaaccagctgagtatggaataatgttatacgtgatcaattataagctcttactcgatcatctggtcggacgacaaacatttctagcatgatccatattatgattggttcgtccctagttggaaaatgtggttctgttaataatgttctgaagctttgttttttattatccatattcggtacatcactagaaaaagaataataactgaaaatgaagtaagattactccactggtggagaaaccatctttcgtcggtcggccgatttccacaatagtcccggatgcaataaaaaccggggctaaaaatgatctttagtcccggttcaaaagggtagcgggcatatttgatctttagtcccggtttgtgttaccaaccgggactaaagatcatctttagtcccggttcgaatgctgtcagggcctgtcaggcccccccgggatctttagtcccggtttgtaacaccaaccgggactaaagatcgtaactttagtcccggttggtattaggactaaagatcccggtgatctttagccccggttggtgctaccaactgggactaaagtcccacccctatatatgtgtcttcttcctcctccagctgcccgagcaagcttcaaaatttctttaaaaaagaggggaggtcatgccaaaatttctattgaatttattttggtgattacatacaaatcggaggtgcttaaaaggtttgcaacttcatcctccaatgttttttttttgtcatactacatttgcacctatgttttgcacactttttttgtctccaaaatttagttgtaagttgatgagagagaaaatgtgtgtggggaagaaagaatatatagaaatttagttcatttgctaaacaaggttttataaaatagttgagaaggaaaactctagtgaaagttaatcttaaataatagaaaacaaactaaaatgaaaattaaaagaagtaagacacattaaaattagtttaaaactttacaaatagtttttaagaattatttggtgtaatattttatgatttttgtatgaataaagatatcttataattattatatgactgtcattattgtaagaataattatttgtgtacggttttttttactcatgtagatggatcagcaatggatgtacgctgaccggcggtccaaagagtttattgacggcgtgcactattttttgagagtggccgaagctaacaggcaaaggggttttatttgttgtccatgcaataagtgtaagaatcagaaggagtattctgtatccaggactattcatttccacttgtttaagtcggggttcatgccaagctataattgttggacatcccacggagagcaaggtgttgaaatggaagaagatgaagtggaagacgacaatattccggactttgctcagtatgttggatttgaaggaaatcaaacgggcgaggaggaaatagctgctgatggtaacgacgttgcggatgatcttggtcagatgttgcaggacgtcagggaggactgcgaaagtaaaaaggaggcccataaattggacaagatgttggaggaccacagaacttcgttgtacccaggttgcgagcaggggcacaaaaagttggataccactctggagttgttgcaatagaaggcaaaaaaatggggttagtgacaaggcatttggcgatttattgaaactcgtcaagaacattcttctggggggaaacaaattgcccgagacaacgtacgaggctaagaagatagtggcaatttcatatgttaattagagtttttaacatttaatttactatcattcatatgctaattataattgactggagaatttttaaaagtattaaatttaatatatttttaaaactatcattcatatattagagtttttcacaatttaatttactatctttcatatgctacttatatatgactattcgaatttttaaaaggtttaaatcatgcatgtggcatttacatatgttaattagagtttttagcatttaatttaatataattcctatgctaagtacatatgatgattacaatttttattaattttaaatcatgcagtatgtacatacatatcttaattagagtttttaccaatataataatatcattcatatatatgctaagtatatatgattattggaatttttattaattatatttgcttattacgatttatccacttaatttattacagacaaaaataatttttcgaagtaattgtcattaatctttgtactttaaataatgttaatgcattaacttctattttataaacacatatgtaagcgaaaatcatatgcagtgctataatctttagtcccggttcttaaccctaaccgggtttaaaaagaatttcgaaatagcgggaaaagatatctttactcccggttgttctcaacaaccgggagtaaagatccgggcgtatatatattcccggtgcgccctcgtcttcttcaccaacacttagacgttttcggccgatcgatctctctcggcctctctccttcgccacgccgccgctgctttcgccgccgcgcgcgcaatgccgccgccgccacgccacgccgccgccgccgtcgccacgccgccgccgccaccgccgccgcgccaaccgccgccccgatgccgccacaccgccgttaacgaacgagaacaagaacgatcgaacgaacgagagtgagaacgaacatgtcaacgtacgttgccgcgagaacgtgaactagaacgagaacgatcgaacgaacgagagcgagaacgaacacgtcaacgtacgttgccgcgagaacgtgaacgagaacgagaacgatcgaacgaacgagagcgagaacgagaacgatcgaacgaagacaagcgagaacgtgaatgagaacgagcgaacgaacgaggacgaacgttaacgtgaaatgcaatatatatatatatatatatatatatatatatatatatatatatatacatatatatatatatttgttacttcgcatttatccaaatacatctttttgtatcttgcaaaaaagacgtgttgtcggagtcgtccgtcaagcctgagtggaagagctagccctagaaggaattggagcaggcaagtgacgtaataatataaatgattgttatatttgtaatgcaattaattaagattattagacctgtaattagacttatcatataagattgtgtagtgttctaatattatttgagttttaatataagattattttattgcaaattagacttagtatgacattattgactacggaattggtgcgactcctatcaattgactattgtagtcttaattagacttagcatatacgcacgaaacacttagcatacatgactattttagtcttaacatgtaatattatttgagttttaatataagattactttatttgtaattagacttagtatgtaattattgactacggaattggtgcgacaagtagcaattgactattgtagtcttaattagacttagcatatacgcacgaaacacttagcatatacatgactattttagtcttagcatgcatgtaatattatttgagttttaatataagattattttatttgtaattagacttagtatataattatttactagctagggttgtataatatacgtcacctagacttagcttatatcatgatttgtaattagacttagcacgtaaggttgtgtagggttctaatgtacgacatttacacttagcatacatgacttagattgttaaaacataaatgtctcgtaacttagcagatgtttcttgtatcaacagatggctgaccgcgatgaggaacagatattgtacgatacaatcgcggagggaagcagccagtactggaatgaagaagaggggaacgaggatccaaaccagtacttgaacgaggaagggaacgtggagagggatgcggaggggaaccagcaggggcacgtggaaagggatgtggaggggaaccaggaggaggaggctagtggtagtcaaccctccgttggacagaacagggcacgcgggcaacgaggtgcagcgaagaagcttgagggtcagcacatcataacggaagtggaagaagatggacgtcctagtgccccggccgaagccgccaagaactatgtacgtcacagcggttgggttgtgcgggataacgtgcctgtcagtacggtgtactggtgaagaacaagggcacgcggagatcatgagagctttgtcccagattcggagaaagagatgctgtggaccacaatgctcgagacattcacccttcctgcgggtacagaggacaaagtgaaaaggtggactctgaagaaaatggcagaacagtttcagagcttcaaggagatctgtaccggaagtatatactgaaggggcagacaccgaacttcgacacattcccaaagctaagggatcactgggacgagttcgttgcatataagacaggtgaacaagggcaggcgatgatggaaagaaacaaagaaaatgccgccagaagaagtaccatcaccacttggggtcaggaggctatagcgtcgcgatgcagcccgtgggagcagatggaggctagcttgattgagaggggtatcgaaccggcaacagccaattggccggaacgatcgaagttctggtactatgctcacggtggaacgctcaacccagctgatggctcactggtcttcggcgatcagatacgagaggctgcgcgacgactaacagatgcagtggaagcctcctctcagggcacgttccgaccagacagagatagggacgagctgacactcgccctgcagactccagagcatccaggacgaacacgagggaaaggggtgattccttggaagattggtttcaaggaggacatccacacgtacaggagtcggatgaggagcaagagagataccgaggcgaagattgcagacctagagttccgggtatcgagctacgaactcaacatgcaagaggaggtggcaaggaaggttgatgaacgcatggccgcacatcggtcccatgatccccagccgaccattcctcctgcaatggtgagcccgtcaggaaaccgtagcagctgcgcctcaacggggcaggtaggatcacagagcatggacgccatgcaaacacaggacgaatcgacctgtcccgttgatgacatcactcagcggacaccatgtgagctgcatattcctttcaagaacttatcaataaaggtaagatttagccattccgctagttgctgcttatatatgttgattactaataaataatctctcacaacatgaaggtggcgtcgggcatggccatcccaacggacccttcaggtacttaccactgcaggccgattccagcaggatactcgaaggtcgaagttgagttggtcgaaggcgcgtacgaggacctcgagctggattaccctggaggagacggtgagacgcatctacgagacacatgccatgccattattctatggcgcaggcggtacatcatcctccctgggcgacaagcggcgtctcgtgccccatctcctccggctccgccatctcctcctcaggatcctgcaccgtctcctcctcatgctccgccagcaccgtctccacctcaggctccagcatcgactcctcctcaggatcctgcaccgactcctcctcgtgctcctacacctactcccctgcaagctcctcttccggcaccttcaaagtcaagggcccccccagctccaccgcctgcccacacaagggcaacgaagaaggcgaaagttgacgccgccaagaacaaggacccggggtacgattgcacgcaagaggagcttgacgcttacgttgcatcagaagtcaagagacaattcaagcctcgaagtctagaaaagaagattcctatagaccccagtgtcaggaacttcttcaggggtatgtttgcatctgtcaaggaggccatcaagctatcggactatgagcgaacgctgaagaaagcatcttctggaaagtccaaaccagtccctcagcttggagagcaaccaaaccaggagatcgagccgttggtgaccggtgaagaaatgacgatagaacaatttattactgacaccggtctaactacggatcaattgctaggagtcgcaccaatcgaaaaggcggaagtgaaatacatgtacgaactcggtaaaccgcttgtcaagcctgagctgctgcagtccctacccacacaaatgtacaagttccatcagctgtacatggagatgagcaccaccagtagagagatgatcggagcgaggatcagggacacggacttcttgcaaggagatgacattctctggatcaatttcaggggaatctacgaactataccagctggacgccctcgacgtctctagtatgagttgctggattttgtaagtatatcgttcagttagatttcttactatacgtctcctttaattaattaggtccttgtatataagtagactatagaaaataatatactcccttttatcgttgtagaatggagattcaaagggcccgatggcggagggttttcgatactggattcatcgaccctcggaaagtaaacgtcgcaatgctcgaccaatatccacaagaaacagaggacaatctcgtccatctcctgaaggcgcagcattacaagacgttcatactgttgccatacaacacagagttagtttaattttactgtcttcctacataccaaatttcattcccgtacgaacttgctaagtgtttcatatgtaatgcatcccttggacattgcagattccactgggtgcttttactcttcgacctggatgcctgcaccgtcaacgtatatgactcaatggataaaaaagagtctacgtttgacaaggttttcgaacttatagataggtaccgtcataagttcctttgttaattaagaaaatcttgttatgttaattgctactacgaatcatagctttaaactccatgtagggcttggtatcggttccgtcatttggtccgcggcaaatggagagaaagacttaggcggaagttcaaatttcctgtgagtacacatgctctacatttatatttctccgattcaaatacatacaagtgtatattaattagatctctcgttgtttgtcatttatttgtagtgcgcaaagcaaaagcagggaactaacttgtgcggctattacgtgtgcgagtattgccactgccttgcaaaccaaatcatcaccgcaagtgagctcgatgtacgtacaaataaattcaaaatttcattacgtagcgatttcttgtttaattactaatcaatttcatacattcatatagtttattcgcatgagggataacctgaccacacacaaggaatttatcgcggcggttcaagaacaactcatgggattcatcaacgaagaaatccttgatcccaagggtgaattctactacgacggaaacacaattcaccggtccttagcttctgagctagcagcgagtactactacgtcgaaatcgtagctagctaggacatataatggattgtaattaatacatgactacatatgtttctatatgcatgcgtacacattttctataatgtaaatatattttggtcatatatatatctatatacatatgcatttgcataacatatatatgtataaatacatatatattatgcatgtatatacatataatataatataatatatatatatatacatatatatatgtatgcatatatatgtattgaaacatatatatgcatggtttatatatatatatatatatatatatataaaccatgcagcaacagggccatgcaaaaaaaaaaaaggactaaagatcgatctttagtcccggttatttcacccgggactaaagatagcgatctttagtcccggattggtactcccggtttggaaaccgggactaaaggggggttacgaaccgggactacaaagggtttctccaccagtgctcttacatatcactttttgtgatctttgatgtacaactttaatcactattatatattaaaacagagttagagtatttacggctaatttttttccagtagtagatgatgtacccatcgatagtgaggtgttcatggtaacttaatcaatctcaagatatgtcgggcccagtttttcggaggtgctcataaggatagaatgtgcgtatgtattcatatagttgagtgcacacgcattgggggcacctgtgtttgtaatgtgtttattttaaaaaaaaagagtacctagtaaaaatttgtattgttatagtgtccttttctaaactaatctacacatatgaaagtgtagtagatatggaacaccccacttatgtgtatatagtcagcaggaataccacataaattgtagcagtgcaagctacgcatcgcgtgcctttagccaatcggttcaatgaaataaaaaaaaatcatttgtaggtcttacaacagagaatatgttggatatttcaagaggaacaatacgatccagttgattaaagaacgtaattaggagtaggtacatacgaccttctcatccactttaggatagttgtctatttaaaattaatgatctttagaaatcataactaataaatcacatattcaatttcaaagtcgtttcaacagctgtattcatggtaattaaatggacaattcaacaactacactccctccgtctcattttaagcgcaaacatgaattttcgtgtccaattttgatcgttcgttttatttgatatttttttataattagtatttttgttgttattagatgataaaacatgaatagtactttatgcatgacttttttttaattgttcttctaaaaaatcaaataagatggacgattaaagttgaacagaagagtcatggttgcgcttaaaatttgcgcttaaacgctgttaggtgtggttggtacaactaaaagagatggatacccgcgagcggcggcgacacaagtgtagttgagtagtagtttaattctctaaaccagatgtggcaacggatagaaatcattcggcgatgacacaagtgtagttgagtagtagtttaattctctaaactagatgtggcaacggatagaaatcattcgagcatgcgggtatccatctcttttagttgcacaataaccagatgtggcaatggatagaaatcattcggcgatgacacaagtgtagtaaaccagatgtggcaatggatagaaatcattcggcgatggcatatgctcgcgggtatccatttcttttagttgaaccaaccacacaccacatctggtttggcgatgacacaagtgtagtaaaccagatgtgacaatggatagaaatcattcggcgatgacacaagtgtagtaaaccagatgtgacaatggatagaaatcattcggcgatgacacaagtgtagtaaaccagatgtggcaatggatagaaatcattcggcgatggcatatgctcgcgggtatccatttcttttagttgaaccaaccacacaccacatctggtttggcgatgacacaagtgtagtaaaccagatgtggcaaggcatatgctgcaacggatagaaatcattggcatatgctcgcgggtatccacatctcttttagttgaaccaaccacccacatctggtttagagaattaaactactactcaactacacttatgtcgccgccgctcgcgggtatccatctcttctcttttagttgaaccaaccacatctaacagcgtttttcgtcctcgctttcacgcaaaagattcgaatccggtgtgttacagtgaccgggcaaatttcctatttaagctgctgctgctcaagttaggaaagcgaggtggtactaatctagctacagtgccgcgccttgctacagtagcgcgagctactgttgggctgcatgcatgcgtgggccaaggcccatggcctgctgctagcttttttttcttttagggtgttacacggatccggcggcggcggccacgggcgatagcggtggcggcgcgtgccccctcccctccctccccatgcagatccggcggagggagggcttgggggcagcagatccggcggccgccgccctctcccctccttccccttgcagatccgggggagggggtggctgatccggcggcgcgcggcgggaggagagcacggggcggcggcggcggccgcgggcgacagcggcggcggcgcgtgccccctcccctccctccccgtgcagatccggcggaggggaggcttggaggcttgaggagatggtgaccggcggagcggcggcatgcgtcggcgaccagatctatctctccccctcctctttttttcacttgtgttttttgtgtgtgatttgatcatgtgagatgttcatgtgatgtgttcttgtgatgtgagatgtgtgttcttgtgatgcttcttgtgatgttcatgagatgttcatgtgatgtgttcttgtgatgttcatgtgatgcttcttgtgatgcgtgttcttgtgatgtgagattcggcggtgggcgacggcgacggcgacggcggcgggcctcggccaggcggcggcggattaggttagggttagggtttcttttttctttttttttgtttctttttttttctccgcgcaggcggcttaagcgcccgcacgcgaaaattggttttcgcgtgcaggcgcgccacccgcatgcgaaaatcacgattttcccagacgactgggtgcatgcgggccgcccacccgcacgcagaaattggctatcccgcatggaaaaattggcgctgtagtagtgcttgatgcgtgaacctagccgtacatgatcaataaatcagtaagattttaaattttgatttatagcataatttgtcactcctctctatttatagctccctcttccaccttctatgtttagtgatggacacaattagtgaatagccaggccgggcttacgtaggccagcggtttccaaacactcccccttgggctctgactgtataatttggagaaaagaaaaacccagtggaaaaaatttggagaaagagtacatagcatatgcttgcaatgtcgcatgaattgcctcattaaaaatcttataataaactactgggaaaacttatctaacggaaaaaagagtataatgcactcaattcttcgttcaatttttctagatggaattttgggtattttattttctatatcaaaattctggaatgagtcagcgaaattctccccctgaattttgcatctctctaaatctcattattccaattcctcagacacacttattcaagagaagatgttaataatgggttagtggacaaatctgtaagacttccatatagcttagttcgttgcttctattcaattcatgtacatagaagagcttggggttcatgtgcttagtgagtttgcttctcatgtaatccatttgcatatgtgcgacatatgctggggttgtgttaacagtgaaatttggtaagcccagagtagtcatcggcttagagtcagcattggcttcgaagtcttgagattagccgatgagagttgtcaagtcgtcagttgtcggattcttgctatattcggttaaggaaattgatctactaaaggaagcttatccagaagagaccgagtttaaagagaatgcggcatggcaagttatctattaattaggaatagtttattagtttccttttatgtttaggaaagtgtgtttagtgtcctataaggactttatcttttccttttatctttaggaaagtttctttcttgtccggcaagaacttgtatcaacccatgggtataaatatgtacacccagggtattaatacaattcggcgcatcgccaccttttaccttttctactttattttatcgtccgacgggacttggcacctgacgtggggctatgtttgatctccggctaaggggtaagtccaatgttccgtcggcctaggcaatagtatcgtttacgtcggcgtcgttcaagtctgcatcagtacattcgatctcttggattgctctggtttggatgatatatttgcctacctatttatcatatgtctctgttaatatcgtcttagcatatcaatttagctctatcggctgcttctcgttttagggattctgccagtatcggctaaatcgcgttgctagattagatttgcttagacatctaccaccctaaaaactcagtcaacggcttgattgtctagatattatatttcttttcatacttagtgctgcatccattgagtttgatctactaagtcgtgcttagaaccataatctctagcctgcttcttgattgccaataagggtttcatcggggtttcaaccggtgagttatctggacgttgcatcggctcataaggattgcatatacatataagttggatttagccgatggcaacaaaggtttcactatttaatttaatcttgtggatttcatgatatcggacctccagccaatgtgtgctttaaccttcggattaatgcttgtttatcatatcattatttgctgattggtttatactggattatattgttatgtcgttacatcatcttcagccgattgcctttatatcattatttacattggacatatagccgatagctctaaaccctatcgctatcggctggcatcggctattggctggtatcagcatcggctggaatctctacattggattatgagccgatcggctattttatctcctatttacataacttgtcagttgcaggatcaaacttactggcacgcctgcatctcatcaagatttggacctgcacaggagctaagcagatctcccacgccggtgtgttcgattttttcgtcaacacaaattggcacgcccggtgggaccatgaattttatatccacatgtctgaagaagaagccaatgccaagatcatggtcacggtggagaatttaatggaggaacaacaatattggctcggggggcaagcgtatcagtttcagcatggtggagtacatcagtatcggcttgtcggtgacatggggccgcgggtatcatgactagaggcttgggtagccgcgatcacccacgtggcctgaccccctcgggggggtcgggcccgaggatgatgtagccacccctccctctatctccccgaggggtcg

SEQ ID NO: 20996 - DNA, 7526 bp, Oryza sativa
cgccccgaccccctgtgattttggcgccacgtatatgggttaggtaagcacagcggagctttttcagctcgcggaccgagtggctcgcaaggaggaggcctggacttggaacccctccggttccggtgtggcagcttcggccgcccccgggtccgctgctcggtcagggcggcgagacaggaggaggaagaagaggtcagtccattccgacgacgagggtcatgtcctcgccgtcgagggcgtttcgctggccacccgaaaggggaggcctgcgagcgacaaaaagaaggaggccggcgctccctgacctcgactacttggaagagcgaaggcggcacgcggccctccgagccgcgtgctaccggcagaacctgcggcgctaccatcagcgccacgtccgagcccgatcactctgcgtcgacgacctcgtcctacgccgcgtccaaacgcgtgctggactgagcaagctctcaccaatgtgggagggtccgtatcgagtgatcggcgtcccccggccgggctccgttcggctggccacgggcgacggcacagagctgcctaacccgtggaacatcgaacaccttcgtcgcttctacccctagtgggggtcgggtgtcaggtcttgggcttgggccaaccccgcacccccccccgggcgtgcagggttggccgggggcttatcttttttctcttccgtatttcaataaaagcattttcgatttcctaaggactgcgtctgtgccgttgtttccttttaaagaatcttgacttgaaataggtcgctcgtgctcaatcctgccctcggtggcccaggccggctaaaatcgccaaaaggggcccagaaccgagccgtgccccggggcgtggtgaactccgggggggaatcggcaaaggcccacaatcgggtcatccataaccctcggtcaccatgttcccggcctggccagtctcgacacgtggatctccccaggcactagccccgacccgcgccatttgaggctgggacctgggcacgagcccttgttcaagctaagacacagaaggaccgcgggacagaccatcctcgactcatacacacaacaaatagaattgacacagaaattttctctttatttgattgcagattaaatcagtctatacaagaagggggcccggaggcttcggaagaagaaggaaaagttattaagattggcgggggcctggggctcactccgacgcgcccgggtagccggcctcgccgtcgctgtcgtccgcaccgtcgtcaccgcactcgccgtcggaggtgaaggcaaacgcgagcctaggggccgctcattattgtcggttggttttcccttgccgatgcgcgtgatttgcgaccgctgggattctgcccgaagagagagcagggaggagaggcccccgagccgaacggcggcccaaggcccccgacggccggagctggccctccgcctgcttgtccgacggtgacaggcgcccccgacccccaggatggccccgaggccactgcgggaaggccgcacctgtcgccctctgaccccgaggtcgtcggcacagaagccgagggcgccccgcgtggcctctcggacgaagagcgccctggagatgcggcccctggcgaagaagatcggctccgccgaaaggtgcagcggccggtctacttcgttagcgaggccctccgggacgccaagacccgataccttcagggccagaagatgctttacgctattctgatggcttcgaggaagttgcgccattatttccaagcgcattgggtcacggtggttacgtcttaccccctcggccaaatcttgcataaccgagagggtactggacgggtggtgaaatgggcaatcgaactctctgagttcgatttgcactttgaaccacgccacgcgatcaagagccaggccctcgccgactttgtggcggagtggaccccagctcccgagcccgtctccgcccccgaggccagctcgggcccatcgcagctgcctcacaccgcccactgggtgatgtagttcaacggcgcctgtagggaccggccccacctgtcaccgggcctaaggagtggcgtcacgcccgagcgcttccctcgaagggggcaatcgccctggcgtaacgccgggggctactgtcggtgacatggggccgcgggtatcatgactagaggcttgggtagccacgatcacccacgtggcctgaccccctcggggggggtcgggcccgaggatgatgtagccacccctccctctgtctccccgaggggtcgggccgcccctgtttcggccccgagggatggggcgccccgaccccctgtgattttggcgccacgtatatgggttaggtaagcacagcggcgctcacctaaccgcatttattgcgggttggacgagcgcgccacgccgcatttaatgcagcgcagcacgctcgcttatccggtccgtaaccggtagcagtgtgtgaccggtcaccgatcggtcagattgctggttaggtggtaacaggcggcctgtcacacgccttgccccgtcccgtcggaatgatgagagcctccaggcgctcgtcactagccggagccggcgtgctaactcccggagttggcacgtcagtcccggctagatacatgccaggcttcatcgcaaccattacaagcaagacattgtatgaagaagggcgaacatgcagattgctaatctgacgcgtggtggacaagaatgactggtttgcgaccggtctgacactggttatgtcgtcggcagacgaccgtgtccccacgttgcacctgcttccggcggagtggaggtaggtatgggccgtcccatcagaaggatcactcggacagcagccattgcaagtctccgcccaattaaaaagagatgacagggtgatccccgaggtcagacgaatgaggacgcgtggccgcactcaaaaacaagcagtgttttagcttccaagagaaggcgagccaagttttagtaaagataggatgggtccccaccctatagaaaaggaggtagaagtggtgcatgtgggatccccttgagatataaaaggaggaccttgcccacttaagggtggggggggataaccggagctggtagaggagagaaggaggaagagggtctctagagtttgaactctcttgctctccagctctttgtagctccttcatacacagatccatcagaacacaggagtagggtattatgcttctaagcggcccgaacctgtatacatcgcccgtgtcttgcgcgtttccactttcgcgaacatttcacagattgagagcttagaacttcacttagcgtccccggccgaaccggcaaaggggggcctgcgcggtctcccggtgaggagccccacgctccgtcatggctcatgaaagccgactgcaggaagcaaaggaagatcggttttggagttatcaagacaagaaattttgaagcatgaattctcatactccaaaactggggggcatgtgttaatagtgaaatttgttaagcacagagtagtcatcggcttagagtcagtatcagcttcgaagtcttgagattagtcgatgagagttgtcaagtcatcagtgttcggattcttgctatattcggttaaggaaattgatctactaaaggaagcttatccagaagagaacgagttcaaagagaatgcggcatggcaagatatctattaattaggaatagtttgttagtttctttttatgtttacgaaagtgtgtttagtgtcctataagtactttatcttttccttttatcattaggaaagtttctttcttgtccggcaaggacttgtatcaacccatgggtataaatatgtacacccagggtctatgtaatctatcttcacgatcaatacaattcggcgcatcgccaccttttaccttttctactttattttattgtccggcgggacttggcacctaacgcggggctgcatcggtgttcgatctccggctaaggggtaagtcaaatgtttcgtcggtccaggcaatagtatcgtttacgtcggcgtcgttcaaggctctatcagtacattcgacctcttggattgctctggtttggatgatatatttgcctacctatttatcatatgtctctgttaatatagtcttagcatatcaatttagctctatcggctgcttctcgttttagggattctgccggtatcggctacatcgcgttgctagattagattagcttagacatctaccaccctaaaaactcagtcaacggcttgattgtctagatattatatttcttttcatacttagtgctgcatccgttgagtttgatctactaagtcgtgcttagaaccataatctatagcctgcttcttgattgccaataagggtttcatcagggtttcagccggtgagttatatggacgttgcatcggctcataaggattgcatatacatataagttggatttagccgatggcaacaaagatttctttaccaaactctggtaaatacatgagaaatcccgtcaaaacttggcaatattgttaaattgtcaaaattttaacattgctaaaatttgataaagtttattttagctataatctgaacatgcccttaatacgttcccttttcactggatttgaacacatcgaaatctggggaggcatagaacaacatatggcatatgggcaaactggagctcaagcgcatccaccgaaccagagaggcagagacaacgctggaagcatggaaccagagactacgcgcgcgactgacgcgtccgatattttaaaacccatatctagtgtgtaacgatcacacattggaactggcacatattggaactgtccccaatgtgttgttttgcagtagtgtttgcttcttttcttcttaaaaaattttgtctgccatgcatcttcagttagcttggcgaaaggaaaataaaaatacaacgtaaaatcgacattgatttagttttgtttagcaaatccaaaaaaaaaaatctaacttggtcatagtggatcaaggacatgccagactttaggactcgttcttttactcaactttccgcttcaacatcttcattttccccatttttcattagcacgtttttaaactattaaaggtatgtctaaaaatgattatatatatagaagttgtttaaaaaacaaataaatttattattaaaaattgttatatgaattttcacatctcgcgtgcgctcgaaattcctctccacatggagcgaacgaacgagctcaaaagaaaatgaaacgccagaaatgaagccccattgttatatccagatctagttgtgtttagttcacaccgaagtttagaagtttggttgaaattggtacgatgtgatagaaaagttgtgtatataaaaggtttgatgtgatggtaagttggaagtttgaaaaagaaaactttacaactaaacagggccagatctgtagtgtatggcaaaatccaagctattaatgcctcgctagctgatcaactggttaagtcaagtctgcctcaaaaaaaaaatatatgattaagtcaagtcaacattccaactgccccagtcatctccacattataacacatggactgcgaggctccgacgtaagctttggggcatggcctcacactaacattcatcatctagaggtaatactactaacaataatatttagctgcatttttgtctcattttacctttttttctcttacaaaatacgttgtagaaataagggtgaagacataattttttttcatgcactgtagctacctttttctaaaaaacactgattataaatgaatttgtattttttaataatattttgtacaacgtattttgaatttaaatttttcatgaccaactgttcatatcattacagtacacgtctgaaaatggcatgttttgtcgacatttttacttgtttcgaggcaataagaacagatcaaccataatgagtgactaatgaacatgaggtatgtttacgtttttatttttcctgcaggtcaggtccttccgttttaaaatataaaatatattagcttattcaccgtcttcaacattgtacatttaccactatattcttttgtaatactgtaaaatgtttaaataatacagataaagtgataccacatcactaccagaaactgtattacttctgacggccaaatcccgtcagagataaagaaaattccgtcaggaaaataggacctgacgtgttaccgtcagaactagcttgtcggggaaaaataaatttgcctagcgtgtgtccgtcagggttaattttcctgaaattcaatgcgcgcgaaataccaaaaatattgccgctctgtcttgtttcctcgcgcgccattgcaattttattttacatagtctttcctgtgaccccaaatttttgcactgatgggtacgttcacgtcaggcaatttaatattactgagtttaatataattttaaggttgagaaacgtctaggggtcttcggctagcttgtcacgccccgaaccagtcccgaccggaactagcccgtgacgcttcaaattaacctgttaatcgataccagtcccaggaaacagtgctggtatcacagggagacagaatatcatagcaacagaggtctctttattatagtaggggtacagtcatgttgggccgtggacagatcccgagctcacaactgtattacaaaagggaaacggaagccaggacttggaccaaacaacacaggcgcgacttaggaactaggccgaaaccctaaaactcatcgtagccggcttgctcctggaagaactcctcatcagcaggatccgcttcatcttattcagcaactggggggggattatttatatagagcaagggtgagtacgggagtactcagcaagccatgggaaataagtgtttaatgcaggcttcaaggaagggctgttgtttttgcaattgattttatttgaactctttttctaaaaacaactaagtgagtgcttctcaaacgacacggatgagacagtgcgtctcgtccggtcggagtatgtgcaatgtatcagtctttagaattgattcaaggttggcacccggccaacagcttttcaaacggccacccgggccaacaactttcaaacggccacccgggcctagctgatcccatcagctgcagatttttcaaacatcgaacccctttccacaacagcaatttcacaagcagtagtcaaacaaaactacgctaggaatcacctcacatccgcccatgaccgtgggcacggctgttcgaacagtttgttaacctctgcagagggggtacctttacccacacgacattactaacccagatcacccagcccgtggggatcagccacgtcgggagacctccaagctttcatgacaaggcatttcgaaagccaacaaaggtttaccatatgccgacgagaggggtcccagaccaacaacaggttaggtcccagaccatactatgccaggaagcccaggagtcctccccgacaccaccccggcgaatccacatgtctctcggcatcaaggctcccct

SEQ ID NO: 20997 - DNA, 8227 bp, Oryza sativa
gggagatgggccgagagaaattcggcccatcgaccccggggaggcaaaatagacttttgcggaggaatttgatttggaaggatttggattcgggattgaactcgacgatagatcggggatttgagatcttgagatggcacggacactagacaacaagcaaagaaacaatttcgcaattagggtttttaagagataattttcccgctaggcgccacgacggaacgggcgctacatagctccacaaagtaatgggctagctggcctgggtttgaagtttcaacctttctaattatttgatattaattccttctcaaatattcgtgttttttttcgtgattttaaaggctgactttgtgaaaaacatgtacttacaattgttggaggccccaaccttaaaagttgtgttgctcctttgctttacaacaaaaggacttttttttttgttgaaaaaacataagcaaatggacataaaccccaaggccatatgtaaattaattaactagctgcttaattgagtgcatgatcttttctcactacgccagattagcccatctgtgacggcctatctatgatggaccaaaatatctcgtcacagatactatcacctttgacgggttaaaataaatctcgtcatagatgaggctaaaaaaaatgacccgtcacaggtaaatactcacctgtgacgggtatatataaggacccgacacataatgattgtgacgtgtccacatataaacccgtcactgatgagtacttacctatgacgggttttaagtttacacccgtcaaagatgagtaacctcacctcatatattcaattaattttcacttataaaaaaggaaacaccaaccctcccctaccgcccaccaccccaacccacccccaccgcccaccgcccacaacccatctcttttctctcttctttctctcttctctcttcctccaccatcgcctctcccctcaaccatgcgccagctgcgtcgctgcctccttcgcccctcgccgtcctctaggagctcagggttgccggctgcgtcgcctgccgtcggcctccaggaggtcgggcccggcggccttcaacatcgatgccgccgccacctcctgaccgccggtcaccagatctggccgccggtgccttctctcgcctcccggccactgacgtcgccgcctcccgaccaccggctttaaccgccgacgccgtcgccgcctcctaaccgccggtcgccagatctggccaccgggaagccggatctggccaccggcgccttccctcgcctcccggccgccgacgccgccaagtttggcctccgagaagccggatctggcctccggcgccttccctcgcctcccggccgccgacgccaccgcggatccggccaccgacaccttcgccacctccacaacctcttccctgactgccggacgccacctcctccgccaccgatcgatgaccgccagatccggcctccacgaggtcgggggacgcggatccagcgtccgcggcctttcccctctgccaccgactgccggccgccaccgccaccgaccgccggccgccggatttgtttgtgcttgatgttgtttgtgcttgatttgctcatgtttgttgcttatgtggatgtgtagtttgttaaattggacatggatacttgtgtgatgtatattttcagattgcttcatgtgtagttgtttgttgagatgtatttgatttaaaatacaaagttgctgtatcatgtgcatcttgagatgtatttgatttttcttcatttcgtacatttgggctgaggcatttctttttttttgggtgatttttgacatctgtgacgggtgagaactaaaaccagtcacagctgtttcgtcacctttgacgggttgcaaagagtcacccgtcacaagtgtgagtcacctgtgacggctatattttttagcccgtcaaaggttttaattaccagtgacgggctttcacccgtcaaaggtgaggtgttgtcatcagtgaccactagtctctaaccagaaccaaatccgttaaaggtgagggttagagcccgtcacagatgactggatccggcctagtgtctatggttctcttgcaagtacatctctgctcctccatccagctcgtaattaaaacggagaccgatcgaggtccatcgccgattcgcgttcgtacgtcgtccatggaactgcatttacgtacccaacacgtgatcgcatccaaatcgcagtactcaaaagcagctaatacctagtcaactacaagtcaagtcaacacaacaacatgtacgtgccaataatgcatgcgcatcttattcatctcgattggccaacttgtcgcaggttttacaatttcgatttcgtccaaaattttggaaagtcccgaaattttgggatttttggcacttcttggaccaattttttttgaaattttaatagaatttaaccgaatttgattaaatttgactaaatttgctaaaaattgagaaaaaccaaatatttcggccgagataataacttaccggggcactactacatgatggattttcacgtgcggatatttcaactgtgtaagaaagtgtctgcaaaaatcgctatttttccatgcaggtggcgcagccgcacgcgaaaatcgattttcgtgtgctgattatgtcgcccgcacgcaaaaatgaaaaaccaaaaaaaaataaaatccaaaaaaacaataagctaaccctaaagctgccgccgccgccctcctcgccgtcgtcgccgtcgccatcgctggtgccgtagcttgatccacagccgccccaccgtccgctcgccgccaccggatcccccccccctcccagagctcgctgccgtcgacacgccactcccggtagcccgctgccgcgagctcgccgccgtgcgcacgctgttcccggtcggcgagcccgccaccggaggagaaggagaaggaggcggcaccggaggaggaggggaaggagatgtgcggtgccatagaaggagaaggtgagagagagagagagagaaagagggaaaagtgaggagaagataagggggagagaggagagagaagggggcggggggtgagagaaggaaatttaaaattttttttgaataggatgagttggaacgagtattttcctttgcgggtagattatgaggcccgcgcgcgaaaatagacatatttttgtatgcgggcctattaagtgatccgcacacgaaaattgattttcctatacgggcgatggcccggctccggtccccctatttttccttgcgatttcacttacgacccgcttgaaaactaaacggtccagcgtccatgaaaatatttgctgtagtagtgggggtccgaaatttccgaaattgcaatccctgagttgtcgtcgtatcagtcacggtacatatactatgcgttgggactatttgataattaaaccgataacgagaaaaatcattagcacattaattaattaagttttaattattataaacttgataattgtatttaatattttaaagaaacttatatataaatttctttacgggagacatcgtttaatagtttgtaaagtattctaacgaaaataaagataaaaatatgaatcttactcagaaaatggaagggcccggtctcacattaaatactgcactcaattgcttccagccattcacgcattcgatcgcatcatgcatccggcagccaagttaccgctgctcttcctcctcctggtcggggcaaccgccacgacgtccacggcaaaccatgcgccggctccagccgccggcagctgcgtgccgcgggagagggaggccctgctggccttcaagcgaggcatcaccggcgatcccgcaggtcgcctcgcctcgtggaagcgaggtaaccatgactgctgccggtggagaggcgttaggtgcagcgacaacctcatcggtcatgtcttcggccttcaccttcaaaataacttctcgtggtacaacgaagcaacagctttggtggggcacataagtacttctctgctcgctctcgaacagctagagcaccttgacctcagcaacaacaatctcgtgggtccagccggccgattcccagggttcgtcagctatctcaggaacctggtatatcttaacttctccggaatgccattaaaagggaaggtgcctgtcgaaacatgaattccgcaataataaaaggggtagcgcacgagacctaaaagtggatggatgcagagacaaaggatttagacaggtggccctctcaatgagaggtaataccctactcctatttggggatttgaatccgccaggtgaattatagatctgacgatctaattgtctcatgccccctagagggcctcctgcccaccttatataggatggggggcaggattacaagataaaaaccttaaccaacacggtatcagtttcctaaatctactaccaaaccaggactttaggccgttctgtaatatacaaggaaacgtaatacccaagtcatgatctgttacatattccatatatataagttatcccttataactagtcggataaccatgccgtgtgggtatggggtacccataatcttcacagtagcccctgagaccttcatagtcgaaaagataatcttctctcgaaccagattactctaaagccaagtgcttcaatcatctttgccatggtctcccgagtacttttaccaaatatgaagactgtggagggctgaaaaataaagtcaggtgcatcgactagatgcacctaataggtgtagcccccgactatgtggttagctgaacaaactaagcatatagtcaaggaataaataatccaaccaaccgagtggttttgataattgcaatcaaccaagtaacttgatatcaatatatagcatatgcggtatgaatccctcaataacatgatccaagtgatataccgactgctttgtaaaatataatgagtgtaacctaaagttggctacatcattgaaaattcacatagcaaaacagctataaagaagcttgtatgttgtgaataaagaaatttccaaagtattaggcatacgccatgcgcacactgctttaacagatatgcttaagtctctaaaacacacatggtttcaccacacctagaaatatatatatggcatatgtggtgtaaaatctgtgtaaataaactcataaaggatttaccaaccgcctggaaaatgaccaaaatatataatcagcctaagccataatattggtcaataaaagtgcacacttacgtggcaaaaagcaataatattgtatccaatcaattactttatgaacccaaacagcgccttgacttatataaaaaagtcagcgggcagctatataaagtattactgtttggcaccttttaaaatgcattgtaccaactcctaaaaagttgagtaactgtggtataaaaggattttaaggtattggacacttgatcacgtgcactttggcctaagcaaaaagtgcctaagtccctaaaagaacgtgacaggccacacctgaaaatatgggctgcagacatattaggcctaggccaaaaaatatgccttcgacaccctttaaaggatgacgcatgtaacatgctcccgagtaataaatcttccgggtaatatagaccaagtgtagctcatataaatagcttctgatctaagtgattatcctttatgggatactccaaaatagatataaagattgaatcctgactggcgcaagtattcagttgataacccttacggggaataataaatagtccagtctttgagcacagaaaataaacccatgatcatgaattcatgttgcatgtatccggaacaattccaaattgaaggtatgatacttgtgtttgagctagtaagcccctgagcatatagcttatacttttggagtagttgaaattatccatcggtgatagctgatgcaatcggcatggaagtgaagaaaccagtcggcagcagtcagataaactaacagtgaagatgaatgcacccagcaatagcggcagcgttttgtagccttagtgacgaaataatcagtcggagacgaaaaggcagctagtgaagaagatgaagatgaagacgaggataccagtcggtggtgatgaaagcaagccgacggtgaagatgtagacacgcatcaaaggcgatgacgaaatccactaatcatgaagatgaagacaatagtcggcgacgacaaacgcaactgacagtaatgatgataagcagcaacagagatgatcaaatatgatgacgaagttgcccaccaatagcagtagagtgggcaatgttgaagaggcttgacaagttattgatgaagatgacgatgtcggtgatccagtcaacagcggtgtaacagccgatgataatgacgaagatgctcatcagcgtttgcatagtaggtcaaccatgaaggcgaaataacaagtcggcaatgacggaagcagccagaggcgaagacgtagtcacccattagcaacggtagagacgtcaggaccgatgaaatagaggtgctggtgatgatgtcagtgacaataatccatcaaactgttgagaagatatcaaagctcgagtaatttccttgatgcgagcatgtgcataacgaagatgatgcaatgccccttgatttatgaagatgactgcagaacttagtgttatagcgttgcagatgcttcacttgaaagaaagtagatgctgttgtccaacttgttgaatctgagttaattggttgataactctaatctcccgaatatttagattaaatctcacacttgatacttgaagtagattatggcagcatggggcatctaaaattgtcagtgaaataattgaagttgctgaagtagaacgtctgctccgaagcaaagacgaagataatgactcctggagttgactcattgattgattgattgcttcatcttgacctaaagcttgtcgaattttgagagtcttgtatttgtgtagcccccgactctttggttaattgagaaacaactgaacatagagtcgagaactgtagcttcttgtcatcgagtagtcattgcttgagtgaatatactcatagaagatgtccgagtagaaatctttaatattggaacaccacttgttgtagtaaaataacatggcattatacttgttgacgcatgccgagatgtcgaggctcctgtagatgtcgtggtcggcgaagtagcaaagcttgcgaagtagaggcaatagagtttgccaatgccgaagataataaagatgatgttgctccaccatggtgacaaagttgcatagccgtgatgacgtgaacaggagttggcggcaacagaagcaaaccggtggcgaagatgcgcagtcatgaagataaaaacaccagttggtggcggcgtaaccagtcggcaacggaagaagtagaatgatgatgaaaacgaagacgttctttaacagcggcaaaataggccagccatgaacgtgaatacatcatgggcagcgccgaaggcaaactggcgatgacgatgacgccagtcaataatgacaaagacgcgcagccgtggaggtgaacaagccagtcggcgtcagacaaggcggccagcaatgaaaacaatgacgtctatcagtagtggtaacaatataaaccagcagtaaaggcgacggcactagtcaacagcagaagagacgaccggcggtgaagacgtagacgctcaacaacggcggcataataggcaagccgtgcaggcggagacaccagtcggcggcagacgaggcggccggtcggtgaagacgtagacgcccaacaacggcggcataataggccagccttgtaggcggagacaccagtcggcggcggtggagacaccagtcggttgcggcgaagacgtagatgcccaacagacggtggcataataggcccgccgtgcaggcggaaacaccagtcggcggcagacgaggcggccggtcggtgaagacgtagacgcccaacaacggcggcataataggccagccgtgtaggcggagacaccagtcgacggcagacgaggcggcctgtcggtgaagacgtagacgcccaaaaatggcgacataataggccagccgtgcaggcggagacaccagtcggcggcagacaaggcggccggtcggtgaagacgtatacgcccaacaacggcggcataataggccagccgtgaaggcggggacaccagtcggcggcagacgaggcggccggtcggtgaagacgtatacgccca

SEQ ID NO: 20998 - DNA, 6551 bp, Oryza sativa
agacgcccaacaacggcggcataataggccagccgtgaaggcggggacaccagtcggcggcagacgaggcggccggtcggtgaagacgtagacgcccaacagacggcggcataataggccagccgtgcaggcggagactccactcggcggcagacgaggtggccagtcggtgtaaacgtagacgcccaacaacggcggcataataggtcagccgtgtaggcggagacaccagtcggcggcagacgaggcggccggtcggtgaagacgtaaacgcccaacagacggcggcataataggccagccgtgcaggcggagacaccagtcggcggcgacggaggcaggccggcggtgaagtcgtagacgcccaacagcggcggcataataggccagccgtgtaggcgaagacaccagtcggtggcgacggaggcaggccggcggtgatgttctgactgatccattcctggagcgtaagagataagcttaaagccatgaatcccttttatgcatatctggatctggatcctgcagaacaaacatataggatgagtagtatctgatataaatataatactcgagaaaaattcaagtattttaaaatatttataaatatgtatttcttctcttgtcaattttgatttccccgagcagatgacttattacgtttaaacactctgcccgactagtcatagccaccaagcaccgggagtcggcctaagcacttcccaaacatgcatatgagtgacatgagttcgtcattaatggaacaaagtttcacgggtcggagtttactactcgggtacttttgcaattattaagagcggaaaataaattatcttatctctatgcttttgatttattccaaataatgcttagcaccttgtgttattcggtccatccaacaagcccccgggtgctaggaatcggcccaaaggcaactatccattggcaaaccaaacggaaagtataggaagatggaactccataactcgataggcacttttgtactcagaataagtcgcaagcaatcaagataaatattatgaaaattgtttaaaaaatatgatataacatctgtaacccccgactcactagtcaacggcgaaccagttgatgtagtgaggcaaaggaaaaggcaaaatatcatataaagaatgaaataaatgatgacttagctttatcgtattccctcgatgacagcaaaagtagccgatgtgggaacgaaacagtccatcaatggtgacaaaaacaccagttggcgccagtggaaccaagccagtggtgtagatgatgaagcccattaacggtggcgaagtccgccaaccgtataagcgaaaacaccagtcagtggcggcagaggcaagccggcggtgaagtcgtagacacccaacagcgacggcataataggtcagctgtgtaggcggagacaccagtcggcggcgacggaggcaggctggcggtgaagtcgtagacgtccaacaacggcggcataataggccagccgtgtaggcggagacaccagtcggcggcgacggaggcaggccggcggtgaagacgtagacgcccatgtacggtggtgtgaccaaccaaccgtatatgcgaggacaccagtcggtagcggcgaaggcaagccgattggtgattagatgatgtcacccaggaacagtggcaaagtcatgttgccacgaaggcatatatgcacaaaaaaagcaaaccaatctggttagtaccaacaaacagaatagttatagatatatagacaaatatatgctcctgttggcatgggcgattgtgttgatagcgccatgattagttgaggcgtgctgacatggattccggccgaaaccatcgctaggtgacattcatgtgacagcacaattaataactgtcacgcccagccacggacaaccggttgatcttggtcagcatatgcatacatgcaaagaaaacgattagtagattaatctgttatcaagcataaaagcatgtatataagcatatgtatatatcaatgtatggctcagagctccttgtaatcggctgctcctatatgcccctggtaatcagcaatgcttctcgcgtgaagaccgccggttaacctatgctggcgtgtagatcggtacagagcgcgaacggaattacatcagcaggacacatgaggtcgccgactgcttcgtctctcaattggcataggaacagccacaaaaaatcagaagatcgatgttaacaacccacttcttctaacttaatagcaagcatccaccatacaaggaacaattgttttgggatgaaaagagaagaagaaactaagtaatacaaattctggaagcttctagagctgagagagaaggctgtaagtaggaggagaggtaggggagagagatcgacaagggtgcccaccggctgcccaggtcgccgccgccgtcgagagcttcagctccaccaagtccaagtgatcaatcgatgcccccaaccttcctgctgctgctgcttttgttgcctctccaactgggccttcttgggctggattggaggattgttgtaacggtccaaccatagcccatccggtcctaacaatcccctctccttgaaaatcggcttgtccccaagccgatgaagcaaacctcctggatcccatgggtgctccaattcttggctgctagacagtaaaccatcgtcgaaatggaatagatcatgtacctttttgctcctgttgagctcaaaagattcagaaacttgtagagcatatttcattggagctgcaatatctttgctaaaatccatacttaattcacggttcagtacaagagcaggaattttctggacactcgaatgcacctgaatcccttctgaataaaatccttggttttctgttgagtggataccatgtccaaaaacattcacccttgtggccatagttctatgtttgttgccttctggtagatagttgttggttactgagtaggctaaattcccaggagcaacaaatgtgttcctctggataacatgctttgcccctgtctggtttctttttaatgcatcacattgtaatttctgctctgaacaaacagccatcttggtataagtcccttcagttagaattgtataatttccaaccttccattcagtagctgctagaaccaaaatccagaatattgggcatccatcacttgttacctcaagcacttttaactcacaaaaatccattccttcactaggagccatcgtgtgacaagaaacattatcatcgcccaggttcacacaactctgcatttccaacttagttaacaacaccttgtcagagccccttagatagcagctgcccttttgaactgttttagcagtcgataagccaaaggagaagtaatgtaggttcacaaacaatctagacatcttccagtgtccattacaatcattctttggcatctttctgaacttccttgtgggccatccattacaagcatatttgaatttgagtatgtgttcctctccagttcctaacttctgcatataacatgttcttactagattcgaggttacttgcaccagcttatcagatgttaattctagctgcttcaaaaaatctaaattattgccaactatgaattcagaccatactccctgacacaggaaacaataatcacccagagcctccaaagtaccttccaactctagaatcaagtcaacaatgtactgtttaggatcacacccaattggcaacttcagttcatatcttctacagcacatttcacatagtacaagtttaagccacttcttgcataataggagttgaagcaggttatagtcttcataattttcattgaggattgcataacctgagtgccacatctcaacaaaccataggtcaacaactgataataactcaccttcccttgcctcagccaaatctaattcctgtaattcaacacttgcatgtgcactgatcaggaaatgcacactgccatttcccgaaggtggaggccatggttttagatcagcccaatgcaacactttatccatcatatcagtgtgagctactccaatttcaataaatatcagtgcaagccaacttactttaattgtcggcggccaaggttgcaagatatgtactcttgtgtcataggagttgaacgtttcacaaggtactggctgcagctcacattgtaccatcatcttgtcaacgaataatctggttgctaggttgcccatggggtggacggatgctgaaacgtccttggacaccactgtcttggtttggaatgcaaccacagcttggtcattgccaccattgacgtcgaggccgaccatcgagcacatggcatgcgtctccttgaaacaaacaggggcgtcaatgttagtgttgccagtggtgccgtcagaagctaacaacaccattgatgacacagcgagggtggtgcaagtaaccggagcaactacagtgagatcgggcttggtgtcagagctagagcatatcgtcgaacacttggtgggcgtgaccttgaggaggtccttggtgacaatgtagggagcttggtccatgtcctttctgtctcctagctcccaggcagctatcggagcaagcacctcaccaatgtgacttgaattcgcagccacccaagtgatgttgttgttggagcattccgtcaaacacttggtaggcgctagaggagacggtgccatgggtggtagagatgatccagcattgagtacggcagtggtcgccttgatagaggcacccatctcctcgaagaacttgttcctattagcatctatctcgtccaacttcttcaaaattcgatcaatcttctcatcacacctacgcttggcctccatttgttcaaacttctccaatatccgatccaaagcttcatctagccatttctcctcttttttcatggtggaattgatgggaatgggctcagatatgctctgatctttcttggacatcgcaggttggcttggcgttccatcgaacagttggtgggcgctgcttggatgaaaacttccccaacccaattcctgctccctcttgcatggctgcctccccaacacctccatgacaagaatcccaatgaaccgaacggctctgataccagattgttaacaacccacttcttccaacttaatagcaagcatccaccatacaaggaacaattgttttgggatgaaaagagaagaagaaactaagtaatacaaattctggaagcttctagagctgagagagaaggctgtaagtaggaggagaggtaggggagagagatcgacaagggtgcccaccggctgcccaggtcgccgccgccgtcgagagcttcagctccaccaagtccaagtgatcaatcgatgcccccaaccttcctgctgctgctgcttttgttgcctctccaactgggccttcttgggctggattggaggattgttgtaacggtccaaccatagcccatccggtcctaacaatcgaatacgaaataaaaattaatctcataaaagtttgactggaacggcaaatctgagtggaagattaaaaccgtcgaactcattgagatgaaggttgaaaccgtcgaactcgttgagatcgatctcagcacatctctagaaattgattccatcgcacttctcgatggaaagctcgacgcaaccctacctggcgcgccactgtcgaaacatgaattcggcaataataaaagggggtagcgcacgatacctaaaagtggatggatgcagagacaaaggatttagacaggttcaggccctctcaataagaggtaataccttactcctgtttggggatttgaatccgccgggtgaattatagatctgacgatctaattgtctcatgccccctagagggcctcctgcccaccttatataggatggggggcaggattacaagataaaaaccttaaccaacacggtatcagtttcctaaatctactttacaatattaccaaaccaggactttaggccgttttgtaatatacaaggaaacgtaatacccaagtcatgatctgttacatattccatatatataagttatcccttataactagtcggataaccatgtcgtgtgggtatagggtacccataatctccacagtgcctcctcaactcggtaatcttacaaagctacaatatctcgacctttcccattgaaatggaataggtatgtactcaacagatatccaatggctcacccatctaacatcgctacggtacctaggcttatcaaatgtagatctcagcagaatatcttattggcctcgtgtcatgaacatgaatgcttatctaagggcactctatctttctcattgctctcttacaagtgcaagccaatcaattttacagttaaacttcacaagacttgaggagctcgacctctcccacaataattttaaccaacctttggcatcttgttggttttggaatttgacaagcctcaagtacctcgatctttcagggaacaatattgtaggaagtctaccggccgcggtgagcaaatttaccagtttagacactcttgatctctctgagaaccaactttttggatctgttccata

SEQ ID NO: 20999 - DNA, 4191 bp, Oryza sativa
taactgacatcaacctaagggtcaataacttgacaggtgaaatcacagagaaacacttagctggtctgaagagtttgaaaaacatagacttgtcttctaatcactacttgaagattgtggttggtcctgaatggcaacctccatttaaactagaggtggcaatatttgaatcttgtcagcttggtccaaagtttccttcgtggcttcaatggatggtggatattaaaatacttgatatttggaacacaggtataaccgatcaacttccacattagttttggacaacattttctaaggcaacaaagttagacatgtcctccaacaaaatcattggtagcttgccaacaaatatggaaaccatgtcattggaaagcctctatctaggttcaaatcaaataaccggagtaataccgaccctgccacctaacctcacctggttggagatccaaaataacatggtatcaaggattgtggcatcaaaaacctttggagctccaaacctaggttatatggatctatcctccaataacatcaaaggtcctattccaggttctatctgcgagttgcaatacttgagattcttgaatttagccaacaattatttggtgggagaatttcctcattgcattgggatgacagaagtaaattacctttttctaaataacaatagcttatctggcagggtcccatcttttttgaaaggttgcaaacagctaatgcacctagatctatcacagagtaagttccatggaagactgccaagttggattggagacttcccagcagtacgaagtctaatcctaaacaacaatgtgttatctgggcatatcccaatcaacatcaccaatctgacaaatctacaggacctggatctatcacaaaataagttccatggaagactgccaaattggattggagacctcccaaaagtacaacgtatattcctaaacaataattcattctctgggcatatcccaatcaacatcagcaatcttataaaacttactcagttgaatctagcatacaataatatttcaggcattttgccttgacagttcacattttaagaggcgacgaaggttaagcatcatgctatatataccctagataccccatgaaagattaatacagtttgtcggccagcattatcatttagctatacctgtctgctacgttaagtgcatagaaaagttagattactatactgcctacttcctccgtcccaaaaaaaatgaatatagcattagatgtgacatagtctagtacaacgaatttagacagatgtataattaaattcataatattaggatatgtcatatccagtactagattgattttttattggacggagggagtatggacttgggtttgtgctagcatttgcttttgtcctttatattgttcttttttgtgagtctagatatgccgtttcctctgtaaactaataagtgtttcttaattaattattgtattgcatctacaacttctgttttcacctatcatggaagctaaattaagactattactcttgggcacctggcagggggcaccgtattttatccctctttcacggcaccaacaactgattaaaccaaaaagattatttttccaacttaggctctgttcgtttcctggagttcccaactcccccatctcattttccgcgcgcacgcttttcaaactgctaaacggtgtgttttttgcaaaaagtttatatacgaaagttgcttaaaaaaattatattgatccatttttgaaaaaaaaattagcaaataattaattaatcatgtgctaatggactgcttcgttttccgtaccggagggatgggttcccaactcaaccaaaagaacagagccttaaacaaatgaacataccaaagcagtcaattgtggaggactcgttattcatgtcgagagatttttctggctctggctgaattcgctctgttcgcacggtccagctcttcacggagctgcccggtctctgaccgaattaatgtgctagtcaactcaacccaacggcatcgacatagtaccattcaattcggtgcatgcatacatgcatcatttcgtgctagacgccgttgctgtcggtacgtcactcacacggttgggccagaaaattaaattaaaccccattaattacagcattaagggcgaaatgcaggtagttatactccacagtccactagtcgtacgcaagaacgggtcttttaaaatgagcttaatttaaggccggtttgccgtgcgcgcacacacacacaatccatacgtgctcactgctctcctccaatcactcaaacacacatagtaagcctgtgcaccccatgaaatcatgaatcccaccggcaagccgttgctcctcctcctcctgggccttctcctgctagcaaccaccactttgtcccgagcaatccatgcgataccgtaccgaaactcggctctggtgccaccaccgtcgcttgcgtgccacgggaacgggacgcccttctggccttcaagcgagacatcactagcgaccacttaggacttctcacctcgtggaggcaagatgaccatgactgctaccggtggagaggcataacctgtagcaacctcaccggccatgtcctcaagcttcacctcagtggcatatacactaatgagcatacaggtatggaaggtttggtcggccagataagtccccagctgctctacctggatcatttagaacatcttgatctcagcattaactatttggaggggccaagcggtcaaatcccagagttcataggctctatgaagagcttgagatatctaaagctctctggcattccgttctctggtacggtgccttctcaacttggcaatctttcaaagttgcaacatctcgacctttccgacctggagggaaaggaaggtatgcacttagcggatatgtcatgggtatctcgtctaggatcattacggtaccttgatttatcctttataaatctcagcgcggcttctgattgggctcatgccgtgaacatgatcccttccattagagtactttgtttatctttatgccaacttcaaggtgcgaaccattcactcgcacactacaaccttacaaaactcgagaagcttgatctgtcctcgaactattttgaccacccgtatgcatcttgttggttctggaactcaacaatcctcaaataccttgatatttcatcgaacaatttgtatgatcagcttccaaatgcgataggacacatggcatccctcagagtcattaatttttctgataacgctcacatgggcattgtggaaccagagttgatgacgaacctatgtagtttggagaatctaaacctccaagggagcctctcctatgggaacatgacagttgctcgatagtctgtcaaattgctccaacaaattaagtgagctgaatttagcagacaataatatcagtggaactctgccacctgggatattccaacaatatgcagacttagtcactcttgacgctagcaacaatcagctcgctgggcctctgcccgttgagattggtatgctcacaggtttaaatcacctggacctgagttacaataacctggcaggtgacatcaccgaagaacactttgctaacctaaggagcttaaaatacatagacttatcgtctaatgatcccttgaatattgtggtagaccctacatggatagccccatttagattagaacgtgcatcttttccagcttgcatgatgggtcctcaatttcctacttggctccagtggtcggtggatatttggttattagaaatctcaaatactggtataaaggataagcttcctgattggttctggaccacattttcaaagctcgaagaattggacatgtctaacaaccaaataagtggtgtcttgccaacaaatatggaaaccatggcattgagttatctctatcttggttcaaaccaaataagtgagtggtcaattacctcctttaccgagaaaaattgtaaaattggacgtctccaataactctctgtctggatctctgccatctaactttggagctcaaaatcaacaaatggttacgctgattctttccttcaacaacctatctggccatattccggaatccttttgcagaatggaacagttggccgccttggacttagcaaacaatctttttgagggagaattgcctcaatgtttcgggatga

SEQ ID NO: 21000 - DNA, 1540 bp, Oryza sativa
ttatcatatttgagtgatttggatttatcacacaacaatctatcgggaagaataccatcgggatcacagcttgacaccctctattttgaacatcctgatatgtatagcagtaacgatggtcttttcggatttcctcttcaaagaaattactcggaaggaattgcaccaaagcagggctatcacgatcatagtaaaacccgacaagtagctgagccaatgttcttttaccttgggcttgtgtcaggatttgttgttggcctatgggtggtgttttgcaccatactcttcaagaagacatggaggattgcctatttctctctttttgacaaggcgtgtgacaaaatatacgtgtttactgttgttacttgggcaagagtatctcaaaagacgaatgtacaataagctaattggaaaatttgattagaacgacgtgcgtatgttggtgctgggtcacactaaaagcatctaatactctaatgtggtgtggtgtggcacagtgatgcttgtttatttaattagttctgtgtgttgtatcttaatagggattatacgatattatccttactttccattattactctgtaattttttatcataatgtttgtttctttaagttgctttactaggaacatgttatactgttttttttatcaatataaggcagattctaacgaaaagtaataactatgaaggtagccgtgcgaatgcacgggcatgcgttttaaggtgtgtgtagaaatagatgaaatatcaaccgaatggcacctaccatgtttgaaaagtactttctccggtttttaatagataaattaagttaatttttttatacatgtttgatcatttatattattcaaaaatagcaaaagtgtaattaatgcttatagtacttttgatgataaattaaaccaagtcacaataaaatgaataatattatttatttatataataaaactgaattgtcaaacatgagtaaagaagtcgacggtgtcatttattaaaaaattaaaggtagtccaagttcttcaaaatattttttatcgcattgcttatttttaaattgtttgttaatacatgtgcttatagattaatactctgtatgcctcaaatattagtatttttggactttggtgtgttacttttgactaataatatttaacatttataaaaagtaagttatttcaaacaaaacaagttaaatattatgagaatgtgtttaatgattaatttagtaaaatcatttttacgtgatcggccttttttattttgtaatgccccgattttcgcccgtcaaaaaaatctattttattaagaacctatgtttaaaacttttggttctttgagtgtatctagtttgtgtgccaaaaatctcaattaattcattccttgtcaagtcaaaattgtggccaattttttttcttttcaatatctcagaattcgaattttgtaatttgagtctcccctaaataaatcatcccaaaaatctattaccaatgtccaagttagaatttatttctttgaacctaaaaacctttattcaaat

SEQ ID NO: 21001 - DNA, 15413 bp, Oryza sativa
ccaaacaaatcattagagttcacagtccagttacaatccttttacaagttcaaaattgtttacaacccacgagcaaaacgacagcagacaagcatatccatctttttaattaagataggcattttcacgcatactcacaccgttcacccccttgcccaagcctacacccccaattccttcccccgcactccacctctctgtatcgtccctggccgagtcagccactgtgtcccatgaaacctccactccaggcgccaagacaaagaaggtaggcagcagtggggattgtatgcagtattgttgatgcactagcagacacggacccacactgctactgtatcagcagtactgcaaggatctgcatccggtaggcagcaggcagccaccgagggaagctgtgtagggagaggagaccacaggagcgagtttgtccaccgaccgcgccatccactgtacctacccgcttccgtcaactgaacagggcagctggccccgcttggccgagcttgcctgcttcaccttcgttgccacccaccggtcgtgacagctataaacgatggcatgcttttgtcccctctgtccatttccccttcctgcgaagccacggctctgcttcgccccatgtgccaccactgcctccatcccgaaccgccatggccaccgccatcgcactgatttccagccaatagtttttatggtaagtactacacggtaaattaggagggatatatttattacagatctaatctaatggtgtaaactaatgggtccaccaacttaaatgaaaatcgagggctaaattatttttttctcagaatttctaagattttttttctattttattagagtgccatgtgatagcttgaaattgtttttagagtgtcgtatggtggcatgagagcacttgtagaaagtttaatagacttttagtatataataactaggaaggtagcccgcgcattcgcgcgggcaaagcatttcttcatcatttttctactcagtattgataagatgttttgtgctttactattaatttctaagttttttgtaatttttaaaatgtgacatatggtgacttaatagcgctcggaacttttattgtcaaaaacgtggaggggcattattgtcagaaaaaaaaggtgtggatggtataatcatcatttagcagtgactaaaccttttttcctccttttttggttttttcgatgaaatacgagaaacgccaatgcaatcgatgatcatatatcgatttagctaggaaaaaaatataaatgacaaagtaactcataatcattgtattaataaattactaatttacccctaataatactggtagtataatactaccagtagataggaccggagcatcgatcttaataaaaactatacggccacttattaagagtgtttgtacatgcaggagaaaatagaaccgatgaaactgtcgttgcaagtggaacaattggtgtcatgttgctcagcgacttttgcttgctatgcatgactacttctgcttgaatactcctgcaagttatgaaatgattgttgaaattctatcaaactcttctatatttgacaaattttctaacaacttgtcaatactcaaacatatttgaaataagtggacattcaggttaaaattgaggcaaagtttatgtcacatcctgatttttgtttcaggatttataaattatttaataaattattattagaatttatattaaatgttctttaatttacaagtgaagtaaaatgtgggaaataaaatttcttaaatataaagcatggatggatttaatttttattaaattctctatgattaagtatactctctgaaattttctcggatttttcggagctcaagtcctaaatgatacaaagaacagttcagtaattatttgatcattaataatctaattatattttttaagagcttttcttggttaaaaatcctaaatatataaattgttgtttaattggaattattagaaatgattttaaaagcctagaagagaagatctaattttaatttgttaaatctcaatataaaattgggctagataaaattttattaaatactttgcttaattctataattcctagatttttctgggatttatttgagctaaggaagtatttttaataaatggaattgcatttcatgaataatttaaattgaaaaaggtttttaaaagtctcttttggctttgggccgaaagccggcccaaaacctctctttttctctctctctccccggcccagtcggcccagtccgagccgccgctctcctctctctctcgctgtcgctgacaggtggggcccacctgtcaggttcgtcttcctcgtgccgccgccgccgcccgaaaccctagcgcaagccgccgccgtctccttccaaattcggccgcgtctttccttctccggtgaaatctttagaggggaaatgatcttctcgatctcctcttccttttctcctcttcgtttggaaatcgacggatttgagctcaattcggattcgattttctcgaagtttccttcgcgtcgccggccgtcgtgggccttcgccgccgcctccttgcacctatataaggacccctggtgtctccgctacccgccgcctctctcgccttcgcccgccgtcatgtgtagcgccctagcctcgtgagcttttgcaccgccgtcgccgccgttcgtccagccgtgcgccgctgtcgctacggtcgtcgtcgtcactcgggaaggccaccgtcgggatcgcgaggtcgtcgctgtccccgtccaccgcttcacttccgccgaagaccgccggagcaccgtcgccgtcgtcgacccgatcttctccgccgctccgttctcgtcgccggcgccgtccgttgcttttccgccgcttctttggtcaccggtgagttcgccgcgccgcgctctacgtcctggtgcccttcgttctcgtcgtcgcgccgtcgtttgccggcgagcatgcgcgcccgagtcgcccgagtcgccgccggtgctgacgacatcgctgacgtcatcgctgacgtcatcgttgccgttccccgtgagccggtcgtggaccgattgatctcggccgtccgttttggatagggttgatctcggccgtccgttcccgtgaaccgtcgccgtgcacccggtccaccgcaaaccctagccgctgacgcaataatcctccttttccttttcaaaaataattcattattgcgtcataattcaattaaaatccatataagtgttttaatccgatttaatctttaaaaattcataactaattcattataactcagtttaaggtggttcaagttgcaaaagttatataaaataaagatctacatattaaaattgtccataaattgaattaaatttatttaattctttttaaatgggctttaattagatttaatcttgtaaaattcataataaattcatttgaagtcagaatgaggccgttcaagtctcataattcatctaaaattatgatctacatgtttgtttactttttatgtattgtttatttggtttttattagtctttttctttgttttgcgtgttagcttgtcgtttccgtcgttgcgaaggttcgtgagtgcgccggaagtattcaagaagattaattgaagaccgattattgcaaggcaagtcacacagatcctaaacacaatcctttgagcatgttgatcctatatttaaattctctatttatttcaactgtgcatttattttcgaatgtcactgggtggtgtaaatctattcctttgttatggcccgtttgcattgattactttatttcttgataccttgggttattataacttgactagttgggctttatatatattggttcagctagatattagttatgattgcttagccatgcttagaaacattagcacactattgggataacttatgactcattattatttaatgatggcttaatgatagttcacgatggttaatcgtgattggttaattaattacttgccaactaaaacttgataacggtgggttgtgagcacatggttttgagagtcgtgctcatgacaattaaggaccggttcgcgagctactgttgtgaaacattaatcgtgccaaccacaagccagcgtgggcaacggctttaccttttatataacatggttcattgcggagcaccagactgagaagtggcggagataagcccacgggggtcgctggggagtccatgccttgttttataagggggtgattatgatccaggaatggtgcactgtggtgagttgtgttgtgcgaagggtattgtcacgatttccccctttgcagtgccgtggtggtacttcggggcatggcaacatgtgtgaaatcgtgtcttgtgggtacagtggtacacctctggccagagtaaaactattcgaatagccgtgcccgcggttatgggcgggttgagcaatgtttttcgtgattagtctcacacctctcacaataattatagatgttatacctggtaataatttgcttagctcctggtttggagattagatctgtacagccgggtatggttgttcaggatggttgggcctgtgcagcatgggtatgctgttcggtgttgattaaaatttctgattaattactccactgttttacttctcttaaatgttttgctaaatgctgcttttgcaaatgagccaatattatgccatcctttggtatccttgtgcacttgcatatttgctgtgtggcttgctgagtatgtcatatgctcaccttgcaataatcaatcaacctcagttgaagaaaaaggatccagaaggagaagacgtttggcttataccccagttgagctgtctgtgggagtggagccggagcttcgctagattttattttccgctgcagttttcttcttggtgaggactaagtgcctcttaagtaagtatttatcgttttagtaaatttgatgaatctgtatattaaattgtcagtttgtgtacctcggctgattcctggacgaggattttatgcacaaataagttcggaaattactagtgaatttccgggcgtgacagtttatgtcaaaacgcttggtataaaaagaagggaaaatataactagtgtagaaaagtaagggaaaaatataactagtttagaaaagtaagataacccttaggatgatttaacagaccggagatagacctaagcttgctttcgtttgaaaacatgatgccattcccagtgggaggtgtcacttttacgttttcaatggtgtcacataagtaacaagacatttaattgatgattaaaatagctcatactcccttctttcacacaagttagacatataacttttgtgaccaagatcatgtagacattaacttatcttacatgtaacaaagatatacacgcatgcaaccaatgagtattaagattactcctcgggttttaatcatcaaacatttaatttacctctccatttaagttttggattcatacatagaataacttttttggaaaaactaaataaaatatgaaatatatctaactcttgtggacggagagagtactataatacggttttatttttgttgttttataggtagtacatgcaagatacaaaccgtgtagacattattttatttcatacttcattaattttttaccacactatgaaaatattgatacgacaccctatttaatgagaatgaaacttccactaaaaatggcctaaaaagaagtggtaaaagcataaccactcttaaaaataggaaacataggagttgaggtcctctgcattgaaaaagaaaatgcagagatgctacagtacctttcattgacgcatggtttaatctgttggatcttcatcgaatggtacaaaccatcttgctataatacctcactacagtaaaaaatacccaacagtatggattactgttagaatactgtctctagtgtgctaatagaaatcactgtagcgcgagactcggatcactgtgcaaacagtgtcctcttccgttactgtaaaggacctgcatccgtaacatagttgcccacgccaccggaccgctgtaatccccagctgccttaaaagttaaaattagcagcttgaggcctggagtgtatgctctcctgcgtgatgcttgcaacttgtgcatgaccgagatcgaccgatcgaggccctttggaactgaataagttatcccatccaaatgaactaagtcaagtcaactaagtcaagtcaacgatccaacttgtacttgccaaataatgggcatctcatctcgatcggccaatgcaaagccgtcgatcgtatcagtcacggtgcgcagtagggccaactgataattaaaccgacggacgatgactcagtcacacaagaaccagtccacccgaggatttaagttctaaatcggacagcaagatgtctgatgaatttattaatcttaagatataatggtcgctgatgactttattaatcttaagatgtaatggttcaatgtctcatatgtgcttataatggtaggttgtacgtacgtgcgtttgtgggcacatgtgttcctactgtgtttttaaaagggaaaaaaaatattggtcttactaaaactgaatatgacatatcttaatacaataaatttgaatagcaattggtatatgtcatatctggttttagatttattttttgtgacatagggagtacttttttttttgcgggggacatagggagtacttaacaagagctgcatggctgcatatccgcttgcttccacagttccacttgcatcttggagccattcacacgctcccaccatgcatcccaagtcatcctgctgttcttcctcatgatcggagcattgctcaccaatgccatggcaaaccatgcaccggctccagccgccgtcaactgcgtgccacgagagagggaagccctgctgccttcaagcgaggcatcactggcgaccccgcagggcgcctcgcctcgtggaaggaagacgaccatgactgctgccggtggaggggcgttaggtgcagcgacaacctcatcggtcatgtcctcgagctccacctccagagtaacctcaccggtgttgtttatgtagattatagccctttggagttcaacgcggtagctttggtcggccggataacgtcttctttgctttctctggagcatctagagcaccttgacctcagcaacaacaacctcacggggccggatggccgtttcccggtgtttgtggcctcccttcgcaacctacaatatcttgatctctctggtttgggattcactggtatggtgccatatcagcttggtaacctttcaaagctggaatttcttgacctttcgggaacaggtatgcaatcagcagatatatcatggctaacacgtctacaatggttgaagtacctttacttgtcatcagtaaatcttagcgcgatatctgattgggctcatgtagtaaacaagatcccatcactaacggtgctttctctctctggttgctcacttacacgtgtagaccactcgctcaaacacgtaaacctcactagacttgagaagctccatctctctggcaacgattttagccaccctttgtcatcttgctggttttggatcttgaaaaccctcatctacctcgaccttgaatcaaccggtttatatggtcgatttccaaatgcaataaccaacatgacgtccctccaggtcttggatttttcaagaaacaataatgcgggtattttggaaccaattctgctaaggaacctttgcaacttagaaagtctgaaccttcaattgggcctcttgtctggtaacatgacagagctgctagagagtttgagtcattgctcaccaaacaaattgcggaaattatatttgtccaacaacaatattacgggaactctaccagctcagagtatgggccaatttaccagcttagccaatattggtttctctttcaaccagctcacagggcacgtgcctcctgagattggtaaactagctagtttgactcaccttgacctaagtgaaaataaattaacaggaaccatcacagatgaacacttcggtggtctagtgagcttaacatacattgatttatcttacaacaaactcaagattgttatagaccctgaatggttaccaccatttaggcttgaaactgcgtattttgcatcttgtcaaatgggtcctctgtttcctgcctggctccggtggtcatccgacattgatatgattgatatttcaagcgctaatataatagacgagtttccagattgggtctctacagcattttcaaaggccatatatttggacatgtctaataacaaaatcagcggtaacctgccaaaaaatatgaaaatcatgtctctggaagaactctatctaaattcaaacagaataatcggtgaagtaccaacgttgccgacaaacctcacctatttggacatctcaaataacatactatcagggcttgtcgcatcaaacttcggagcgccaagactagatactatgaatctatcctcaaacagcatccaaggccagattccaagttcgatttgcaggttgaaatatttgagcaccttggatttatccaacaatcttttgaacgggaaacttcctcgatgcattgggatgagaaatcttcagaagcttctactaagtaataataacttatctggcacattcccatctttactgcaaggctgcacactgctacgttatatagacctatcatggaataggttttatggaagattaccgagttggattggagacttccaagaattagtttctctacaactgaggaacaatactttttcttggtaatgttctttcactgaacatagcaagaattactctatgtatatgttaggtgcctcaaggaaagtagtcgtattcagaggtacagcagcgttgatgagaatgccgtgccatgttcaatgatgaggatcaaactgcttatctggtttgggcctcctgaaaatacttgcatcaaagcaactatataataaagttagaggtctgtcagtaaccttctgcaatggagctcaagcttggtataatatttgctattgtcttccttattcgttgatgtccgttgttagtttctattgtaagttagctgttaatacatgtacaccttttgtctggtggtggtgtgaaaggagaaagaacaagatgttgagccactgaagagatttgctctggtcaagcgaaaagtatctcacggtacctcaatgcactttgagaccaaagatagtatcgtctctcctacctctgcagttcggctgccagcgcagttggaataatttctcgtttactagagttattcttcctcttctaaggaaatattagaaactaaattatatatctaaccttttctagttagcacatggcccatacttttaagtacctttccgtaggtatcttttattatagttttttaaaaaaaaataaaacatttttattgaatttgaataaattataaccaaattcacaaatatttgaaaaaaatccaaaaattttgctcgaaatatttgcttgccagaggaggggggtgaaatttccatccctgcacctcccttgcgcactgctctcctcacaagagctagctctgtgaggctttcggctaaggggacgaaaactggagattgccaggaagagaagaagcaagaagagaacatgaaggaggaggagagggaagaaggggtgctgaatgccatgccactatggatgggaggctgagtcagtgtgccaacatacattcagcgccatgctatttggcactgaggtatctaaattcagcaccacacgatttggcgttgaacaaaagggtcagtttttaaataagttttgacggcggttcacttgtaaaattagtttttgcaaagggtcaaattgtcaaaatttgtgtgctactcaaaatttgtcaaaatttagctagataataccccgcgcgttgctgtagtaataattgagaaatttcaaattttcaacatgagcatagaaatatttgagtagaaagaaaactactccaatataattaacttcctaaaaactttattgtagtaatagtaattatagattatatgatgaggtaccttgttaagccgctgatcggatagagctagtactggaaacaacaaaattaaaggatgttcactcagtactgaagaatgaaaaatatacaccatcaataacattatccagaattatatgtttaatttctatatgaactaattaagcctgaaaggataggtgttgtactgggattgattttctcgttgacttgatagccttgtattttgcatgatatcattccatggtacaaccctccctcaccgatccatttagcacagttttagaacctctgcagttaatcttgtaatagaatgccaatcagttcatgaataaggtgctagaataacatattttactatggtaagaaatatgcatttagcaggaagtacaactatcatataaatacgccaggaatgtgcagtcaaggcatgtatcaaacctggactatgattaccatacaattaaaaaaataacaaccataactaaaaaaactaccattttatatttatacatgtacatagatagtccaatctatctattatatactaaaagttcattaaactttctaaaaatactctcaagacaccacatggcttactacaaacgctcctaagtcaccacgtggcgctctaataaattagaaaaaatcctagaaattttaagaaaaaagaaaaacatcccgccattggttttcacttaaatcagtggacccattatttttaaccattggattaattttaaaagaatatatatatactcaatccaacctatgggtttatacttctaacgttccccctcagtcataatgggagcgaagcgaatgattgtgactggatttaaaatcttctatttcttcatctttttcgactcaccatcatcgattgcatctctgacggatggtcctccacctggtgcctgtgtccccttctgtgtcgtcccttaactctcctctttttttgttagaagtatagatgttagttagagataagagtcatatacaaatatagagataaaatatatcctagagataagatagagtcctagagatagaatcctggagataaatctactcttacttgtattatactctaagtctctatctcctatgtactcctatatataccctatgagagggtcgatgtaatagatcagaaaacatcaaaatacaacatattaaatttttacgcatggtatcagagccttagagactaatgtcggtcgatccccgcatcaccctggggagatgagatcaatcctataatctcattggggtgccacatctttagatgccacaaataatccatagattagattttactaggattagattagatcaattccttcattagctacatagaacctaccaatcctcccgatcagatcaggaaccttgtcaacaacacaaccgtcttcgctgatcctacatcactagtagtcttcatcaacttgctgccgccaacttgtccacatagatggacaactcgcgtcctctacgacggcaacgaccgcgacaccgatggcattgatcacatcatctataatgacaacgactacatcaacactgcatcaccattgtgatgactgccacacagcacagaaggaccaaccaaattggtggcctcatcgccaacgacatcctctgatatatgcaagacgtcctcaatagcattcttctgacatctataagatgcaagatgctaataattacattttcgtcttcacaccatggcgtaaatttttttttcgcctttgactatgtgtggctacacctacaatcacggctactgcatgatcggttacatcgactaatgtctacaacaaaaatcattgatggcaactccagtcaaagcgtcagtgttatcgctatcgtccatgacactcccgctatgattgcggaagggaatagaggagagtcacgggacgacacagaagtggacgcaggcaccaagtggaggtctgtccattagatatgcaatcgatgatggtgagtagaaaaagatgaagaaatagaagattttaaatccaatcgcaatcgttcgcttcactccattatgactgaggggaaatattagaagtatagatgttagttagagataagagtcaaatacaaatatagagataagatagagtcctagagatagaaccctagagataaatctactcttacttgcagtgtattctaagtctatatctcctatgtactcatatatacgtatataccccatgagagggtcggtgtaatatatcagaaaacatcagaatataatatatattatatttttccacatgatggacctccacacgtcacagatgagttacgttattactaaccactgatctgtgatgaggggtctacccgtcacagatgagggattaagcccgtcacagctattttgttctggcgtagtgtaccgcggccagtctcacgaagatcaccactaaatgtgcatcctccatgtgcagcacgacggcggtggcggaggcggcggcgctagcccatgacgctgagatcgaggtgcgcgggattcttggcaacaacgtgaagaccaacttcaaaattctttttaaaatataccttttttttattggttttgtataaatatgctcatctctactactttaaaattttatagtggtggcggtgactccaaccctaacagacacgtgtgatattatccgttggatcgggacatcggacggtgctgagatcccatcgcacgcgattcacttttcttccctcccccgcatcgcgcgtgtggctccgtcgcgtctcagccggcccacgcacggctccgccgcctccgtcggccccgcgcacccgccggcgcacgcgtggctccgtcgccgccaatggccgcgcaagcctgcgccgcgtccaccacctccgtcggccccgcgcacccgcgcgtctccgccgactcccgtggacccgcgaggctccgtcgcctccgcgtgatcccgcgcgcctccgccgactcggtagcggctcccccggctccgctgcctccgcgcgggcaagccccgcggtcccctttgttgcgagttgccatccccgcgtcgacagcggccgaagcggtttccggccccgtgtggttcggttgcatgcacatgcacttgattcccatcctgcgagtgtaagtgacatgcacgggcgcatgctgcatgcatgtgcatggcactgttcatgaggaaaaaaaaggaggaagaagaagaagaaggagaaaaggagacaagaaagacagcacgacttaatggctgcggaagcggttccgtgtcgtgcgtaatcgctaagcggcctacgccggcctcgctgcgtgaagccgcccccgcgcatacgaccaagactccgcgggcgacaccctccgccgactcacgcccggcgctggccccgtgtggcgcgttttgcctccggctcggccccttccgccggaccacgtcacgacacagaggctcgcgcccggcggactccacagtccttccgctggccccggacagctccgccggtcacgccggccttaaaagccaagctccaccggccacacgcggcttcgcgcggcacccccggcactcgccttcgcacactccggacggcgctgcctccgtcgagcaccgcggctttcaccgctagagggggtggactgaccttcatttctagcgggctccggacggtggtacctccgtcgagcaccgcggctttcaccactagatggggtggaccggactccacatctcaagagctcaagatggcgccgccttttcagtgtggtctttgctgagcgtgagggtatccgatgcaaaatgcaggcatagatcaacaccctaagaaacaggggctggaaatcatctgctcccccgaacctcggagtcagcagatgagggggtaatgttggggaataactccatacttaaggtgttgtataaactaatgtataaaagattaaaatacccctaggagaatgttgtatatatgtagccaatcaagggtaaagatgtaatttcccgttacatatgaataaaaggagtcctgcaaaggcaagagagagggatctctcccacattccatcgattctctttctctcttcattcactcttgttgtcctcacagggctaagcttgggggatcctcacagggctaagcttgggggatgctctagccatacatgttggattttgttccaacacctacattgttatattgttcaatatatataaagaatatcatttcacctttttatgtaatatataaacgatatactttattaaacccgttgcaacgcacgggcacctaactagtttagaaaatatttacagaaatataccgttgttgccaaggatcctgcgcacctcgatcgatcggcgtcgtgggctagcgcctccgcctccgccgtgtgctagctctgccgatccataagcagcagcccccgcaacccagctccctggaaaccatgcttgctcaatgccagctggccaattttttcaccttgtcaggacacctgccgctgctatccttacagccacgcagtggtggacactcatcgacggcgcggaagggatcgcctcctttcacggtgctgatggttggggatgggaaacactccatatcacaattcttgtttttttagaagggtaagtatcttctacaggacggcctttacatcgatccaacaggatatatatagtcttttttaaattaggaacttatattagcctatgaagtagggaacttagccctcaaataactttttttagataatggaaatggattacatctccggcttctgtcataagacacatagccataagtttaatagtaataaaaagataaaggtaagattaaatcaaaatgagaaataaggtgatgggacaaatacccaacttccctttattattgactagagttaaaccaatttttagctagcaattataatggaactacgccacccatagtggaataagagaccctttggctaccgattacaagagtatagcaccattgcacataatttcctgctcctcctgtagtagcatcgtaaccaaaagtggagccagtagaaagacatgaagataacctgcatagggttagataattgtttaccattaaaaactttatcattacgacaacgccaaattgaccaacatacaacactagctccaattagaatcatcttcttaatggacctagatacctctctaagccaattaccgaaaatgtttttggcgttacggggtaggggatattaaaagcaaaaaacacacatctccaaacaaactgagcgacatgacactcaaagaaaagatgttggattgtctcttgtgcatagcagaaagaataatgtttgcccccccc

SEQ ID NO: 21002 - DNA, 12844 bp, Oryza sativa
ataaagctagcatatatctcgattcatttatgaatcaattaaaaccctaaaatattttatattgtgaaatagatgaagtaattaacaacatatttgcgggcacattcgcagatcatgaaacaatttcttcgcccaattgccactgtggacggagacgtgatcgggactagtatttttttaaaaaaaatcgtaagttacatattttctgtgggcctgttccggtcaatgtcacaaatgttaagtatgcatgcttaggtgcatatgaatctaagaattaattacggcgataccttatatattgtgattcattagatcattaagcttcctttagaaagaaaaataataaagagcagaacaatagagaaaatacccgttgtactatggctgtatatatcatagtgcagtcctcaaggagctaatccctgttccgtgtgaaatgctgggtacttctgaaattgaatcggagctggagttgtagatcgataagaatgccgctccacatcacaagttcaattttctagagcgatccggtctgatcggctccatatttttgtgaagttagatcgtttggttggattctagctctaggaaatatgaatctaggagctggagttctgtcaagtagacccgttgttcagtccgattggatgggccgcacgcgtcatgcaatcccgctttggcccaaccatatatgtggggacatgcacgtcccagacagtcgtgatccggcccaaatgttatgggcatttcaaatgaatccctgtattgacccaatgagctacataattatttcggtcttcagacttctaaagcttaaaattaaggttaaatactcatttaacgctatatgtacaagtaccgtgcatgccgattttctagttggactaacttttggttaaaatcttcctagacagaattacaccttataaaaatcatcttgtttggcaggcaaccaaaacacagctttctatggaaagctgcactcagctaggaaagcatcaagcatgcactcaagatatatcggcctaattaatactccctcctttttaatgtatgacgccgttaactttttaatcaacgtttgaccactcgtcttattcaaaatttttatgcaaatataaaaatacttatgttatgcttaaagaacatttgatgataaatcaaatcataataaaataaaatacaattacataatttttttaaataagatgaaaggtcaaacgtttgttaaaaagtcaacggcgtcatacattaaaataaaatacggagggagtagtatatcttccaaagtatttataagggtatggtaaggtacatgtatgtgtgtgcgtgtttatatgagtatcgtgtctatttaaataataataatatatctgcgtatgccatggggctcatggccatggatttatcaaggtataccaaccctagtcaagtctagcactttgtgcgtatgtaaagcgtcaacaaagcaaaaccactgccatcaggcgcagtgcctaaatacaataaggttattttactatagaaaagcacagctgtgggtgagtaactattggtgccaagtaagtgaagagacctgtgagtgagtcaacaagagtcaagagacatgtatacatatatgtgggtcaacgtagcgcccgttccgtcgtggcgcctagcgggaaaattatcttttaaaaaccctaattgcgaaattatttcttgcttgttgtctagtgtccgtgccatctcaagatctcaaatccccgatctatcgtcgagttcaatcccgaatccaaatccttccaaatcaatttctccgcaaaagtctattttgcctcccccagggtcgatgggccaaatttctctcggcccatctccccccttcctgccggctatctctctctctctctccctctccccctccccctccgctccgcccgcgcaccgcgcgcgcgtgcgcgtgagccgccgagccgagccctcctcttcgctccctcgctgctgctccccgcgcgtcgttcgcacgcgcgcccgcgtggtcgtcgcccgcgtcgcgcctgcgccgtctgcgccgcccggccccgctgctctgccgcgcctgcagccgctcggccccgcagccagcgcgcgtgcccgagccgcgccgctcaatccaccgcgcctcccgttgccccccgcgcgcgcgtgccgtggtggccgaccgcttggtcgccgcagccgtcaccctgtgccgcgcctgtcgctcgtgtcgccgctccgctccaaaccgtcccgccgtcatcgctgtcgtcatcgcctcggccccgccactccgcgcgcaagccaccaagggacggaggcagagcccctcctccctctgccgcgacgccccgctcccctcctccttttcccaaagcggcaaggaggcaaacccctttctctccctccttttcccctttttctcccgctggcgtcatcctccctccgtcctgtcgccgatttggccgcgagcgccgagcgccagctcgcgccttgaccgcccaaagtcggtttccaaaccgacattgccgcccttaaaagccccaggcgccctcccttcctcttcccccccccttcctccccgtttctcatctgcgccattgccgccgcccccgtgctctgttcgccgtcgccgttcgtcgttgcgcgtgtcggaggagccggcacgagcaaggacgcggaaggggactccgggcgcgccctctccttcctcttccccggcccgaggccggagagattactcccgcgccgtcggcctctcgtcactgcgcccgcccgcacggtagagcatctccccgttctccctcctcgctcagcgtagctccgcccaatccgacgctagcatcggattcccgtagccgcgtagatgctctcgccgccgggaattggcccctcgtgacctcgtcgtcgtttcccccttttccctccgccgggcgccgccgccacaatccgccgccgacggactccctccggcgaatccgagctattggctcgtctcccctcgtcttgtgcaactacccggtgtgctcgctttcgcctgtatcgccatggttcgctccgccgctcgccgctgtcgtccgccgtccgttccagccggcgtcgtcgtctacctcccgccggcccgcgtggcagctacgtaggcgccacgtcggcgccagtcagccaaagacctggtcgagccgaccccggtcagtccatccccgtgcgcgcgttccaccgcgagccgtgaggctacgcgtgggcccgccgcatccgcgtcctccgtgaaccgcgcgcgtgcaccgcgtccctcccccaccctagcgccgcgccgcgtgctccctccgcacggtgaaccgtgtcaccgacaagcgggtcccacccgggaccacgcgtggtgagtccggtccaccggcgctctctctctcctcccctcccgcgtgcgcgcgtcttgggtcgccttgggccggccagcccatttagctcgaccgtaccgctccatttctcttgggccgcgccctagccgcccgagaaaagtctatattcccttcctcttttcttttcttttcttttcttttccaaaaaggatttaattaaatccttttcctttagaccaaaaatccaataatcttagaaattcaatatcttcccaaccgtaaatccgtttgactccgttcaacttccaaaattcctcaaatctcgagatctatctaatggcacgcttagaggtcattaatagggctttattttcgccgtttgttgagttgtcccgtttcacgtgtagtttcggagcccgaagacccgcagtgcgaggatttcgaggatcaagctccagatctcgagcaaggcaagccacctttgaacatcttgagcctatatttgaaatttaattatgttgcttgaaaaatattatgcattgataggatcgcacttaatctgtagtcccgtctgcaaggcagatcggcggacttacctaatttgttgcatttgatccttcctttgctaattgatataccatgtccccttgtaaccatctagttgcgtctcggtattcgtgcaccctgtgcgagtatcgacggacgccttcaaacttaaaattctgagtaacttcttgggtaaaacttgggttttacaaaagacttggaaaacccgacacctgggtcggtgcttgcgaactaaatgaatttccaaaaccgcggaccggggaacgtaccgggtgtacggtttcccgctcttgcacttaaggaccgattccttggaatttcatccaaacataagtcaagtacgaccacatgggtggaatgggacacccctggctgagtaactagcttatcaggggagccttgatgccgagagacatgtggattcgccggggtggtgtcggggaggactcctgggcttcctggcatagtatggtctgggacctaacctgttgttggtctgggacccctctcgtcggcatatggtaaacctttgttggctttcgaaatgccttgtcatgaaagcttggaggtctcccgacgtggctgatccccacgggctgggtgatccgggttagtaatgtcgtgtgggtaaagtgtaccccctctgcagaggttaacaaactgttcgaacagccgtgcccacggtcatgggcggaggtgaggtgattcctagcgtagttttgattgactactgcttgtgaaattgctgttgtggaaaagggttcgatgattgaaaaatctgtagctgatggaattagctaggcccgggtggccgtttgaaagttgttggcccgggtggccgtttgaaaagctgttggccgggtgccaaccttgattcaaatctaaagactgatacattgcacatactccgaccggacgagacgcactgtctcatccgtgtcgtttgagaagcactcacttagttgacttcagaaagagttcaaatgaaatcaattgcaaaaacaacagcctttccttgaagcctgcaataaacacctatttcccatggcttgctgagtactcctgtactcacccttgctctatataaataaatcccccccagttgctgaagaagatgaagcggatcccgctgatgaggagttcttccaggagcaagccggctacgatgagttttagggtttcggcctagttcccaagtcgcgcctgtgttgtttggtccaagtcctggcttccgtttcccttttgtaatgcagttgtgagctcgggatctgtccgcagcccaacatgactgtacctctactctataataaagagacctcggttgctgtgataatctgtcttcctgtgataccagcactgttttctgggactggtatcgatttacaggttaatttggagcgtcacgggctagttccggtcggtactagttcggggcgtgacagtcaataacagggagttatggcaaatgatgattttgttgatctcaacatatgttgacagttttctagagatgctcatatatatgaataggatgtgtgtgtagtcatagagatgagtaaggtggtgtttgaagtgtttcatgcaaaacgaggtggtaataacatgtgattaattgagttttaattgatacaaacttgaaaatggattgatctgatattttagaacaacttttatatagaaagttttcgcatgaaacgcattgattaacagtttggaaagtgtgccacgaatatctaaaactttatccactctctgtagtagaaacaacgaagccaagcgtctgcatttatattatgtttctaaaaaataatttgaaaccttgactataaatttttaaataacaaattgtttgcatagatcaatttgtcttaaaagtattatcacaatatcataaatgtagtatatttcatatacttattttcatataaaatagatctaagtttgacaaaacaaatcactactacaaaaccatctttcgtggcggccattttaggttttcgctagcagaatttggtaccgccataaaccaaaagccagtgaagatcaagatcttaagccagctgccagcaaagatccattttcgctggcggttggattaagacggccgccagcgaaaataaattatcgctagcggctgtgttaaatcggccgccagtgaaaatctattttgggccaaaaaaaaatacccatgcagctgcccagccgcaagcgtagatgatttggagaaaagcccattgattcattttcaaaattcaaatccacatctagagatctagattcgatgctcatttccaaattcaaacatgaaatacaaaatcatcatttacacagatcaaacatcatttacacagattaaaacatgtgcatcatctggaacaacatgcaaaaaaaaaattcaaatcgaagaggagggagctgggagcatggtcaggacggcgtcatggtcggagaggagggagccgggagcatagtcgacggcgtcgaggtcagtgccgccctccccgtggtccggcggtggcggatccggcctccccgcggcctggtggcggcggatccgtcctccccgaggcctggcggtggtggatccggcctccccgcccgcgcccaagcgctgccgcccgcgcccgaactcgtcgccaccttcgctgcgcagtcctccgtcacccggcgctggaggattggaggaagagagggttggagggagagagggagtggagaaaggaggaggagagatagcataaggacaaggctggtgtgggggcggtcattttatagcgttaaattttatttcgctgacggtgttgttacatgccgccagcgaaaatcggacgccagcgaaaacccgatttttttatgacgggcctcttagcgccgccaccataaaatagagctgttttttgtgacgggcctcttagcgtggctgccagcgaaaaccgattttcgctggcggtccgtaacccctcacctctcgttacatttttcgtgacggtttttgcctataaccgccagcgaaaattatagggcaacaccataaaaaatctttttttatagtgaattaacccaatcttatcctaaacggcaaatatttatgaactgattttttggatggttctactaagatgcaaatcgaccatacaaaaccacaaaaaagcacgtccatcttgcatttcatgtttagcatttaacttaacaaattttctacaacaacacacggggatttaacaattatcttgtaaaattgatccaaccaagtgtagttgttgatatttcctttttttttataatacagaaccacttatattgaattaattattcactactacaaaagtgatttttctgtacgagaccccttcatttttgcaaacagaccataactagtggcgtctgcaaaaatcaagcggcattttcgcagcggctccttaagacgcccgtatggaaaaatcacatatcttacaaaatttatatatatctctcttatagtttataaaacaatataagagatatgtacattttgtgaacaatcttacaaatcactttgttggatgaagaaatgaccaaaataaaagttatcgatttcgatgagttatacaactttgttatagaagaattttccatttgaaatcatttagtatttgaaaatgttgtttgaaattgtcatcatttgaaattcaaattcaaactgtcgaaacaaagtcatatagaaaaatgaccaaaacaaaagttgtagatcttgataagttatacaactttgttgttggcaatttttttcatttcaaatcatgtactacccgaaaaattatttgaatttcctatattttaaaatttaaattttatatagttcaatcaaactcggatcgcgaaatgaccaacagaaaaattgtagatctcaatgagttctacaactttgcttttgacaactttttcacatgagttcatttagcatctgaaaattcgactcgaagtttatttagtaccaaattaatatttttaataattattttcgcatgcggacggttatgtggtccgcatgtaaaactgccggcattttttcactcctcctctctctctttccctcctcaccatttcaaaatttttcaaccaccccatttaatttctctctctctctttatctcctctctctccctctctctttctctcctctcctctcctctctctttcttctctcctctcttctcatcgacagcgggcatgggtgcacggcgatggcgtcggcgggcagcgagggcgaaggatctggtggcgccgtcctcgggagggccaatccgtcaccctagggaggagctcagcgctcgacggcggacggcgggcggcgggcacggtgatggcctgcggcggcggatccggcggcgccgtccttgggagggccagatccgccgccctagggaggagctcggcactcggcggtggatctggggtcggcggtggcagcggtggtctcgggcgacggcggcagcggcggtcttgggcagctggcgacgaacggtggcggcggatctgattggagcggatccggcggcgccgtcctcgggagggccagatctgccgccctacggtggagctcgacgctcggcggtggatctgggggcggcggtggcagcgacggtctcgggcggtggcggcggcggtctcagcggctggcgatggcgacggcgatggcgatgacgagagcagaagcggcggctgtgacgatctcgcgtgggcggtggcgctaggttttttttcgtttttttatttttggaaatttttttcgcgattttttctctttgcatgcggtcggcttaagcgcccacatgcgaaaatccgattttcgcatgcgggtgccctggccgcatgcaaagatttgcatttttgcagacgatttggcgcatgcagttggcgcaactgcatgtgaaaatcgctccggcccgtttgcgaaaacggtttctgtagtagttattgagcaatcaaatttcatgtaaaaccctaggtattatagtttttgttgcaaaaaatcatagaaattttagcatgtgatagataaccacatgcaggtatagtttcacaaaatcatgctattaatcatttgttctttgattcatgatacttctgaaatcaaaaatcaaatctcaaatttatggtttattcgatccatcacataagttttagcctctaaggtatgctttttttatttttctacaataacaaattaaatttgattaacatttttgtttttcaaactataaaatcatgatactcgggatttatgcgtcacttgtggctttgctaacttgtaccataatacgcgcgtaggtttatgaaatacgtaccctttgatggatggttgacctagggtttttgttagatgacagattgacagtccttgtttttaaatactatacataattgtttgtagcatttagatagtttatctaagtacatacagaccgcaaaaaggctattagacgagagcgagactaatccgctagccatgacacagacagtgtcagctgtttttgaaacttactaaagttgagctatagtgcgttgggtaaaaaaaaaaaagcatttgtgcctccagctttattctatacgtatacgacgactgtgtgtgtattattattaaagttgacctactacggggggtgtttagattcagtggtgtaaagttttaacgtgtcacatcggatattatatatggtgtcgctgaggtgttcgtgtactaaaacaaaaactaattatagattccgtcagtaaaccgcaagacaaatttattaaacctaattaatccgtcattagcaaatgtttactgtacgtagcaccatattatcaaatcatggagcaattaggcttaaaagattcgtctcgcaaaataattatttttaggctatatttaatactttatacatgtgttcaaacatttcatgtgacagggtgaaaaaattttggttggaatctaaacagggcctacatacctaaacaaaaacttgagccaacagttttttttcaagaataatcatttttacctctatatatattgtgactttcatgatccaagctagcctacccagtatccaccatggatcctacacagaagttccttctcttcctcctcgttggagtagccgccaccttgtcccttgcaaccaattcaccggtgccgcagtggccagccagctgcacgccacgggagagggaggccttgctggccttcaagcgaggcatcaccggtgatcccgcaggtcgtctcacctcgtggaagcgaggtagccatgactgctgccagtggaggggcgtccggtgcagcaacctcaccggccatgtccttgagctccaccttcggaataacttcccgcgatacgacgaagcaacagctttggtggggcacataagtacttctctgatctctctcgagcacctagagcaccttgacctcagcaataacaatctcgtgggtccagccggccgattcccgcggttcgtcagctctctcaggaacctgatatatattaacttctctggtatgccattaacaggtatggtgccgcctcaactcggtaatattacaaagctgcaatatctcgacctttcccatggaataggtatgtactcaacagatatacagtggctcaccaatctaccagccctaaggtacctaggcttatcaaatgtaaacctcagcagagtatctgactggcctcgtgtggtgaacatgaattcatatctaatagtactcgatctttctggttgctctcttacaagtgcaagccaatcattctcacagttaaacctcacaagactcgagaagctcgacctctcctacaataattttaaccaacctttggcatcttgttggttttggaatttgacaagtctcacgtaccttgatcttataatgaacattttgcccggtcagtttccagattcactaggagacatgaaggccctccaggtcttcagattctcgagtaatggtcacagtatcataatgccaaacttgctacaaaacctatgcaatttagaaatcttagaccttggaggcctaagttcctgcaacataacagagcttctcgatagtttgatgcattgcttaaccaaaagaatacggaaactatatttgtgggacaacaatatcactggaactctgccaactggggtgggcaaatttactagtttggacactcttgatctctctcataaccaactgactggatctgttccatatgagattagcatgctgactagtttggctaagatcgacctaagcctcaataacctgacaggtgaaatcacagaggaacacttagctggcttaaagagtttaaaaagcttaaacttgtattataatccctacttgaagattgtgcttggtgatgaatggttaccgccctttagactagaggtggcgagatttggatcttgtcagctaggtccaatgtttccttcgtggcttcaatggatggtgaatattaaagaacttgatatttggagcacaggtataaccgatcaacttccacattggttttggacaacattttctaaggcaacagacttagtcatatcctccaacaatatcagtggtagcttgccagcaaatatggaaaccatgtcactagaaagactctatttaggttcaaatcaaataaccggtgtaataccaatcctgccacctaacctcacctggttggagatccaaaataacatgctatcagggtctgtggcatcaaaaacctttggatcagctccacaactaggttttatggatctatcctccaacaacatcaaaggtcatattccaggttctatctgcgagttgcagcacttgcaatacttgaatttagccaacaatcatttggagggagaatttcctcaatgcattgggatgacagaactacagcattttatcctaaataacaatagcttatccggcaaggtcccgtcttttctgaaaggttgcaagcagctaaagtacctggatctatcacagaataagttccatggaagattgccaagttgaattggaaacttctcagaagtacaaattctaatcctaaacaacaattcgttctctgggcatatcccaaccagcatcaccaatcttgcaaaacttgctcggttgaatctggcaaacaataatatatcaggcgtcttgccttgacagttcacattttcagaggcaaggcgacaaagagaaagcgtcatgttatatatacccttgatacccccatggaagattaatactacagtttgtatgtcggcattgtcgttgaactacttgtatgctatgttaactgcagagaaaagttagatttccatctactacctacagtcttgggcttgtgctagcatttgccgttgtcctttatattgttcccatccatatgttgtttcctctgtaaactactaataagtgttgcttaattattgtaatgaatgtagaccttttctcacttctcattgaaactaaattaagactatggatggtaatgggctgatggctagagaatagatcagcatagcaaattactcggatctcaatacaagcatgaacaaatgagaccattaatacacacggttcagctcctgaagcttcctgagagcaagtttaatatagccaattactagctccaattcatatatagccaatctaatagctcattcatacaatagttacatactacactatcaatacctggtcccacctatcatacacacactgtgtcttggagtccgtgctacaactggctacaaatctgtagcccgctgcccttctctctcctatttatctacttaaaatatgtttgcagctggcttatagcctgctattgtacctgctcttagactgcttacacttaaaaagcagagcagtagacaatttaaagcattagctgcgatgatagcctattaatattgcagttcattgg

SEQ ID NO: 21003 - DNA, 16768 bp, Oryza sativa
tgcacgctgtgttgcgatgagatagtgagccacagacttgtacccaaggctgacaacctgcatgaagggaaaatgcttgcttgctcagaactgttggatagattactacattgtttgtgaaatagagtagtaagcaccatcttacatatcatccattatttagtttcttgtcctaccttgaaagtaggacaagtaccacaaacaaacaaaagtgaacacatgaaattggcattttgtgcttccaaatgtaaatagatcatatcagtaccttcctatacgcagcaccagttggaaaccatcctttcttagttctgcagatactgcaattgcaaatgccacgacaaactggacatatccaatcaggattcttcttagcttcgagcacattctcaccatacctgcattaattataaagtcagtccaaaatggagagctcaatcggtttaggtactagtagtttatgtacagtctatttgtaatcttccagtaactaaaagtgtgtgggaatttactactttccaatatctattgctgatcatttcaacttgatattttaatgcaagcaaaaactaacgggtaggcagttaaaaaaaacactaacaggtaggtgattaccaattcataaaaccctccatgcttgcaataaattcagaagtcaaattttaaaacttgaatactaggaaaccctgttttgattcacaaattaggacacggatattaagaattctgttttgatttgcaaaaacttgaagttagaaaacatatccagatgcaaaaactgagtagttttgttcctgtaacttgaaccctggctcaaaccttcaagttaaaggatacagagatgcaaacataatgtaatagacaaagatggcagagaaggatgtatggaacaatcgattaaaaaaataatagcactaagaaaagatgcatgttcgctacagctatcatatgcaatagtgtgtccacttttttcaggaaaatcattggtcgattgagaaagtatgagaaaagaaaagggccccacctcatgtacaaacaatccccacagaactgcccctggacaatctggcatttacagcagctggtatgatggccaagagttttctgcctgtatcatggaaacatcaaactattatgtcacagtttcacaacatgaacagcatttaacagattcttcagtagaagtaatttaaattgtaaattggcggctacactaacttggtttatttttctcattttgtcattactaagaatgtacactgttccatacagatcctattagtttaatattatagaaggggaaccattgtatatttgtgcacattgtctttcttaaccttacagtaacagtcaatactattacatctaagcaaaggaacctgtagcaaaagtacagctatacaacattgccatatgattcttccagggaaacttaccggcactgatgacaggtttggcccctcacttgatcatagatgcgcttaccatctttcccataaccatccacaaagagagtccagggttccacacaagggcctaaaagtttctcatcctcttccgtgtaaacttcttcctttgatccagcctcgattagaacagagtttccaccttcattgtcgtccttgtcctttttagtccgaatttcacagtagctaacaggctctacgttcttcagcctacattaaaaatggatacagaacaagacgattcttgttaagccattcctatacaaaccatagtaaaggccaagattgaaggaatgcatatgaaccaacagaaacttaaatcaatatatagcttcttgttaacacaagaaagaaattaacacactgcagttttaatttgtggcaaataaactaggtgccagtaaaacatgagaaagccatacactttcatgaacgtaaaaattgtaactgctggttttagtagaatccttaagaggaaaagcatcagttgcaactatcaaccatatgtagcattcgatgattgaatattgtgttaatcacaggattcagtaatgggattatgtttagagagttgcctttttttttccaactacaacgattcatattcaggtaccaagagaggtgcgtgcaagataagaacagcatggtaagcaaagatttgagcatttagtactgacatgagccgtaatgaagttttaacacatgtaagcaagtagcagaaggggatagaaaataattctaacaaaatcgcatgattgatgaactgatgaacaagaactgtaaatgagcctaatcacagcataccgtacaataatttcccaaactatcataatcgaaatgtaacggattattgaaccaaagatacgcatatccaaaagaattgaactgcatgaaagaacatttcctttttttcccgctacatcaatcaaccgcagtccgctcaagcaccgattattacaacaaataaaaaaagaaaaagaaagaatagaactgcataaaagataagtaacagatttccccgcgactaagcatagaaatttctcgatccatcgccaccaatcaaccactcaagcaccaaccatttctgcataaacccccccaaatggaaacttccccccaatagagttaaatcgcccaacccccaaacctgagagaccgacgagcaggcgatggcgaggcgggcttgatcatcctccccacgccgacggaccccggcgtcacggccgccttcctccgcccgcggcctctcccgctcccgctcccggcgaggccgcccgcggactggttgaagcgggtggcgaggtcgagtatccccagcttctgcatccgctccatgttctcccggatcctctccgccctctccctctcgtacccctccgccgcatccgccgccaccaccggcgacgacaacacggggctcctcgccgcctcctccgcagccttcggcggccgccccctccgaccaggcgcattcgccgcggccccccgggtgctcaccatggcttgctagctagctaatacaacttgtcttggttggtgggtcgaagccttctcgctcgccggcggcgaagtcgtcggcggcggtgagccgagggttttagcggcggaggaggaggagaaaagccgcgattgcaacggtcagattttctcgctgcctctccacgcggattttataggcgggggctcaccggggcggtgacccgaccccgctcgccctcttttgcacgcgttcggttacccagcccactcggctacgctcactgacgtatgggccctggattgggtgggtcccaccagtaggtgaggtgatgtgggtgggtacatttgtgcgtgcgcgcacgctgtgtcgcccgtgcgtagtggggtgagtggagaggggggagtagggtggggttcacgtgcgggggtgggttgtgtggcgctcgctgacaggtggggtcaggttagcggcgcgttaactgtggggcccatctgtcagtggaggtggggaacctaccttcgtgtgttcggggtggcgggaatggaaaggtgtgcgcgcgcgggtggccgaagaggcaacctacctgtactaaagtagtagacctacagtggacttgtaaagtacaggcgatggtgtgaattttgggaaattgtttaccagttgccaattgtatctcggttttgtaccgttggaatcgataaactttggaaactactaggatatttggtttttgaaatcgcattgatgcatttctgtgtgtgttgacagctaggacaacctttggtttaagatgatttcttgccgttgatttcaaaaattgccattacaaggtcattaggtggttgcttaattttgatgcctaattgtcaatatttggtaaaattgaaatgtgtaagttgtatttggtttgtttcctttctcaactttttttcttgtaagaggaagattttagaattgcaggtaatggaggctagtttaggcaacttataatttattttggcaacgaacatatcaacactatagctcatttgcaactccgtgtatgcattattttttttatctaatcccaacaaatcccttttttctattttttaatctaatctcaactaatccttactcatgagtaggaattgcaacaccactaatctccgatgagactacaactccgacatcgagaatgcaagaaccgagcaacaaagctactcaaaagcctgccctaacccttttttttcggatcaacttccatatttcccatagcctaatttttcattgataacgcaacacaaataaggttaagacaacaagttatttttaagggagagaggcataccatagagcatgtggtaaaagattagatggtgatgagacaacgacttcttggcaaggatgagaggcgtcatcttcgtcatgacgagcaacaacttctcgatgatggtgagtgccaatatcttggtgaagatgagcggcaacttgtggtgatggatgccgacatagacgaaggggaccttatagctataggtagatttgattaggagaaacatgagagagggggcggcgggtggaaaggagagggagaatagaagagggcattgttgacggaatatatagatgtccattttctgtcgggcctacttgggcttccaaacgataaaccataagatccaagccctgataggtgtattggccatcgaccgtttacgctttgttggaatgactagcccataaaaattgataaagcccaaattatgtacacaacatgggtgttatgtgctaaaacgagtattagctaagtagtggttgtatgacttcacctattcagattcagatccatattgaccacaaatattacatacacgtgatatgctttcaacgtaattttattgaggttagcaatttttcttttggaatgctagggaacatcaccggcctctacctgcatccccgcatggtatgttccctcgtgtgagggattcgctaccatgatctatgcatcctagtttaacacacacttcttatgcttatcatcgtcgcctttgtagctggtggcaaagttgccatgcagccaaccgtagaaggtatatttttccatgtactcgtagatgagcacgttgtcgtgtcatcgctgtcgttttggctgctccaaagatgaggatcttaacatggtggcagtgatagacgcgggcgaggagcatgccgatgtccatgtgcatgatccgctagttggacatatctcacccatctcgcccgtggatagttcatcgactgctctgccagagccgatgacaaactggtcgcttggattttccgttgtcttcgatcacctctgcctagaactttcgtcgtgtcgaccccttcaccacaaactatcgggcattcgtattgttgcttgcccatgcgaaatgagaatgtcgtgcagttcaccttcctagactgctgcttgctacccccacactatcatgaacaccaatgcaaccatcattgagcacccccatagcatagttgggtggcttcgacctgggctccaatgaggaagccgtgttcgaggtgtcaatgggggtggtcagggactcatgtggccacggtagggcaactccttcaacactcgtgggcatagctgtagtgcaatgggcgcgacggtgaggtaccacaatagagcatgtgtttttgaatatagacgtggtactcacatgtattagagcatgtacccacctagcacctatcacccacaggcatgagacctggtatcataatataatgctcgaaacaggttcctacctactacttttgtttcaggttataagactttctagcattgcccatattcatatagatatcaatgaatttaggcacacatatatgtctaaattcattaatatatatatgaatgtggataatgctagaaagtctaataatatgaaacggaggaagtaacaagttaacaacaaccatcgcttgtttttttctttggcatgttaatgggggcacactatattcacctgtgcgcgcgtacttgtaccgatgttcactagatttggcagcattttctttgctgataattctttttccggattccacccccatttaccttgttttctttttactgccaatatttttgggaaaatccatctgtttccagttttgtgaccgaattatgatgcaaaatttccacagggttagttatgcgaattatgcacaaacacatttaaaatcagtatccaattaccgttattacacttatgggttatctgaatatctgattccaattaccaaagcttttagaaacggcccatttactaacccgtccagtgaaagcccaatcacagtcatgggctgcgccattagcccattattcatgtgaatacttctattcacagggaccactacgtaaaagtcacacctaggttttcacctcgccgtcccactcccacccacgccgccgccaccgccgccgccgccgccgcttcactcgccggagcgccatctctagccgccgccgccgtcctccccctgagaaagcgtcgattccgtccgggggtgggcagcggtgggactcgtatccggacggccgcagattcgttgagcgacccgcgctgctggttagtccaaaacctttttacctgagcccctaggtttgatggttcttgatctggagaagtttaggggagaaatatggctgcgatcaaggattgcagcctccgcatttgctctcgcaagaaggtggggagtagtagggcggattttaggggcgattttgcaacacgtgtgagattgatttttttcccctgttaccgacggaactgtgactgtttcatttgaagttattgcattatctcgagtgaaaattcttgttccagtgcaggaatttagatgaactgcacaagctggccacgttagccatgtgatggtgatattggtttgatctttgtggacttgcttagtccaatcaggatctgactgtgttcataaatgtagtgttggtgaattgtattctccattatgtctggaggcgaattacttagtctgtacatgcaactggcaggaattgattcgttaatagttaccaaaaacctggatagattggatgggcattggttaccagagctcataatgaccaaattggcttcctcagataactttgtacgaacactgcccgtacctgttcctgatggcatttcattatcaataaattccatccttcttgtatgttgaccaaaaagatgtaaggccgctatcttgatttgtgtagtcatggttttttcagttgggcggtcatcccgaccgattaaattgttccaaattagtagctggttgtttctttgatttgtaagccatgttggttctttctgaattaatagttggttttcccgcaaaaaaaaagaattaatagttggttatttctttgatttgtaatccaggtttgttctttatttagaaagcgttaaacctctattaggagagtgtagtatatgcaaggcatataaaattctttacgtttctattgccgtttctggaaatgttacggtagctctattccgcatatgcttcctaaccattggtcatactattgtgtgctacagtattttgtttgccacatgttgggtgttgcccttgtatttatatgacatccatattgcccttgctttgattgaattgacagatggtagctactaccctgctttccctcgaggaactaatccaccgagagtcgtgtgttcccgtgattccgtaatattttagaatattgtggaattagagaaaataatgttaattgttattaaatcataataactggcagttagtgtaaaagtttgtactgtttatgccatatcattactcttgcatgtttttttatatgttgacgaatatgctaaaaatatgcagtttttcattctgcaggttttagtcttgttggcatccttctgttaaggaaaatggcaagcaaagcaggtggtgacggcaaagaagccatcaatgagcaaataattgcaaacacttatgggaacatgcggtctgaaatgactcaactttacaccaagattacagaattagagatggaagtcagtgaacactctcttgtgattggcgcaatcgagccactggatcactcaaggcgctgctacagaatggttggtggcgtcctggttgaaaggaccatcagggaagtcttgcctgcggtgcatcgcaacaaggagggccttgaagaggtaatcgctcgcatgcatgaagcactggagaagaaaaagaaggagatcaccgagtttgagctgaagtacaagatcaggatccggaaggcggacagcaacgctgatgaggaagaaggcagcaagaaggaagggtctgctcagggtgttcttgttggtcctgctggccagtgaagcaaaatgtcaagcttgcatactggtttttcctagagattatgaaagttaggttgctctttgctagatgtcaactgatttcggtctctctttctatctgtgtgtgaagtatactactattcttctgtggaaccgtggaatccgttccatgtacaattgaatgctatctggctatgctagttgataacttcggtcataactgcaggttttgtgcaggtattctaggtgagaactttggtaagattttgtgcaggttgcaacatgatttgttcatctttggatgcccatctgttctggtgtttgccatatgctccacacttttctgcttcaccatggcatgtttttgaaatttaacttaatccaattgcattttgtaagcaattcttttgtacatcctccatgcaaagctatccatataggaggttgcaaatcctctagcacgaaactcatgggagaacggaagttcacaagaaaacagtacaaggccaggctgctatatgttgaccaattactgataatacgtccaattatacgtcaaatggcgtattagcgacaaaaatataatttatggttaaaattttacatgtgttttttcatgacttgaacgccatgttaaaaaagaaactattacaaagaaaaaaaaatcaaaaaccaactctaaaattaagttttaagattcaaattttggtatctgtatataagttgtagggcaaaaagatgtagcagcaaaatccctttgaaattgaaattcatgcttcccaaacatgggcctaaattcgttcacaatctgatccaatcggcctctgtctcgtcggcctcccctcccctcccctctccccccaaaaccccacctcgccggaaaccctagagaaacccacgagatggcctccggcgagggcaagccgaaccccggcggcggcggcggcgtggtggccaaggggaggaagcggaagtacctcccccacgggaagccggtgaggaagggggcgtacccgctgcgccccggggtgcagggcttcttcctcacctgcgacggcggccgcgagcgccaggccacccgcgaggccctctccctgctcgactccgtaagctgctgatacgctggttcacttcccttcctccgccatctgcggctatggtgctctacactgctggtccgcgcgggttcgccggctcagtgtttgctcgtggtggtagctagaactcatcacttcggcgtttcgctagtcctattgtttcaaaaatctcgtgctggagcttgtggtgacttggatgttttgaaaattcaattagcagggacaggatttggagatgttaaatgttagcgttgtgttgtgttcattgggttcctctgttgtgatgatgtagttcatatgcttgtttaatttaccgcttaatgctgcaccctttgaacacattaagtaatgactgaaatgagaaattgatagtcgccgcgctggatgttggcttgtttgctagtcatatgtttgggattttctggctgtagagcttgcatgggcttatgctcttcttttttttttttcgagaaaatatacctcatgtgtgatactcaaattgttggatctgcagttctatgaagatctggtggatgggaaaggatcagatgggaagcccaaaagcatccctgataaaccattgaacaaaaaaattacgtttgcggattccgattcttcggatgatgaggaagaagatcattcaggggaggtgactgatgacacaaacaatgcagacaaaggtgaaaccacaccttctgagcagcagaaagaggtgtctgacacccctgtagttcccagcaaggacaatgaggaacaaacagataatgctgatgaatcaaaactaaagaagcagcgcgtacaagatcctccgatatctgaacagacagaaccaaaagagcctactgataagccaacagagtccactgataaaccaaaagggtccaatgataaacccattgatgatttgattgatgaggatttgaaggagcttggggataggaaaaaggtttgtttgaagttacttgctttctgcacaccctttttccccttatcactgaaatgtttgtttttgttttaaatattggcaaagcttagaatgttgtgattaactactctcttgatcaataattgaaattcttgctcagatactaaatttggaagttcacttgtagtagataaagggttttcaacaactaacatcttcaaaagtcaaacatgtatttagctattcattcattgatacttggttttattttggtcatgtgatgacattattgtgaacctatctggagctgtttaagtacattaaaggaatttttagtaacaaatttttttattaggagtccaatttgatgagtgacatgtattacatttcactatggtcaacaattagtgtgaatttggaggtgatgctgtattgagattattacctagcatgccaattgttcctcccaaacaatcccttaatacatgaaaacgatataaaatgatcaattccaagatatcctttttcccacaatggtttatgtactaacttatatgatgaaaacgattgtatgtcaaacagaggctcttcgcaacccttgattcaggctgcaacggttgcatcttcattcaaatgcacaaaagagatggagaccctggtccagttgagatcgtacagaatatgatgtcatcagctgcttcaactcgtaaacatatgtccaggttcagatttggttatgttgcaatctttgcatagatatactaggcagttattttcttgttttcagactttcctttttaatgcatgctagatttattctgaggtttttgcccactgaggtgacatgttatgcatcagaagaggaaataacaaaagcaattagtccacttgttgaaaagtactttccaaaggaatcttcttcggtatataaggtaactttctggcctaatttctatgttgatgttttcaatgtaatcttttagggacttagattcttagggaaactaagatctattataaaactgtaagagaagataggcatgttgccaggtcattttgtctatggtagctttattcatatttcgtgttgtccaattagaagacgtttctaaacttcattggagaggaattgttgttacttcaatgtgaattcaaccatcttaagtaaaaccagtcatgttgttacttcaatgtgaattcaactatcttaggtaaaaccagtcatcatgtataattgtgtgttaagtgttaacaccaggtgtcctttccatttaataaatggaacaatttagcacatggtaataaggctatgtacttatatatttgtatgatcatgtcagctgtaataagtcaatcgaatagcagtattactttttgttgattggataataatttgtaaatgatgagtcattagtttatcaccatttcccagttatccttcatagaagggatccaacaatattttatgatatttattccccttctccacccaatataaagtatatctgacattcaccacaccttgtggccatgttgcaatagctgatagtagtaataagaaaatataaatcaaattacctctattttgttttgctatacaaaattacatttctttacttggaggtttttaatctttgcagtttgctgtgttatatgaagcaaggtcgaacacaggtattgataggatgaaaattatcaacgcggtagcaaaatctgtacctcaacctcacaaggttgatctcagcagtccagacaggactattattgtccagatagctaaggtaaatgattttatcctgaatgcacttatgacgttattgtccgtaatgcatatgaactgttctgttagaaaaccatgcttatatcctatgattttcaccgaaaatccattgaatcagttgcttattcaaatgaaaactacatggatggctaaaactctgtaacatatcaggttaatgctgtaagaaccaattttgttaagcttttgaatcagttgctctgtcacacttcatgtagttgtagtgaaagcttttttgggtccaagggtgcaaatgggcaggcccgggaacccacttatagtacaaataccgctgggttacccgcttatttgtactataagtgggttcgtgggcctgtccacttgcacccttatttgggccccacagattttgaacaaaaatacctatcttgattgcatttaactagtaatatgcccgtgctaacgctacgtgacatctcacaacaacatcacaatgatactttgacaggaaaaaaattctgtacaaaaatcatgcttgatttcattgttatattttcttttgtataacagaacaccatattaatatgcattcaagcaattaacataaaagcccgagtacggtctgatataggttaacatgtaatactttacgaacaggaaattaaacatacacagtttgaaattcgaaacagtagtgatgtatatgtcttgactttttagattatacacagaatttgtgtagtattttatacaattattggttagatattgctttgaagaaaaacacgcatattttaatgataaataaattgaatagaccatgcaattcttattcaatagaacatatgcatcatgggttaatcccatctctgtagagcaggtcatcaaggcatacaaatacaaaaatatgaattaatattcattgacaaacgtaactaaaatctgattactgtgtctgcttggtgcctatgctttcttgcgctgcgatatcatcatgtccctcttctctaccttgaggataacaaaatccatttgttcctccttgaaaaataataaacaaggtcatgataaaaaagaacatgatcacaactgccagtaaacagatgaacaaaaataaaaaagatcatgcaaaacttacatctccaactgtatagctgtatcacctatgaagcacttaatgtctttattaacagcacgaataagatggattccagtgtaacattggatatgctgtacaattcttctatgaatcaatgatagttgcaacctggctgtgtgtgttagtatcagatctatgcaattagtctacaagaattacattattaggtggcaggacaagaagcactgttatatgtcgattgtcaaggacattcacattcatttgaagagtttccattaacctaaaacaggaaatgaaaccattgtatcgtatacccagccataccttttacctcttccaagccccacagcgttgatggagctgttcgattaaccagccagcacaagtacatcttattgatatgtttttcttcgactccaaattttatcttccttgttttccgttagcacacaattcaaactactaaacggtgagttttttgtaaaaaaatatagaagatatttgaaaaatcaaataaatccattttcaagtttataatggttaatacttaattaattatgtgctaatgagctttcttgctttacgcgcgtgaaaaatctttcttcaaactcaacaaaagaacgcaaccttatctcaagggatccaactgaacctatatggtctgattcactgtgcacccaaattaagaaatataaaccgagtacgtggtcaatatatatccacgaaaacactgaacatcttgaactaaacagatacttgaatagaaaatgcaacggccagctttgacttgaatctctcctctgaatgggatacttgaatagaggcaatgaccagcggttcattatttcctgaaacatataacaactgggttagaaattgttcctcatacccaataacctgaggacctcaaagacataacctgcaacattctcttctatcagattgaaatggaagatcaattaaaatgtccctgtttgtactatatattagtagatagcaaagatcctttgacaacatcagcaaatagaactacaagagaagcatttagtggagcataatcttctgcttcagtagaaatgattgaactcatatcactaagcaatgaaaatgtcaaatgccccttctttgctaaataaagcaaggactaaggagcactgctgcggtataacaacaagcatcattatgcatcctatcaagtatagagaaagttagtgacaatttagttttcaacattgatgagctgtttcataattatatcaaaaataaatgaaaaattattagtacagataatatggatatattatgacttactataagaaaatctaccagtaaaaatattttaagatacttgatcaacctttcaaaatattttcctccctcaacgagcacttgaactactgaaagccgagagctgtcctaagcatccatgccaattttagaactctaaagatttgtacacatccaactaaagaaattgtgcagttgtatataactttactttagtgagctatctgttagttctctcagaccacaaccttttcaaaccatgaagggcattcaacaggtggtgtggtcaaggcagcatactatatctaacactccaatactccatcctccactataactgacctcactcggtgattaaactttcgttttccagcaaaatttcagaatttcggtggccaccaaaatttccaaaaattcaggattttggtactttttgttcgaaattatttaaaaaattgacaaattttgaatgaatttgaataaattttgaccaaattaacaaaaaaaaatatcaggcaatatatgtgcttgccagtggggagccactgggtagctaaattaccaaaattgcaatccctgacctcaccaacacccatgtcctcacacagtaccatgtcaaatgcacagattttcggagagaatcaacagggagtgtgttttggtaggtgtatagcgtggggtgcttgagaaaggagccagaggagaggacgcaaacaagaagcaaacctgaaggcgtggatgaagttttgagtcaagagcataatgtttaatgtaatgaacataatgtttactgcaatgggatttcaattgtctgaacataatctttctagctatcagtctcagtccggaagtgtgcaagaacagcagcatatgcatagagaaagtggataaattctggtaccaagaccaacatccattatataccacttctgttcatggaccacagccactcagcaagaaccaatttatctacccccaaaaattagcttcaaaggaaccagtagcttgtgcaagtttgaaaatcaagtgtggcattactatcagcatggcatgatatggatagtgtaaagacatgaaaatggaacagttaaacaagagatgttatttggtgttatgcatgagaatagaccacttatacctactggagaagctatagggaaaaaaatactaacatattttagacccaaagatagtgcacggtgtatcttgaaacatgtgaaagccaatgaaacatctttcaatagaacatagaaaactggtgaatgatccaagtaaatgaaacatctttgcaatttgcagtatctagtgattcagacgatcgcacccaaactttaatttcagaagcatgtacatatcaaatataaagaatagaaaactggttaatgctccaagtaaatgaaacatctttgtaatttgcagtatcaagtgattcggacgatagcacccaaactcatgtacatatcagatgtaaagaaccacaagcatctgccatagtttagtttccgcagtatgcaattgaaacttaaagaaggaaactacttcggagtttctaagattgtgtcatcttcaaagctacattatggctatcagccaccatcgcatatcaaaactcaacataagtaaaataattagctccaaacagatttacctattctcctcagagtgagggagcaccgaaaggaacttcgctggaacagcaagacctgcccacatgcataaggccaaccccaggagcaattgcatcatcacctgcataatcaaaagcataaattatgcaacgcaaagacaccccaaggcctaatttatcgaatttggagcgaagttggttgatgccaagtagccagtaaaacaagcagctagatcagagaacaaccagcatcaaatttggaaccgggtcgcatgtaattatgtaaacatacagtgcaactcatacacaatgaaccgcaatttcaacctatgactggccaaggccaatttggcgggaatagattgcttaaagcacattcagtgatagtatcaaacaattttctcctgtcaaacaacctaaatcactcttttctttttgtttttgtcatctgtaaactttagtttacacaattcatggccatcatctaccctaccccaaatctcactttcaaatcaagcaacccaaatactacatgttttgatcacagctttacgcaacagaaaatcaaccattcataccccgaaaaaaaaagaaagtatcacgaagggataaggggaaacacttacatccataggcggactcaagaactccta

SEQ ID NO: 21004 - DNA, 1831 bp, Oryza sativa
ctaatgcaccagcagttaaggacaagatggatgaaccgcacacatcaacttggatgtcagtagttcctaagatgatgacaattgacataaggtagacaaacaccatgaactgatcaagagccaaccctttagaagcaagaatacagacacagggagactgatgagtgtatagagtatataggtgttctattgctcgccaatggtctgagttatttggcctgaaccctgaagactcattgagttggagggccttagactaaggcactccagttcactatataatttttttaagggagggaagtctgctacagagatttttgtgagaagtgtcttatatataaaatctagttaagaaaatctcaagttacaacatcagtcacatgacgcaggggcatcaaccatcacaatgtacacacaccgcatccaattgtatggtttatatctaagttatgtattgcctatggtctggtataccttcagcctgctggtgcttactcctttgtagattccaattgaaacacttttcttcgttatgttgtctttcggtttatcagtttctggagggtaaaaatgagccaaaaaccaaaagcaaaattagatgtttttccaccatattggatacaagaaccttttttccaaataaaacaaactaaacttgaagttagcaaacttatgttcagttcaatttatcaggagtgtcttttagtttatcaatttctggagggtaaaaatgagccaaaaccaaaagcaaaattagaatgtctttccatcagattagatacgagaaccattttccaacttaatacaaactaaatttgaagttagaaagcttatggttagttcaatttatcaggaccaatctagttctgcagtctgcacaagggcacatgtctacagttattggtaagcaaaacacacatgtgaagtgtgttcttcagaaatatctagtcattctacaagaattccaattacttgttgtccattgtgaatgatttgatgcttgtcaccttatgagcctacttgaaagttgaaatacaagaaactcaaaacacagtaacaggaaaaatgcaggaattgagtgtcatgatcaatcaagtcctacggcagctgaaaaacaaaggaaaacttcaaaaggtgtttagatacaacaccagaaaattgtaggtttggaagagacagaaacagaagcatgagatatggaaatattcctccaaagcccatattgagtagtctaccatattaggagtttcaaaggaaatcatggagtccaatcctttgttccaaaggcctccataggacttttttttcttacagaaggattgtaattgtccaaaattccatatttatcctccattttaaacggggcctaaaaaatgcaataatccagcgacattgaattttacctagtgcacttgtaactgagtaattgtgaaagaaagttctatccaaaaggaaaattcacatgggcatgagaaagggtctcgtaaactttacctggtttctgattgctccaatcaacatatcatgacaaccagatgcatgcacattctttaattttggacactgaagaagcaaccgttctgcgcaaaatatttagatggttaataacgatggctactatcaacatactcaacaacatgaagaaaaggggaaaggacataagacctggatttagatttgtacaggagttgaggtttagatcattcagctctggacaatttagatatagagcctgccatatgtgaaattagtaaaccatatgaatgattatttcaataaatcaaagcctgcaaattccaaaacacttacatctattgctgagcagccccat

SEQ ID NO: 21005 - DNA, 8957 bp, Oryza sativa
  unsure (1)..(8957): unsure at all n locations
cttcacataaccaagtagaaacctttggttttcatcacctaagaactatggctaataatactattactaaaagttcacttgttaggaatccttgttgttaatcattttcattttgattgttaaatctcgatattttgtcatttatgttaaacctatatacagtttgctgttttaggctgctctgattgcattttggaatagattggattgcagtgcaaaggtggagtgtgtggccaatctatttcatctgtgtagaattctgacaaatttatttcgaacagccccaacttgtgtattagctgcacattatatgaatgcaacgcgaaagctacttgcatagcagaataaggcacacatttccaaattaaatcattttaaatttctcaatggtgctgatatggactagatttgttccttctccattcttacacaattatctgtagagctggcagggattcctttttcttcttcagatatagaattctgtacagcatgaaagaatgatccttttttcctttaaaatgtttctggtttccctttccctaatccctaccaaacctgaaatgttctcagtgtgacttcattgtatgcaggaggaacttgaagagcttgataaaacggataaggtgtcagcagcattgcaagagtacgtgctagaagaaaacttcaccaattctaatattactttcagacattttatgctctcgtcttcctgcttaaaaagcatcttttgtggtggttttactgttagttactgattgcactgttaacatttaccaggcttatggtaacagcggagagcaaagcggatcctctacttccagtgtaacgacataaacatcctatttctaaatttatccaaatatctctgcctcagaactcttatgccgcttctttctgttaccgcaggactactgggcctgcttgccagtcttgggacagatggtttgaaggtccgcaagatctgcgcagatgcaaatgctggtttttgtgattcttggcaagcaacaccgagggcagacaatgattgctgcaaactgtaaattgtttttggtcttcccagcatgaatgtcattagtcattaaaggtgaggggggaaattcttttactgtactgagtatgggcatcagaaagtggagtagaatgagaagagaactgtggaatacataagtggcagcaatgagttagcttaatctttgttcgacaagtttcttcgtattgaaattttctgtgcatttagtttgattggctgcatttctgctgttgttaaagtatgggatctctcaactgcaacatttgactaaaaaaaatattccctgtgaggctgtgaggttagttctatctgacatttctttagatgtttctacccttgttcagttagttaccatgctgaatcttgtgaacaccatttctgaagaatgatggctgattctatcttgacaagaattctgaatcctgcattgatgtgaaagaaactggctctttcatggatcgcattaactttccactagctcttctggcccattcaagagaagcccagctcacagaggcccagcccaataagcagctggttctctctcttcaactctcataggccacaagtgaagggaccttatccaaaactacacagcaatggcgcgcgcttgctcgtctccctcctcgccgtcgccgtcgccggcgagcagccgtcctctcctcccctcgtcggcctccatctccgccttcctcgcatcccacccggccctcaccctcctgcacacgcaatgcgcctccatggcgcacctccgccagctccacgccgcgctcgtcaagtccggcctcgccagggaccccatcgccgccagccgcgccgtcgccttctgtgccggcgacggacgcgacgccgcctacgccgcccgcctcgtcaggcaccacccgaggcccaacgcgttcatgtggaacaccgccatacgcgcgctggccgacggcccggggcccggcgcggccgtggcgctgttcgtcgacatgctcgggtcgccgacgccgcccgagcggcgcacgttcccgtcgctgttcgcggcgtacgcgcgcctcggccgcgccggcgacggggccgggctccacggcatggtggtcaaactcggcctcggcggggacgcgtacgtgcgcaactccgtgatcgccatgtacgcgtcgcgcggcgccgcggacgaggcgatagcgctgctcgcgcggtgcgaggcgttcgacgccgtggcgtgcaacagcgcgatcgtggcgctggcgagggccgggcgcgtcgacgaggcgcgggcggtgttcgacggcatgccggcccggaccgtcgcgacgtggagcgccatggtgagcgcctactcccgcgactcgaggtgccacgacgccgtggagctcttctcggcgatgcaggcggagggcgtggagccgaacgccaacgtgctcgtcagcgtcctcggctgctgcgccagcctcggcgcgctggagcagggcgcgtgggtgcacgcctacatagacaagcacgacgtcgccatgaacgcgctcgtggtcaccgccctggtggacatgtactgcaagtgcggcgacatacgcaaggctcgcgaggtgttcgacgcgtcgagatcgcggggccaggccaagctctcgtcctggaactccatgatgcttgggcacgcagtgcacgggcaatggcgagaagcggccgccttgttctccgagctgaggcctcacggcctacgccccgacaacgtcaccttcatcgcgatcctgatggcgtacggccactccggcatggccgacgaggcgaaggcggtgctcgcgtcgatggcgagcgagcacggcgtcgtcccgggggtcgagcactacggctgcctcgtcgacgcgctcgccagggcggggaggctccgggaggccgagggcgcgatcgcggcgatgccggtggcgcccgacgcggccgtctggggcgcgctgctgtccgggtgccggctgcacggcgacgccgaggcggcggcgcgcgcggcgagggaggccgtgcggtgcgacccgcgcgacagcggcgcgtacgtgctcgcggcgagcgcgctggcgcgcggcggcgaggcgcggcgcggcgccgcggtgagggggaggatgagggaggaaggcgtgggcaaggtgcccggatgtagcatgatcgaggtggatggtgttgtgcacgaattcgtcagctaaaaatgttgcgacttaattatttcaggtcacagctaaaaagttaagatggcacataaaccaagattgtaaaatgtatagaagcatcgacctgtaaattttgcataattctacttaagagcgaatttctgaatactacagatgtttttgtctaatctattgcaaaattatagatttaataatattttgtactgaacaactacacatcttttttctcaaattattgtaaaactacatgttttattaggctacaccttcacatgcaccattacctgacaagtgggtcttccatgtaaaaacacttgaagtttgtgataaaacattataagggaaatgttgctataagatgctcaaagattgtgaactttacctagaacacgaaaacgtgatacggatgttggacatcaaaaaactagtaattctcgtgagtgcaagtaggactcgtttgtcattgtgggtgatttgtatatagtttaaaacatatagttttatgataacttaagctcaaaacctgaaattctacaatacaaactcttaaatatgtagtctaatgaaattctgacaaaatatgattttctcaaatctactctttatcacgtgataaaatcttggatgtattttttagataatacaaacttggatgtaatggatgggcaattgggcatctaccaacatttgtgaaaagtaatgatcaaacaagattagtgatgtccttgttacatgcctagataagtaatactattattactccctccaccaaaaaaaaaaatcaacttttagagtttgaattttgtccaaaaaaaccaacttctaccattctacctaccatcaacacgtaaaacgagaagtttatacctttaataccctttatttacccatcattcttactattttttcaatgattaagagcattttagtcattctcactttattaatccacctcgggatggaatggatttttcgtgggacgaatggagtacattagatgatgtattttcacatgcaacatagaacatgttacgaaatcagaaaaataatagctcgaattgggctctgcttcccgtgtgttctacacttctaccaacaaatcaagggacgaagagtatgagggccagcccatcacaggaaagttttgctggtccaaaacgtatgcacaattgcagctttatcaacttttcaagaggatgggatacatattattatcctagcccctgcattgtagaatggatatagccgtatcttgttacatacgagtagttacaatccttagctaccgcaaaaaatcgtgcaacattcgtctttaatttttttaatccaaaaattttaaaattcctcgaccatcacagtaatgcatggatggtaaccatacggtaagtggaggtaaccacggtatgttatttagagaaatgaaaattgcagaaaacaaagaaaaacaagtagaaaagattcaggaaattgtataattttagaaaaaataggaaaaatctagaaaaatgtaaaataatatagtaatcatgctaaaaattttgacatgacattttctacactgaaaaatgaaggaatcacattttcctctcaagtggacctaaatgggtttcatgaatagtgctctctttcggtgaagcgcatttgttaattatttttcttttttaagttccaatttacatttggctgcagaatatgatatcaactttgattttttttctcacctaattgtactataaactactcctttcattctgaaaatatagcaattttatattaattagggaataggggtagaaagacttaattatttaacttgggtagatataggcttgtactataataataaaactaaaggataggaggggtagtatgaaagtgatgaaagtcttttacatgtcctaagttgttatatttacgataaaatttaaacctacattttgagatggagagattttgggatagagggagtagatactatcgggagtttccactaccgaagcctcatggtaaacttggttaattaccatgtggtaggaaaaccctggctgccataccataaaactgcaaataatcaaatggagacaaaacttatctaaaataaacacgtaagcacattctaatgttaaaccttctcatatatatgctagcttgacaatatttcctccgaagttattctgaaaaggtgacactcgcttttacatggccgtgttcctccttttcagcaaagtttaaagtcgatgcattatcctgacctaattaggatgtgattctgtggcatatgagtgttgtgtgcatgtgattagcaccacaccttgaatagctagttgagcaagagtaaaacaaatttataaagccttctcccaccaaccatatactacttttaggttaactcttttacatgaaacgagcacgaaaatgtaagtggacctattcgtcgaatgtgttaggctcgactgtgtggttgcgcgtggcacttgacgtacgtccatatcctaagaggggagaggacatatttctggacatttgcctatatgtctatatacttggagcgtattattggacatttacctatgtggctatgcaggtatgtgtgtgtgatatcttgtctcaattaaaatgtgcttatcaatgttatgtacacttgcttttttactggattaacctttttacatgaaacgatgactaaagtgtaagtgtgatgctatgtgtaagtaggactacatgtcatattagatggaatgggatccgtagagcgtagttctgtagggcaagctgttacaaccgaaccaagtgagcaagcgccttagatgttgaagcgtccatcctttttgtttcaaagaaaatctctaaaagggtaaggatttctagagttaacccaatttacgagaaaacaatgtactaaaactttacaactgcacgattttttttagataatagaatataacatcccggcctttgctcaaaacgagctacaaccaattattataaagtagcactcaaagaaatagtatagttcaaattaaaaagaacacaccaaacaaaagcagaggaaacctagccaaaataaagagaacacatttattcaagtctatttgtgaacctccatccataattaggaaaaaaattgcataaccatcgactccaatttgcggcatgcaacctttagaaactccccatcatcatcacacctttgtagctgtgcacaaaaccggagccagtgtgttgccctgaaaattacctgcatataggaagtagatgatgatttgtcaaaaactataccatttctactcaaccatagagcccagcaaatggcagaagctccaacaagtatcaggttacaactgcacgattaattaagggaaaaagattagaattaatccacatgaagaccctacccaattcacacaccaccgacaactagcaccctataactacttttttgaacaaaaacatcctataactactgagacccataaaaaaaatcatccttgctaagcttaaagaaaatgaccaagcagctccaacttcaatctctttgatttagccatgatattgaagtccacgtggcatatactgtagctagctaggacagtgatatagtatcagtcccaattttgtcctgtggaggacaactcatgagtcaccagactgaagctagccaactaactgaatctcttggccgacactgcatatgtgttcctgggaaaatcagctcgtgtcatacgaaaatcagtcaccatcaacaggcctggccggtctgtgtgcagcgcattatgcagaattgtcaactttaatttccaagttccctaatgtactatcatatatatagtacactccctactaatgccattatttgtccttgttgtttaactgtagtcatgcagggatcgactagctgtagggccaaatgcagacgctgacgagacgcataccaacataaaacatttagaaaagacgaaagaatccgattgacccacacagccaatggcatggctgcccgtgatctcttgctaatttcagcgatcgagcattcgggcccaacaaatctttctttctggtgctgcaggtctatctgtctttagtttatgtgtgagcatgtacgatcgaacgagcgaggtaattggagcaacagttttcaggttgctaataacttcctgtagcaaacaatggcgatgggctccatttagatattagcacaggtgctcaggcgatgcgagccacaaacggcaagattcctcttgcttcaacggtcgacagagactgccacacaaattcatgcatgcatgtctgcaactctctgcgcatatattgcgtttatagtctactacagctaactttcgatcagattttgcttttggagaatcgtaattcagcctctgttaaccccaaaattcatagaccaaacttcgtatattaaagctcatagactagtagcaattatatggtggtcactatctagcaactgtatataaatgtatatacaattataggatggaaaaaaatctcatatataaatgtctagcaacaattatatatatatatatatatagtgggcttgtagcctacactaatacagaaagtatttttacgggcgggccgaaaggcatcttcccatgcgaaaggctggcccgcctatccgagatggtctgcgaagatcaccatcttcgcgtgcggccaggctgcccaactgcacgcgatgtggctgcattattgcgtgtagtcacttaagtgggtcacacgcgataatgcatatttgcgtgcggtccatcaaccggcccccgggagaccggtttttcctagcgcgaccacttatgacccacatggaacctaattgcccccttttatagaaaaaccgattttgtagtggtacaataataggatagtcaacatagatcgagactaacaagcatatcatcagcttataagcagtgtacccataccgaatttctcagttttttgaatttttttacggctatctcgttgaattacacgtcacctcttgctgctttcggttcctcatgcgggtgagcttgactgctgataagcaattctccagttagcctggatgttcaacaatttccaagctttgcctcgtgtccggtgccatcaaccaggtgtggcaggnttctgcatnctatgncgttttttttcaaaaagacacttaatactctagaaatagcaaaccagtccttttaaattaagattcatccttatcataaattttacaaaaaaaaccatatctttatatatgaaatacaatctgaaggagagaaatttccatttctagggacagtgttgtatcttaaaaagtatgagggcattctcacaacaacacatcctaatccaatcccatctttctctctgctgcctacccactcccaacatgcaacctttttccgtcccatccgccattcttatccgtgcgccttcctcctccttgccggtgccgaggccttcccttcttccttccggaccaaacagcgttgacggttgacctattctcctccaccgccctatatcctctaccctcaccggtgtattcctctcccgcatcgatgccatagacctggtcggggaagcgtggaggagatgggcgatgaagtcgattgccacagtgcaacgtattatgtatatgtactctttcgtggtttaagccccagcgtgatgcagttttgatcaaacagatgtaaatatgtactccctctgtttcaggttatacgacgttttgacttttatcaaaatcaaactgttttaagtttgaccaagtt

SEQ ID NO: 21006 - DNA, 1157 bp, Oryza sativa
tatatgtatatgtaatccttatgagctgatgcaacatccagataactcaccggctgaaaccccgatgaaacccttattggcaatcaagaagcaggtaagagattatggttctaagcacgacttagtagatcaaacttaaccgatgtagcactaagtatgaaacgaaacataatatctagataatcaagctgttgattgagttttcagggtggtagatgtctaagctaatctaatctaatctagcaacacgatttagccgataccggcagaaaccctaaaacgagaagcagccgatagagttaaattgatatgctaagactagattaacatagacatatgataaataggtaggcaaatgtgtcatccaaactagagcaatccaagaggtcgaatgtattgatgcagccttaaacaacgccgacgtaaacaatacaattgcctgggccgacggaacattggacttaccctttagccagagatcgaacaccgatgcacccccgtgtcaggtgtcaagtcccgtcggacgataaaataaagtagaaaaggtaaaaggtggcgatgcgccgaattatattgatcgtgaagataaattacatagaccccaggtgtacatatttatacccatgggtagatactagtccttgtacgacaagaaagaaactttcctaaagataaagggtgaatagccaaagtggtcctccaagtctcatctgaggctcagtttagtccttgatgtttcaatctatccatattagtccttcaagttttcattttagttcaaacttatccttgaaccaacaactcttttcataaatgacacttatacccctcatcatttacatatataagagagaaattgcatgcttaaattttttatagataatacatagtatattatgtaaaacgaaaaaaaattatgtactagcaagtgtatatgatagcaattgcttaagtttcatgtgtatatgttgaaataatgggaagtagatctgtaatattgtttattcatgttggctttctcttttctagtatatagatgtatacaaattaagggcaaaattgatattttctaatagaaatattgcctagaaatagccatatggcatattaagtggacccaagaatgatttcaagccaaaacaaatatttgaaggatc

SEQ ID NO: 21007 - DNA, 23767 bp, Oryza sativa
cgtcgcctacacaaccatgcacgaggtacatttcccttaatgcacgcttaagagatccaaaagatgaaataagacaaaaaataatgtgccctgatctattatcgcggtggctcattttcatttaaattacgttcaatagtccattttacggttgagaatatatagtggctcgtttaattatacagagtatataaggccatgcatgacggtttatttattacagagcggactatggtcacgggctcaatctgtttctgttgcatgtggtgagcaatttacatgtgcacgcccgcacagacagagttagttgtagcactattagttagttactaactactaagagcaagtataataggaggctgtaagccgacaaaatattgaggtggaggaaaaaagagaggagagagaggagaagcgaactgtaaacttatagccggcttagacataagaaccaataaactctacgagagaaacaagtgggccatatattaattgtaattagctaactgttatataggtgggctgagagaaaactgtaaagaactttatagcctggctgtattattaatcttgctctaagtaacggatacaataagagtaagtttaatagtatagccaactactaactccaaatcatgtatagccaatataatagccaattcataaaatagctggttactacattattaatatccggtcccatctgtcatacacatattatatcttggagtccgtggtgtagctggctacaaatctataacatgctgctcttctctctcttcttttatctcttaaaaatatgtttatagctggcttatagtctgctattgtatatgttgtaaagtggtgtaaaccggctgtagagaagaacaagctagtataggcctgtgtcataagggcaagttttatagaagaggtggatattgcatctaatcttgaccacatcatcaaccaataaatatagaggtaacatgtacaatatatcacatctatactaattctaatacactagccccaatggttgtttgcccaatctactcttcctctctcttctttgtcttgaattttgtgtagcagttgcctcttacatgagaggtggctctttatctctctcatctcttctctcctccacctcactatttaagcttacgtggcacctagaagattgtgcttggatgtccatagtacttgcactaattcccaggtcggcggggctagcttaattaattcacagatgcagtccagctgaggtagcaaagtatcccaccccgtgtaccgtacgcgttccaatcggtaaggttcctgttgccggcggggacgggaacacgatcgaacgcgcgcgcaccgtggccgtgcacacaacacatgcatctgaaaatgaaacgagacgaatgatccattgacatatctgagatatatatatattgatggcgccaccggctaatagctgcataggatcggaggaggctggagccagccgcgccatacactcatccattctcctttcccacggccacggcggtagattcatcgatcgatcggagcattgctttcgattcgctttcgcgaccaaagggagggaaaggaagttgcgttgggtcgctagcttagctgcaccttagctatctcctcctgatatttttgcacgccccctcccgttccttcctccctttcccgctctccgcgtacacctgggatccagcataacccatactccactactggactactacttgctgctagctgccgcttataatttgttgccctgtctcattgtccctccaaaatatcaagggccaaagaggctttagttcatttattttatttagaaactagtttaattaattaattaattaattcagtgatacatcattattcaagaaataagtcaatgtgttgtatgatcaaaagaattattcctggtattttgagcatgtgtaagaaatggtgttctcctaattatcaacgaaatgcatgtctgctagttcgtgcaagcagaactaaaattaaagacctaaattgaataaatatcgggatattaatgaaacacaatcagtgggttgtatttttggcagttcacctctcatgttcattcatttatcaacggtatccaaaatttgaaatagttaattttgagatatattcatcatagatacaaaagtttatttataaattattcctattgtactttctttattttttaagggcttattagccgtagaccaaaaacgagggattttcacaagaatacgcatagtaacatgccagtgtttagagttaatacggggaaagatgtataagtatgatttatgattgtgcttgaaattgcaagaagaaaactaggggctagtttggtttggttccaaattgtgccctaccaattcattggcaatttttaatagtgtttctggttgtttggattggtgccaaattttaacaacacatctcttagatagtaaaagttttggccatccaaatttggtagtactaaaagttacctaaactttggcactaccaagattttggtatggcactaaaccaaactggccctaggttagattttagttaagaggttgtatctaaggaagatggtatactatacactcattgtgtaactgttactccctccgttttaaaatgtttgacaccgttgcctttttagcacatgtttgatcgttcgtcttatttaaaaaaaaattgtgaaatttgtaaaactatatgtgtacatgaaagtatatttaataatgaatcaaatgatatgaaaagaataaataattgcttaattttttgaataagacgaatggtcaaacatgtactaaaaattcaacagtgtcaaacattttgaaacggtgggagtattcaacaatttacttgactttaattatttttttctcttattataaatatttaatgtttgctgtcgaataaaatttagttaaatatttataattttaattatattaatagtttttgaaatgcttagttaaaaattaagaagaagttatgtgtagattggtcttgaaaagtatagtcatactatcgtaaacttaattattagattttataaacttattttagtacaaaagttatggtcaaacttttaaaggtttactcggatcttgttctaaatgtaaaatatatagggcttgatgaattgagtatgtatatctcatccatattttatatttctaataataaaatataacactcctagtacttaatgtgtctaaattcgtactgcccaataatctgtctatttgaatatcatgtccataattgagatggaaagtgtaataacgagtgatgcataagcattaaaaaacgtttaccaaacagcattacaaactcagcccggccggcttcccccttatatacccagaccatacaaccaacaccaccatagtaaccagctgctgctgctgccgccctcttctttgtgttgccttgttgttggtgtcgcgcgcccgccatggccgccaccaagagcaaggcggccaagaagggcgctccgctcctcggcaagtacgagctcggccgcctcctcggccgcggcaccttcgccaaggtctaccacgcccgctccctcgcccccggcgccgaccccgtcgccgtcaaggtgctcgacaagcccgacctcgccgccgccggcgccggcatggccacccgcgtcctccgcgaggtcgccgccatgcgccgcctccgccaccccaacgtcctccgcctccacgaggtgctcgccacgcgctcaaggtgtacctcgtcatggagctcgcccccggcggcgacctcctctccaggctcgcctcgctgccgtcgcgccgcctccccgagcacgccgcgcagcgggtgttcctccagctggtgtccgcgctcatctactgccacgcgcggggcgtgtcccaccgcgacgtcaagccgcagaacgtgctcctcgacgcacacggcaacctcaaggtctccgacttcggcctcgccgcgctcccggactcgctccgcgacgacgggcgcctgcacaccgcgtgcggcaccccggcgttcgcggcgcccgaggtgctccgccgcaaggcatacgacggcgccaaggccgacgcgtggtcatgcggcgtcatcctttcgtcctcctcgccggccacctgccgttcgacgactccaacatcgccgacatgtgccggaaggcgcaccgccgcgagtacgcgctcccgcggtgggtgtcgcagccggcgcgccgcctcgtgtcgcgcctcctcgacccgaacccggccacccgcctcgccgtcgccgagctcgccacccacccgtggttcaagcgctcgctcagcctcgactcgcagctcggcagcctcctcggcggccagccggagcgggagctggcgttccaggcgccgccgccactgaacgcgttcgacatcatatccatgtcgccggggctcgacctgtccgggctgttcggcgagagcaagcgccgccgggagaagcggttcgtgacgacggcgtcgccggagcggacggtggagcggctcggccaggcgggcgccaagctcggctacttcatggtgggcaagaagggcgtcgaacgcctgcccctgggcggcctctcgggcctcgtcgccatgtccatggagatgtcggaggtgtcgccgtcgatgatgctcgtcgagctgaggctggagggaggcgacgacggcgacggcgacggcggtgccgaggagttcgggtgggaggagctcagggcggagctcggcgacgacgtggtgatggcatggcatggctgcgatggagggaagaaagacaaggaagggattcttttgtaggacatggactttgtcacatgtatgatgatgtatattagtaggattttgtggcattgttgtgtcaaagattatagattgttagttcaatctaattacgatgttttgtgactaaattgttggtaggaatggatctagatcatttgtgaaagcttgaagttagtgttaatacttcatatattggccttagtgatgaacacgagttgcccatgcatgaaccatggtactctcgattattaactcattctaattcaactaaatttaattttattgaaccatggtattcgattctcgacaattctagttttagttcaactaaattttacttttactgattggtcttatgtatttatttatttaataagttcacttagctcaacaagattgttgtcaatggtacgtacacacggatcgtcccatccctactggcctaaatcaaaatggtcatttaggtttttatacttttcaagtgttcagaaggtgataataattactatagaggttattccctcacatcgtttgcttgttgccttatcaatcgaggaggaaatttgatttttgaaagttaatcttagagttgattttgaggggttttttttctcattacaatttgtttttcagcattagcagaacttatacataaaagttctacctataaattatttgtggtaccagaagtacaaaggtaggctgtataaaacagcaatacgtaggacttaaaaggctatactgttagtaaaccacagttttcctgatagcctagcgcatgctgtttcctataagcacacaaaggtcattaactttaagtgaatgctgaacaaaacagtgtccaactcaaacagatctctccattctgcattctgcatgcactgtcattctttttccctgatagctactgaacctgaagaaaaatcatccaattgcaactgttaccacggaatcccacctagacacagttctctccaatattgagagtgactctgcgtgttccttatttaattggttattagagagctatttatagagctaataattccccatgcatatatatatatatatatatatatatatatatatatatatatatatatatatatatatatatatatatatatatgagtattactatatattaataccataatcaagtgtttaatttgcttctctaggcttgcaaagtgaacacaaggacttaaattaagttcctgtttcaccgatgttaatttctgccataatattttattttctgtattatattagctagtttccaatttttagttcttttgtgcctgtccattagtgggcactaaatcattgtccatggacagaatcattttcatccacccaacaactaaggtggtagtagtgtacgtacctatatctgtatatgcctatgctttcctgaaagaatatgccatctaattgattaagctaaagttagggaaagttacatggttgctgtttctaatgttccatgacaccaccaattaggttggtggacagatcgacgggccgacgagtaacatcttggtaaagtggaagtcgcgatcaataagagaagcaatcgattccgataagtgattgcctcctcttcaaagtggaagaaaatgcaaatgagaaacggaaatggagaagaaactgtgccaaccgattcagatggttcatagaatggttcatcgcaactctggattgatcaattggaaggaagatatgatgccagcaaatttggtctttaacagtgactggcagctgaccatattttcaatgtagcagcttctttcaatttcttatcaaaatgcttgatagaattgtcatcgaagcaccaagtcaaatgaacttgacaaaacttcagaaaacatatgaaagttttgcttataatcgttaaaatatcggcacatccaatggagtatctactctctactagtagctagctagatacacagggatagatggagactagggctaattaatggggtaaaaatccagggaagaaaaagctagtagtgatattgacatgcatgcatgaacacatcgatcagggaaattcaggaacagtccagcagcttggtgacaaaacaagcaagtaacttgtatgggcagtctatctcagctaaattatttgtctaaaccatgagctagctgttagctacaagcttcctatgctaacctcattaaactgacctgtaaagtgatgaaaatgagcaggtatttgactgaattttccggttaggccgtcagaagggaagaaaaaagaagcagcaggaaaaaacggaacaacatgcatgtgtgcaggaaaaagaaggcaaacatttgtgtttggtttcttatgatcggatgttttaaatttgaaccgacagatattgcaaaagagagcacacacataagattgttatttttgtatcggacttatattaatgtgctcctcactttcattttaactttttgaaagaaattatgtatccactactttcagtagtgcttaattatctcctaccacttttaatgagaggttacaataagttcaaacaatttaatgtaagtgttgaagaatggagactttaatcagttagatagaagagaaaagaaggaactctaatgatgatgataagctctgtagaaaggagataagcccataattaagcacgagggaatgatttgatgaggagaaatattattcctggtacatctttgtgtcatactagctacaggagccctgcccggataagtcaccgatacttatcaagttagtggtatcaccttctttggagtgtcaaagtccaacaacaccatgaatgaagaggaagaagaatatcgaacacccctattactccggaatctctttgtccatttgcttccggacgtgcaccttagtgaagattcgattcaaccctggtgagcagtgagtgatccataataatatgcaagaacaggggtggtcataatcacagatgaacatttgcagaggttttggtatcccaagtctgaaagcaagcacacattgaatgggatgacacctaatgcaaatgcagtactgtagactgtagaggatgtgtcgagcacaaaatatacattgctataagctaacagtatcagattactcgataaatcatgggtggacttgtcaacattacgtttagagttgcgctggttttttcagtacactttaactccttggaatggagaaattttacatgaactgtacaagattcgaactactaattcttacgtctcaaagaagcccttatttcctttcttttctagattggggaatcaatcacaaagcatttcgtccatgaagtaacaatacaagggaataatttgtactgctaacattagcaaagattctttctaacctcacaatctcgggaagctgagaaaagctgaaaatcctagcttctaatttttgcaagccagctttttcagattgtacaagaaactggtccgtttggattagatggagaagctaggaagtaatagagggagcttgtctcagctgcagcttttcccaaaagctgcttctgctagaagctacctcaaacaatccacagcttctaagaatctgtagttatagattctgaaaaatgaactaagaagccagaagctggagaaactgtgtttcagagcttttccagattctcagaagctggctaccaaacagctgcttctcagaatctaaagctcccccaaacaggaccatagaagccccccaaaattccaaagcacttcacaaatagcgcaaatactagctaggccacacctgtccaacaacaaggatttttttcttttttaatttttttaaatatttacagaaaaattatatcgacgaaaatatttaaaaaatagaccctaccgcctaagtggaggacggaaaggtgacgtggcacacggcgccgtgcccttgacgccctctgcacgggcagcaagtgggtgaaatgcaattttcgccgcatgcacctgctcagcggcctccagcgccggctcacacacgtcaccctgccgtcttggggagggctgcagggtctatttctgtaaatattaaaaaaaataaaaatgaaaaaaaaaatccaacaacaagagcccatttaggcctaaatctgtatgggccgggacccatatgcgtcgtcctcgcagctaacggcaacagcccatctggaccaaacggggcagcccgcgtcgcgtcgccgagcgtgagagacgacagtgacacgtggcataaaacgacgctaagcctatcccgtcgaaaatatccgcccgcggccgctgcttcgccgcaatccccttctccgcctccgcagctaagctaagctcgccgccaccgccatggggatggctccggtcgcgacctacccgtcctcctcctcctcctccaccctcgcgcggcctccgtgtgcggctgcggggagggcggcggcggcgggccgggcacgcgtcgcggcggccgggatgtcctcgagggcgtcctccttcgtcacgggaggggcgggggggctcgccgtggcggtggccgcgcggacgagggcggggtcgggggcggggtcgcgtgggggaggcgcgatggggtgcaagtgcctgttcgggctcggcgtcccggagctggtcgtcatcgcgggcgtcgccgcgctggtgttcggccccaagcagctgcccgagatcggccgcagcatcggcaagaccgtcaagagcttccagcaggtaagcaatcgctgatttaatgcttagagatatatgaatttaccaattaattgctcccctattgcttgacacgatgaggtctcaaggttactccgagcgaaatttctgttagcgctaatttgcaatgttagaaacgagaaccatggatacaattctgatgatttgaaacgattcttgtgattagagaacatcactactctgccatttgaatatgcccatacgcgaggtttagccgttcaggtcacttttcagtgcactacgtgttttcgtctataggaagaatatcacgctagctcaaagatttgtgagtacatttttgtatattttgaagctaatctgggatttgtaggtttgtttatgtgccactttttccttgtgtcagaagtttgtggattgtccaatgttgtgacagcacaaaaggtggcatttggctcagggaaatacatgggtttatgaatgaagaatatgaaattatgttatgtgctaccttttgtaggctttgagttggaaatgtgggttctacaagataagtttgtgtttcattgttacacaattgtttagagctacagtaacatattattgtgcatttgttttagctgtttcattgacacagttgtttagaaatagatgatcatggatttaatgattttgaaatacagtttattttggttgttgaaattgggcataccttgatttagcaaatttaggacctgctacagcatttaagatgattatagtactgaattgtttccttgttgaatccttgacaatacaatagaacagtcaatcaaaagcatagcaatcagtaggagcatgctttaacgctatttttatgttggtcctaatcaaattgcttgacatttgatcatttgggttctccattatctgatcagctacccctctgtctggatccctctgatgtaaaccacttgtgtctggtgaagtagcgaaagaacataactaattccgagtagcctacatgttcacttgaccagttctgtctacatgtttagatttctttttgcatttttgcaatgtcatcagaaatgcaatgtgaattatagatgaaacatgtaaggctgcattcagggagcatttggtgaactttaccacttgaacaattagaacatctctgatcatccttagatataaaaaatcactagtgttgagaggtatccacagttccagatttctactgttaggttgatataatttgttaagtacctgtctaagactaatagactattaagccgcattatcacttgccaatagctcaagctacttttcatgctccaagggcttccagtgttgtactctgttgtgcagtactttatcaagttacggtgtgatactacccttttgaaagcagattatgctatttccggtttgtaactggttcactgacccatttacacaaattcactcaggcagccaaggagttcgaaacggagctgaagaaagagtctgatgatggtggcgaccagcccccgcctccaaccgagacggcggttagcgacggtggcgaggagaaggagctcgaggcgtccagtagcaaggagagtacatgagggccagtggagaatggcgagttagaattgtgtatgtacaattgtatggatggtgtgttcctttgagtagcggcacatttctccctctctttttgatgacgatcttgcaggtgatgtagcgatgttatttgtacccgggaaaaagaagaactttatgtgaaaataccattattatttatgaggataattgtgtacatcagtttggtatgacctctatgcactaactcacattacagaaggatgagctattattgattaacataagttcaggtgggtttctttcttttgtgcaaatttaagtgccttcttggctaacctgtcgactataatcctcagctgattttgaattttagaatttgatttttattgactaatttatggggtttgttttgccacttttgtgcttatctcgttttccaagattgctctcaggacaaggaaaaatgtacatagagttattcctaaaaaccaaaccttaaaatttaaaaccttttaagctgaaacaaacagttccttagtttggaatgtactaagaagaaagggataagaaaaaaatgcgcagaaaaggggaaacaagagcataagctcggatttttttttactgttttttttattattgaaatgcaagcctcaacgaaatgacgaatttcggtaaattttgttcaaaatccaatacaagtcgagcagtttggaggagctctgaattcaggtgaacgaatttgtgaaagtgccatttacgtgggccccacattgtcagtcaccgcagcttggaaaataaactcacgtgctatatccgcttcactctcccaggccagtgggtgaaagagggagaaatccaaacgcccgaaaaatctagccatggttctcctcgccgccgccgccgtcgggccacacaaaaccctaaaccctaccctgagcccgccgagctccggcggccgccgcccccgcctccgcttcccgctgccccttccgcggggcggccacctccgctgctccgcggggtaccgcgaggcggcggcggcagcggcgtcgacgtcgtcgacgacgacgacgccgcggccgacggagatcccgtggagcagggagctctgcaactccgttcggctcatcgggacggtgggcaccgaggtggagctgcggcagctgcccagcggcggctccgtcgcgcgggggcgcctcgccatctggaagtcggccaccgagaccacatggtaatcgccccgtgatatgccgtagcgctcgcctcggttccatctatgcgtctcgttttttcagtttctctgtcgttggattggatgccggcaacgtgttgggccgtgtgcgccagtgtagcatgtggccaatgaactcggcattctggcgatatatgcagaagaggaagattttgtatctgttttgcccaactctccataattaaatggggtttgattttttgcattataaataggttgttgttatacaatgtgcaagagtctgtgtatggttgctagctgcacgtttggtgaaattttactaagaattaattgaactaaattgttatctacaatgacttgaataattgaaattgagttattgaaaagagcactctatttgagcagcagcaaaggtttaagatagatgtcccatttagcattggttttctgtctgtttggttagctgtctaaaggatataggagtaaataacgtcacaagattttgaaacacattggtcaacaaatgagttgtggcctcttgaaaataattagccaactaagcatgagttggaggtttggagctgtacctccttcgtgctatgtaagactagttctttagcagtcgtttcagagtcatacaccttaaatatttgtggttttattacaagtttcattattactataaattgtttccgagtgcttaatgattgtagtgatgctttagggtgactctagcattttgggatgacctagcggttgtggcttctgagcatgtgaagaagggtgaccgaatatttgtttctggacgccttgtgtcggacactgttgatgagggccctgagaaacgacaggtttattataaggtataatctctggtaatatttctttctttgagttattttgattcctttccatgcttttataagaagaatcatatgtttcacaggttgtggttcaacagttcaatttcattgagtcctttcagcaagtgcagttatatgagccagaggcaggcctggataccttaggtatggatgttatgtagcctgtaacatctttgatactatcatgtgtattataaaacggcgggtttcaaattcttgtgatggagtagtgaactagttgaagaataccagttccagaaggccatactatcacatatgtaaacaaataatatttcaattaatgttatctgttttccctaaaagtaaagaaatagcacagaacattgcaggccttagttcagtctttgaatactcttgaaaataatgaaaggtttgttgcattctgaatttctggcaatgcatagcataaaacttcctttcccaaatattttgtgcggaagtttcagaaaacccacatataagcattagttctcacacaaccctaatggagaataattgcattgtgggttgtctgtgtggtctaatgtgtgatacatggtcaattaatatggaattttctacaacttttttcattaaagatgggattgagtggagctcttgcttatactgggtttctgaaactcagaacaaaatgtatggtggaaaatacaagttaacttacttacttttctgtatgtaagttcttcaaatacaagttacttcacttatttggctgctatgtagctgtttaatactttagtgatttaagaaatatagaagagaagttaactcttttctgtataaccaaggtggaaagcatggagattatgttggttctacctctggctcgagtgagggtaaaagtagggaccatgttgactcatcctcccgttcaactgaacagttgtggcaagccttctttgctaatccttttgactggtgggataacaggacaaataaggtaactttcttcttattgttcatttagacattcaaatgcattatcttgtaatatatattacatgataaacggactaatggcttctgttcttgggtaaaccatctacctccttttaggagggtcatatcctactaagtactgctgcaaagatttgagagcacttctaatagtccaaaacttctcagataattaaaatactactatatgaagtattaatggttcatggagtttggctgaacattgtaaaacagaaacattgaaggtgtcaaatactcaaatgtaatcatgaaggataaaaaaaaaaggaagttgcaacatagtcagcatagcgatgtggctatattgttatttgagtcatgcaattgttttttggggttatttctagtgtcttgtaaaattgtagaaaccacccaatcctgaatttataaacaagttcagtataaatgaaatatttatctggttttccatcaagccagcatatatgctgtaggttacttgaaaaacctgcttgtcatatacatgggtttgcttcaaaccataaaactgaacatgctcttgttgcatcagaataagtttcaaagtattctttgttattccctccaaagaaagtatttttagttgtgtggcacaactagtgcagactaattaatagctagatgcctcagtgcaaccatgccaaccacttttggtcagggcactagtggaacaaagaaattctaaaataagtagatggataatctatagtgaattgtgaagtaaaaaatttttgtattaggagaaacaaaaggagtttgctgtgaattgtcaatccttagtttttcctttatttagtttgtcagaatttagctgtttgtgtttctcctaatttttttattgaatttaattttgatatctgtatggtggtctgacctcagtactattttaaactctttttaattttgctttccagattggctgaccaatttgaattcattcttacagtcaactattgttttgcattaaatatctgtccaggaattatactccctcttttgccttttcactctccatttatgatttatgaaatattgccatgggagtaatagggactactttgtttgatttattactggagaatctccaaatgaagctacttttcttgcatttgtctcgcgataacttgcaaaagggttaccatgctgtatcaggttgtgaaatcccatgccctctttcttccacaaagctttatcatggaagttggttgcagttcttatttgtgcatttatttgtttggtcaataattcaggttcaatacatgtctttttcaagatgttctggagatttgttttaataatgaatacgtactatttatggctacaatgtccctcttatgctacattttcactgattggtgtgcatgtatgaacagaagaacccgaggtatccagacttcaagcacaaacacaccggtgaagcattgtgggttgatgggaggaacaatccaaattgggttatctcccagttggcaattctggactcgagaatgggttctcttcaaggcaatgataggaaaccagttgcctttatgtatgctgatgacttcatgacacctgacaccgacactgaagcccatatgtgaaaggaaacctcccattcaccgatttatcatagcactatgtattagatagaaaatgtactactgcgatagtgcacctgcgctccttcaattttgttgtacataggtagaatcgtgaagtttaccatagaggcgtgcggccatctgttgtagtcagtagtaatgacaaatgcagatgtagtaaagaatcggatggccttcccttaaatttgcctgagaaacggtgtacatcacttggtgtgtttgcatcagctgagcctcaactgacaagtgacttaattacattggcatgctcattggcttagatggtgcaacaatgcaatcatcatcatatctgccatgagttgtgacctgtaaaaaactatgagctctcttttgtttcacattgcccgagtgctcttatgcttccctaagatgaaaccacatatccaggtacaacagatacacgatcctgcttgtttttatccgtatggcatatccatatcttgctgcgctgtcgtgtgtattgtatatctgactgctaaggcatacgctgaaccatcgagatatacatctctaccgcttttgatacccttctagttgaaacctgacatcaaatcagaaatctcacaggaggaaagaaaaaaaaaatctctggagagggacacaacatttttgtttaatgtccaccagcacatggagctgccgttccaagagctccagcaaccaaaccaccgcagcagcatcctggaaggcagagctgaagaaagaggttagcattgcatagtactaccttcaatttctttttccttgcatgcattgatttatattttcctgtaggaaaatgacttgtcatcaatttgttgtgtggattaaaagacttgatgaacaatcagttgactgactgattgagtgatttgataatgcatatcatatatattcatatatatggtgccaatggatggatgcttctgtatacagcttttgatctctccctcatatgcatgtgcaccacatgtatgctgtccgcccatagttcgaccattgcatgtgttaacaaacagaaatacagggggcttgagtgctctgcatgggctgtgcttagtttcttgaccggtcttgatgacccatctaattaagctatcaattatccccatttctttgccccctctgactttactggtctaggtcagaattggtattggatccagtgatcatcaggcatgactaaactttaactaatcttgtagcacatggtatatgtagtacttaagtagttttgttctttggaaacgtcgtagtaaagttaatcatttgcttagttaaggcttttttagttcaagtcaatttgttctaacaaactgagctcaaagattcagatgcaattgcaagaagttgattgcaaagttaatcgtccatgtgtgctacgtatacaaagtgaaacatatgtgtcttctcaattaacacaagtgaagcaaggaaacaaaaaggaaattaatttaagctgcatgtcttgagtcttacgaagcttagcttccggttgcaattttcttttcccgttttccctttgtatgatcagtttaattatttggactcataaacggtgaatcatatcaaccacaatatagtacacaaatcttaataacaaccgatatgtatagtacaaaagcattgaagcgatagtaaaatccacaattaggagacacaataatcaagggcaagggaacgagaaccagttcatctttcccggcctcttgttgaaatgatttgaagtagtatagtagtagtaaccaacaatcaatatataataactgtttcgtttgtacatacacatggagagttgaacccaaatctccacatctcctttgtgctgctaaaatcataaaattaaaacctactagtttttaaagatggaaacaaagcagaagcacatccatgtgtttgctttgatgcccccaagctcatctcctttttggcttgggaggaaaaaaaataaaaagaaatgaaaagttgatggaatgcatcgatcgatctcttgtcgctcttagattagatcttcatttgccttggtgatcctagccctgtggcttcagatctcttcatgatcctcaacttcttgcatgtgctggtgaacatgctgcaaaatcaaacagcaaatttaatcagtttgactgcaaatatatatataagcaaattactaattaattaagagatttgttgagatgaaaagtttgtgaagaacttactcgaaagggacgtcgccgacgagcatgaggtcgccgtccttgtcctggtaggtgatggcgaactccgacgggttggcaccgtcggcggcgccggagaagcagacgaacatggcctccagggcctcgcggagctccctgtagcccttgtacatcctcaggtcgatcttcctcaggtacggcgccccgtccatgctcaccttcaccagcgacccgccgttggccgccgccgccgaggaggctgccggcgccggcgccgcgttcttggtgatgggctcgtctttgttgttgcagctgctcacggcggccttgctcttgctcgccgccgctgactgttgctggaagcagctcttcctgtacgacctcaccggcggccacccgaccacttgagccctgcagggaggaggaggaggcagtcgccatgtcagaactcagaaccctagctagcttcatcgtaaaagtcaaagatgatctctggaaaagctagctactcacttggctaccggcggcgcggcctcgacggcgtcgtgctcgtcgtcgtcggcggcggcggcgttggcgttgttgtcctccgccgcggcggcgcgcttcttgcccctgggcgtggagggcaggtcgtcggctgtcccaggcaggcccagcctgagctcggtggccttgatgaggctgtcggcggcgtaccccacggcggcttccatttctcgcttcctctctagctagctagtcgtacgtacgtcggcttgccggagacgatcgatgtggttgtgagctcgagagccgatctatcgacgacgaagaaggaagacgatgcgttggctgtgatgagatgagggggtagggtttggaggagtgcaagttttatagctaggggggagagagagagagaacgccatggatggaggtcggggtgggcaggatgccgggtggggcggagacaggtggggcccgggcggcggcgacgcggatcccccggtcgccgggccacgccgcaccggggccgtcggatccggtggcagcccatgcgttttttcttagtgtggggcccacccaccacggcccaagccctatgctaggctgtagtaggatctcgcgttacgcgcttttccgggttcatattctattccccccgccgcgtggccacatgccaatgttaactggttatcggctatttacactgttttctttttctttttttaaaaaattaactttatccggcttgattataagggtgtggagtattttatttaaattattatgtcccatggaattggctttaataaattagtaatgtggaatttttgtgttcgatcaagcgaattagtcgaaataccacaccccgtcatagatagatccggtaacccggaaaattgttgatacagagacatagtgatcaggcatgtaggagaaagaaagaaaactagtgtgaaatgattagtaggatgagctatacatgaatgaatgatgattagggtaatgggggagcatctcttgcacattcggtgctgttccctttcggccctattgatcatatggaataatggagctacatatacatatagatagatagatatagtcatgagtggattgtgtgggcacgtatattgccggcccgttgcttgatttctggtgcaccctacctcttcttttcatttcattcttgagtgtattacacttgactcaatcgaacagtggatccatctatattttgttctgtgtctagggtttcaaacctatcggaaaaatagtgcaaaactcagtgccggcaaaattccgcaatacaatgtcgaattctttcagaaattttggacttgcagatattggcaaaatttagcaaggaggatattctctatggagggtatgtaagtggttcgcgggagggaattttgttctgaaacttcgagctcgagctattttgtgtcataaatatccatcactttaagcttttttttaatattgtaggtatccacatatatacataaggtgccacaaaaccacatgaaaaactactaattaagccaaaaaaaggttattaacaattttaattaacaaagcctccctatgatctacaaacaagatatttcaaaatgacaatggaggctttgctgaaatttttaataaactccatacatgcgggttttctatgtggtttataacactctggatatgtggtttataacactctgcaatcgatgcaggctagttcacttacaaacaaatataagtggtgcaatgggagaaaaagttgttgttatacaataatatctagttacatatatgtgataccgtcatgactctagaaggcgcctcacgatgaaaaaatcgaaaagaataaaaccaacaatgcaactttagacatatactccctccgtactcgtaaaggaagtcatttaggcaatgtttaatcaaatattgggaatataaattatgaataactctcaagttattgagtttgaaaatgtaaaagttatatgaataggtttgtcttgaaaaatacttttataaaagtatacatatatcacttttcaataaatatttttatagaaacaagaagttaaaattgtgttttggagaccgtgtcgctgtccaaaacgacttcctttacgagctgtacggagggagtatatataacataaaataaaatttgttgtacacataactatcattacttaattcctttcaaaaactatcattacttaagccctctcaatataatcccccgggccttgatctcctcctcaacaagttgtttcactttattcccctttccctctctccccactcactatgtgcatcgcattactaaatgagatacttctgtttggatgatcccttttgatcttgttcttgcttcttttggttgggaaagggtccaacaaaaactagtgggagttgtttgtttcaaaacctccacacaaagcattgatgcactgtgttacatcctaattaaaaaaagtgtgtattcacacatatgttagttaattgatgggaaccaaatggtcccccttgctacgtttttggctagctagctaattaactcagaagatatcatggaagttgcattgggacaagttggagcaagatatatcttttcaaagtcttgtttacctgacacattctagaaagctaaagtgcatgggatgctttcagactatattatgaaactcaaaaaaagaaaaagaaaggaaaccactttgccctgggtcaattctcctgcatattgccattaaacaacagttacagctaccaaacttgctagttacggaagatacttaaaaaaaatgtaatactacaaaagttacaaattcacgaatttagcgtagctcagctgcttagatttcttgtgatgaaacctgctcgtctagataagagttcaagttctaaatttgacatgagtacgctcatgtctgtagctattaattgttttagtggcaggtgatcgacgtgcctgttgatagcgagatgactgcggtgactttgtcaatattaaaatatgttggttaagtttctcggaggtgctcatacaagtaggattatgtgtacgtatttatagagtgtgtgcatccatgtacgtacatgagcatacgttagcgtttgtatactaaaaagagaaaaggtcctaaatccaataaaatggactaattaattagaaaaataaaattcataataaaattctagtggtgcttgcaaacagtgtccttccactatgtattttttacagtatttaagcaagtaccatgaagtactatgttacttatatatttctagtattaattaatttgtgaatgcatgagagttttcttttaaggcagcaaatcaaacactagcaatttgcatagtatgtgtacatcatcgaggagcatatgttgatgatcaacaataacaaatcaagcattgcagttgtagcatccagggatgtcaaagcagtgttttccattcgctttccaagacaatatcgattggctttcttagctagttcgtatactcaacaataatcaatttccccattggggttttgaaatgaaacttcttcattcactatatatatgcttaaaaatatgtatacattgtctgaatctcatatcaagaacatatacatatataaaagcctaacaacagttaattaaggtctaattgatgaagctaattatggagaagcaagacaccctatatatatggagctaataaccaatacatttatatatgagccatatatataggccttgacctagtatatacatgtatctaatctaacctcttctcttaattctttatatgctgagaacttgagatgttcctgccgatgtcgacacatagtaatatgctccatgatcaaaacaattaatttgctatttttgcatctgggtgtgtatgatatctttcctattgtcagcatcaatacagtccaatctagccaataagctactagtattttattggtggtaaacttcacccttgatctgataaacttgttcaacaaacgcgctagaatcaagcttgattccctgtcacaatgctatcgtccatacatgcatgattggttgcatcaatgcagagcttttttttttttgtcaatagctttgctatagcatttgactattgcgagataccttctgttcctgcaacctcctgcagacacaacctaaaataacaagccagtgcttgtgctgatcatgtacactcgagtttgtaaactatatatgtgtttttcaactgcttctctttttctttatggaatattgttgttgcctgatcaatgttcaagcttagcagtgagatgcattaatatgtgcatgtactaccgtccatgtcggcccacagaaaattaattcctcggattctagatatggtctgctatgcatatgagattattctgataagggcaccgactagctgtgcacggtgctttgtgctgatgcagtgcaatgcaattagacatgttgtgtttgatgtactaaatactacatgcatcttggttcccaaataaattagtgcatattatagcaagtttcaattcagttaatttgtatgctgtaacaagatcatgcatatgcatgatatgtgttgtagtgacctcctgctacatcacaagcatttgtatattataataaggatgttgtatcctctttgaaggccggctttgcatcaagatcatgctccatgctttgggtgtttggctgttgatactgatcttcataggaggtccgagccgcttgatcattacctagtgataagattagaaccaatggcttatgatggatctcggtatttgtgccgtcacaaccttttgtttttttttctcttcacatggtttttttttcctcgatgaaccatacagttgtaaaatttttggacccgattttctccataatcaaggttagttctttacttcttaattaaaagtgagaactcgctgccatttttagaggtactagttatatataggcccacgtgttgtaacgatttctttatttagtttagtgggaggatttagactaagtgggatttttttttacaatggttggttttttgataaatcagtttaaatttttttgggcggtttttatgggtggaaagagatttaggtggatgtggaggactccctcttttaagtagtagagatatatatctttgaaaaaactagtgcatttgcccataggaacttatatagttttgtttgtaatctagttcaaattaaataaaagtatgaattacccctaaactattgtggttgtctgaatctcccctaacaattgcggatttgtggtcgtccgaattaccccttgaactcaaataccatatatcttacatcctcaactattcaaag

SEQ ID NO: 21008 - DNA, 3938 bp, Oryza sativa
tgcgtgaaacgtacgtacaccgatcgatcgacaaactcatgcctttaattatcatcttgtcgatcagtcatcgggaaaaactagagctgattttttttttaaaacacagggcagagcatagaccgcttataagcatgcgtacactcacctctctctatatatatacacatgtacacgttaccctataagtttatttgaaaagtgatacatatcatgagattcacaaagttacaacatacgtcttcgctatcaacaagcatgtcgtctattattgaaaaataataattagttataaatacgagcatatacatgctaaatcatgaacttgaacccagatgaacaaattccaccatcagaaattaagctacgctcatttcgcaactgacacaaattaattaactacacaactaattgactcaatgaagctatttacttagctttcagccacagcttattttctttgttctttcaactatgcctcggtccaaaaccggttactaccggtccctcaaatatattagaagagatttgcttcggtctagtaaaaagtacttcaaattgccggtacctcacggtgctaaatcgttttcgaactttggaactaactaggtaggatgggcattggtagatccaacgatcggaaacgatttggcaccgtgatgtaccggcacttttagatactttttgttggaccggggcaaatctcatatcagaaacatttacatttcatccttgatgagggcaccacgtggtatcctagttatcaaattaaaattttgaaaaagaaatatatgaggtggaaataagaggaaaaaaggcgtgaagatgacacgtggattatactatatttttgttacttaattattattaattggtatagtagtatgtttgctatttgcccatgtacgtatactatatttgctattcagatcgaaaatcacctttacttgagtatatatagggatgaaatatgaagaaaaaattcgatatatagttgagaaaccaatagtaaacggatttactatggtaggaaaaccagaccaaggccatttttgagggaccaaaagtgaatgtaatcccaatttttaccagtgcttaattaattactattccgtcatgttaatttcatgaccctagctagctagattgggcctagtgacggatctactgttgggactgttggtgcgcaagccccacgtccatttcctatccctaattagccattaatgattctcattaagtttaattagtaattaatataaaattgggatcccgtgatgatagttgaagtgcttagtgcctaaaattgcaaaacactcagaatagactataccaatttatttgtagacttttaatacatatattaatgtagatacaaattaaagtggagaagataatatgtttattttataatgtgtatttggatttcatctgaaaatgctaagctgatattcctctgttcgtcaaccgtggaaacgtagggttgcgcccattcgctccacgccattttagaagaaataccaattaagccccggatcatgagatcaaagacaatgctatcccgctatggccgcctactcttccatatctctagtttgctttagcgccattttaatttacattctggattcgcggctgagagtgagagaggacctatttaagcatatactgctatattattcatcaccggccattccttaccatttcttctccctctgcatggtcagtgctcacaaacgaccaatcccccaaacgcagcaacaccaagcaaaagcaaaagctatagtccttcactagcttagctagccaagaatcgggagcttagctgaaacctgctgctgcattggagaagatcgaatatggctggcctcgggttcgacgagaccgagctccggctcggccttcccggcgccggcgagctggcagcgaggagctccggcaagaggggcttgccgagaccatcgacctcaagctcaagctgcagccggcggcgcctgctgccgtctctggggaagagggtgctcaggaggacaaggaagatgccgacgcggcggcggcggccgccgacgagaagatgtcgatgaagaggtcggcgagccagagcagcgtggtcaccgcggagcccgatcccgacaagccgcgcgcgcccaagtacgcactcgacctctcctctcctcgttaattaatctccatttttgttgttattttcatgaacttgtgtggtcttaattcttgtataaagacagtttaatccttgaagagtttatgtttgctctttgtttcatcttcttgaaggatattaaatccacatagtagataggactgataaatggaaagctagcgagtagcgattcaaaagtatattggcaagtgttttcaagaagagccattagttagccctgaaggaatgaagtaaataaatttctgcagttttgggaaaagactgtaatttgatatctaagttttttttttgaagaacaaatttgacatccaagttaaaacgaaatgaagtcggagaatttttcaagtggcagctaggcaggagctagtttttggtctctgtagttttgggaacagagacattaggatcccaagttggatactctggcaatgatggatacaatattcagtcaaaaaaagatgatggatacaataaacgaacaagaacaagctttccagtatgtagcagtagagtactatccccgttctgaaatattactacatagaatagtatttgactcatccaaaacaatgaatctggatagaagtaatccagattcattgttgtgagatatatgacgatagatcaaatctcatcctaactactccctccgtctcagaatatagcaatttagaatggaatgagatccattttaggataatgtatccgaacatcccatcctaagttgctatatcctaagtaatatttagggaaggagtaagttcacgatagcttccgtgcgtacacagaggagcagcagtagaaaaatggccatctgatctgaaaccaacaagccattggaacttggaaagccgtttttctaaagaaaaaacatttttcatttatgtagtgcacagtaactggcagagacatggcagtttgcttgtcgcactaatttacacaaagcttgcaaattaaaataaagcattgtacaaaatggagaaaaggtgtcagcttttctttttctatattttttttacgaggcgtagctacagatgcttcgtttatcattgaaagaaaaattagtcgtaataacatcctctggtgtgaaaggatagacgagtgttcaaagacagggagcttcacatccctcaactagcggcaaaaatcctgaatgaaatccatatttggatggcatgtggtgcaaagaatcttgcaagaatagcaccataacatcctctgctataattttttcttcttttttttctgctacccctgtcctcctgctcttcttcttaaatataaaactagctcggctggctcagtttttttaaaaaaataaaaatagtcgtaataagcatagtacttcaatccagattagatagatctcaccattaaaaacctaactagttgagcgacgatgatgtcaacttttcattgattaattaattaatcagaatgcatatatgtcgatcagggcgcaggtggtggggtggccgccggtccggtcgttcaggaagaacgtgctcgccgagaaatgcaaggcggcggcgctggtaaggtgagcatggacggcgcgccgtacctgaggaagatcgacgtcgccatgtacaagagctacccggagttgtccatggcgttccagaacatgttcacctccttcaccatcggtatatatatatatacactagctatatatatatattcaactatatatgcatgatcacacgatataataagtttctctttgtcactgtaatagaactaataaaatcaa

SEQ ID NO: 21009 - DNA, 535 bp, Oryza sativa
cagtttatagatgtttcttgtgaaaacctcaaccacacttgctgcagtataaggatgtgacaatggtaggaaatgcgcaaacttagaaaacttgtcaaccactaccattatgcagttgtacctctctgaaactggcagcccctcaatgaagtccatcgagattacttgccacgcaccctcaggaactagaagtggtcgtagtactcctggatatataaccctctctggtttagcctgaaggcaaacttgacattgtgacacatactacttgacttgctctttcattcctttccaagcaaacaagtgcttcaattttccagaatgacctccaactggattatcatgcatttccacaattagtttgtgctacaattcagagttgtctcctacccagagtctgcccttataatgaagcagaccattctgaagggaaaaatgctcgcaataggctgaacagcaagttcagtaagcaattgagaagaatattcatccttatcatacccttgaactacctcatgtatccacataggaactc

SEQ ID NO: 21010 - DNA, 5679 bp, Oryza sativa
cctgccaccctatacttgggcggcaagctgacgtggcagccggcggcagacggcgccgcattttgcatttaggtccttgcctgcaaaatgcgcagagccaacaaagcattggctagggttttttttgcatctcagtcccttacagctgagatgcaaaaaaccgagccaaaattgtattgataacactttaaaaaatatttattggtaaaaattgttaataataatttataaattgtattaaagttggttgtttcgcaatttcatattttaggtaagagttcatgttgtattccctctgtactcctaaaggaagtcatttaggataatgtttaagttaaaccttaggaatataaatcatgaataactcttaaattgttgagtttgaaaatgtaaaagttatatgaatagatttgtttaggctttatggaacgaagaacctgacaacgatcaccgcctccgcattttggacgggattcccatggagggagtgccgtagttagcacctgtcagtcgcactattattcacgacgttatcgttcgtaagctgcttttctctgcaagtattgctcagtactttcggatgagaaataccagtgtcgtttcttgtaaacaagtggttaggacgagaacgggattttctgtatggacccactcgatgtattcacaagccgtagcgcaggtctgacgaatagagtgggagggtgaaaaataaacaatcgctcgtacaaactgaataagcatatgcagataataaaatacctcacgattatagttagggcacctaaaaaagcgtcttcctcgaatgccaggattcatcaaagccattagttggcatcggtcaccacaaaggtagagaggccgctgacaccaaggtggtagtaggtatgcacaaggatcgctacgccagttcggatcctcaacaccccggcgtctagccattgccgaaaggtggtgggatttacaataaaactagtgaggacgagagtattgaatgtgacttatgaaagtttttgccgcatcgctcattacgggggcttatgtaggcacggaaatcacaatgataatcttgacatgtctacatcatggggcatggtgggtcgcactgattggcgccgaaagttagattggacgtatgcggatgtatatcctgccgccctgtatatgggcggaataaggccttccgccttttagagagcggcatggcgccgaaagtaagattgggcgtatgcagatgtgacatgtaagattggacgttttggaagaataagggcgtgagaaggcattccgcagttgtatcgcactcgaataaaggaggctgcatcaatgcgaccgaaagtactcgtgcatgcgccgaaaggtatcgtgctttcgcaaaaagtaacagcgaagtttaaggatgcgaaaactgaatagcaacaaccagagttcattgtacaaccaaatagtactacatgtaaagtaaataaacaaagagaagcctgctctactggctctgccccatgccacgaccccgcttggtcctctgggcatgcgctcgcacgtgatcctaggagtacatgaagcgattcggtggcatagcacgggtagcacgaggctctagcagcaggggggagggcgactggtcctgcgtctgcacgggcacacctcccagctatgagggaccaatgatgtccgctgtggtatcctggaagtcgaagtcgctgatgtcgaagtgcatggcggaagcccacccgtgctccggcgatgtcccggcagggtccaaggtttggtggaccctgctgtgacatgctggctgcctgtgacgaagtcccggcatcctgccagaactgcgcagagtgcgaggccgacgcagctgactaggacgctaaccgtgacgcctgcgagaagtgagcggcctatgtcgtcccgaatggagcaaagcctacacatggacgacgagacccttgtaagctaacacataaattgcatatcaattgattgtcgatatagtgttattttttttaagtacctatgtggggcccaaaaggaggcgtacctgtggaaggcggggtggtgaatggcgcacaaaaccctgaagcaatcggaacaattaattaacatgtagtacgtacctccgtagggagggggagccggcctaggaatgtgcgcagctggacgaggaccagtcggtcgaggtggctgctgtggtgttgcgtttgcctgagcgacgtcggtagcacgacaggtgagcgcacggagaaccgagtgcatcgagcgtgtacgtcgtcaggtgctcgtctacgggtaccgcaatccccgtgcctaaatgttggatcgtcgttgaagcgtcaacgacgaccctgttgcactcaacgacctgcacgattaatttgtacgtaaataaccgtaaatatttgtaacatttgaccaagagaaagggttaggaggcgatggtgcgatgaagagtactcacagcatgagcaaagtcttggtcgcggtgcctggcgtagaggtctctagtgctcgcggtgtgggcctgttgctccatgggagcgaaggtgaccctagtacgggtgcgtggctggtaccagtgtaggtaggcctggtacgcctcctcggtgtgtgccactcccacatggtccacgacctcctcggttgcgagcaaccagtcctcgacaaaaggccccaacttggcgggccagtcgccagctaactgctgacccttccgcgagtacctgcaaattaatgtatcatattagtttgaattcacatatgaagcaaaatattgtggagaggtggatgttaatgcaacaaatgaaagcgtagtgaaatctcttaccagtgaatggcagctgggacgctcgtcggaaacggtacttgaaaggactaacggaagccgaactgccgcatcacgcggtaaggtgcgtgaggctcaacacagatgtcgatggccatcggaaccgtagtcatccagtacgcctggtcccttgtgcagagtgtggacaggcccaacggcgcacgactgtgggtagccgcggcaccggaggggatgcagcagcggcagcgctggacttgtttgttttttcttttttttagaatttgtgattcattggatctgatatgagatatataatgtgtgatgtatttgatttgtgttgtatttttttttgagaatttgtgatgtgaatctatgatctgtgatgctactttgatttgtggatgatttagggatatgtagggagcaactcgatttggaaaagcaaaatgtagtgagcaaagaaacaataaaaaaagaaaaaaaatagtgaccaaccgggactgccgctatcatctttatctttagtcccagactaaagatgaatttttagtccaataatccgagactaaagatgggtatctttagtcctggttgtataaccgggactgcaggggttatgaactgtgggtaaaaaccctttctcgagtagtgtaaagaggggggtggatgggtttgcattctgtttggacgcagacagaaactaaggtcctgatagcttcatactccaaatctatgctagatttatagtttgtaagaattttacatttggtataaaataagaacagtaattcaccttgcagaaaaaaagaacaaaataattcttttaaatattgttaaaagatagtgcaaacgtagacgcacgcaatgtacgaacgctcatccatagttgcttatattattttgtacgctaattaatgaaccgtgttctaacagtagttgattaaaatttggaagcatttttatccatttttacaatgtgcttgaatgaagaaaaaccccattctcaacaactgcgccaagcaaccaaacattttctcatgatactacatccgtatacttttaaaataatattaccatttatcttaaaaaatagtataaatatactatattcatactttaaatttttttaatgataaagcaggttcacgtaaaaatagatagtaatatttatataaatattttaataaaacgaatcattaatgatcaaaagtcaaacacaccatctattttaaaaaatgtaaacggatggagtaacccgtctaggaactaaggacaacgtgagccgttggatctaaaagaaaaaatgggctggggatgcgtagtacatcaagctgggctgggccgaagatcggtagcctaccatgccctcgcggtcgcggacacgcggcggcgacggcgacggcgacggcgacggtttgccggcgggagatttgaagccgggtgtcatccggaacctgcccaccttttcccgcctgctaatcaacaaatggcctcctgtgttccgccaacgattttcttatccattcaggtaatcatcagttcatcatcctattcgcattccttctctcctttgttttctgtatcgacatttttttcccgcttcctcgtatgcaactagaaatctctgtaattaatccattaagtagaagttcgccaataccaaacctgcgatcgtacaagtgaatgtaatgcagtctgcgccactgatctatgtcggccgccaactgttcgacgaaatggcaaagccaaagagctgaaaagttcgacaatatgtctgaaaagttgatgtcagttgtttcttccctgagacggccaagatctggcgtaggataactgaaggctgttccctgaagttttctatggatgtttgttttctaccaagagatgttctttgagctgcttttagaggtgcttttgcttagtttcgttttgtctcctgttgtctgtaatcttttggggtctcaaaccttgtgttagtctgtttcgttccccagtatgggtgttgtccttaaactgtaaatgggtatcccaataacctgccgcttttggctttctataaaagccgggcccgagtgcctaagttctaaaaaacaaagccaaagagctacagtaatccttcataggtaacctcctagatgaacacaccgttggtttcttgcctcagaatgtcaatacatcaattacatcgtgatgtggtttgcgttccagattgacgcattttgcatgttatgaagtgagaataacccgtttggaaaagcaagggactgacccttctccaccaaatatttttagcacacccagaatcattgttccagtcctaaccagaaatggattgtttggatgtgctccaagcctaaaacgtgtgaggggtattctgccgaacctaatgaacatatctgctccagctactgtagcagtgtggcttggatttccctatcacctcagctggctcagcatatttaaacaaggttcgagtctttgctcttgggaacctgaactctacagtcgcatcacagggcgtgtccaccagaaactctcggtcgctgatgtgttagccaacaaccgatggatccgcgaccttcgtggctccttgggcgttcaagcaattttgcaatacctgcaggtttggtcgatggtgaggtcaatgattctctctgagggccagcctgattccttcatctggaggtgggaaaactcggggtcgtattccacccgctcggcctaactcgccctcctctcaggaaggattccatttcagcatctacctatctggcgttctctcacccctcctcgatgtcgctacctcctgtggttgatcgctcatcgccgttgctggacgattgactgcttggagaagcgaggcttaccgcaccctacctgtt

SEQ ID NO: 21011 - DNA, 731 bp, Oryza sativa
ccggatgcgcgggagtctgtagggcgagtgacagctcgtccttctctctgtcgggtcggaacgtgccctgagaagaggcttccactgcgtccattagtcgactcgcagcctcgcgtatctgatcgctgaagaccaaggagccatcaactgggttgagcgttacaccatgagcatagtaccagaacttcgatcgatcaggccatttagcggtggccggttcgatacccctctcaagcaagcttgcctccatctcctcccacttcggcatcgcgacgctatagccgcctgaccccaagtggtgatggtacttcttcttggcggcattttctttgtttctttccatcatcgcctgcccttgttgacctgtcttgtaagcaacgaactcgtcctagtgatcccttagcttcgggaatacgtcgaagttcggtgtctgccccttcaggatgtatttccggtacagatctcccttgaaggtctggaactgttctgccattttcttaagagtccactgtttcactatgttctccgtacccgcagggagcgtgaacgtctcgagcattgtggttcacagcatctctttctctgatttcgggacaaagctgtcattatccccgcgtgcccttgttctgcgctagtacaccttgctgacaggcacgttatccctcacaacccaaccgctgtggcgtacaaaattcttggctgcttgtgccggggcactaggtcggctgtct

SEQ ID NO: 21012 - DNA, 687 bp, Oryza sativa
cttcaccgaccggccgcctcgtccgccgactggtgtttccgcctgcacggctggcctttatgccgccgttgttgggcgtctacgtcttcaccgaccggccgcctcgtccgccgccgactggtgcttccgcctgcacggctgggctttatgccgccgttgttgggcgtctacgtcttcaccgaccggccgcctcgtccgccgccggctggtgttttcgcctgcacggctggcctttatgccgccgttgttgggcgtctacgtcttcaccgaccggcttgccttcgtcgccgccgactggtgtcctcgcctgcacggctggcccattatgccgccgttgttgggcgcctacgtcttcaccgaccggcttgccttcgccgccgccgactggtgtttccgcctgcacggctggcctttatgccgccgttgttgggcgtctacgtcttcaccgaccggccgcctcgtccgccgccgactggtgtttctgcctgcacggctggcctttatgccgccgttgttgggcgtctacgtcttcaccgactggccgcctcgtccgccgccgactggtgcttccgcctgcacggctggcctttatgtcgccgttgttgggcgtctacgtcttcaccgaccggccgcctcgactgccgccgactggtgtttccgcctgcgcggctggcctttatgtcgccg

SEQ ID NO: 21013 - DNA, 2025 bp, Oryza sativa
cttgggtcctaatattcaagtttggtgatataaaaaacctatgaaaataatttggtgatgatggtgtggatattatgggtaccccatacccatacggcatggttatccgactagtcataggggataacttatatatatggaatatgtaacagatcatgacttgggtattacgtttccttatatattacggaacagcctaaagtcctggtttgataatattgtaaagtagatttaggaaaccgataccgtattggttaaggtttctatcttgtaatcctgccccccaccctatataaggtgggcaggaggccctctagggggcatgagacaacctgatcgtcagatctatactacactcggcggattcaaatccccaaacaggagtagggtattacctctcattgagagggcctgaacctgtctaaatcctttgtctctgcatccatccacttttaggtctcgtgcgctaccccgttttattattgccgaaatcatgtttcgacagttggcgcgccaggtaggggttgcgtcgagtttcctatcaacgagcgcgatggaattaacttcatgagtcgccgacttcgttttcgcttcgagagttttcacttcctttccgtcgaccacttcttcaagctcctcttctctgacttgatccaaatcagtcagggggaaactcaatcgagggattacaacaatctaccgcggcaagtttcagattcaatctcctatggctgccgtcagcaccgccttcatcttcggaccggttcttttcttctggagttcggcttgcatcgccgccgccggaaattccgacgggacgtcagtcgtcaacttgatcgtttgacatgccgagtccatcatctgatgatgtcaaatctcctggcgatattcaattactaatctaaattggagtcgacgtggaatctgagccaatcaataggagcaattttcacgcagggaagtgcagcactcatgcatgtattgcatgtctgtcacaagctgccgatatgatctcctgtccacccattaacacatatatacggaggacactgagaaaaaagctaagtgcctttatttttcctctttatgtgatattttccattgagcaatttttttatatctactcatgctaactactcgtccagcgccggacgcctagttttatcattatttatcatattgatttttaatctcagattaatctcttgttattttttgttgttgttcgcatataattacgcggcactattgaggcgattaatgctggtcatggagtcgaggagtctcagctttccggtcgatcggccgcgagtccactttgccggcttgtcttcgccaccgccattgctgataacaacaacgatttcaccgccggcctgcctccgtcgccgccgagtggtgcctccgcctacacggctggcctattatgccgccgctgttcggcgtctacgacttcaccgccggcctgcctccgtcgccgccgagtggtgcctccgcctacacggctagccttttatgccgctgctgttgggcgtctacgacttcaccgccggcctgcctccgtcgccgccgattggtgcttccgcctacacggctggcctattatgccgccgctgttgggcgtctacgacttcaccgctggcccgcctccgtcgccgccgagtggtgcctccgcctacacggctggcctattatgccgccgctgttgggcgtctacgacttcaccgccggcccgcctccgtcgccgccgagtggtgcctcgcctacacggctggcctattatgccgccgctgttaggcgtctacgacttcaccgccgacctgcctccgtcgccgccgagtggtgcctcgcctacacggctggcctattatgccgccgctgttaggcgtctacgacttcaccaccggcatgcctccgtcgccgccgagtggtgcctcgcctacacagatggcctattatgcccgccggtgggaggcgactacgacttcaccgccggcctgcctacgacgccgccgagtggtgcct

SEQ ID NO: 21014 - DNA, 1845 bp, Oryza sativa
gttgggtgtctacgacttcaccgccggcctgcctccgtcgccgccgactggtgcctccgcctacacggctggcctattatgccgccgctgttgggcgtatacgacctcaccgccggcctgcctccgtcgccgccgactggtgtcctcgcctatacggttggttggtcataccaccgttcatgggcgtccacgtcttcgccgaccggctggccttcgccgccgccgactggtgtttctgcctacacggctagcctattatgccgccgctgttgggcgtctacgacttcaccgccggcctgcctccatcgccgccgactggtgtcctcgcctatacggttggttggtcacaccaccgttcatgggcgtccacgtcttcgccgaccggctggccttcgccgccgccgactggtgtttttgcctatacggttggcggacttcgccgctgttaatgggcttcatcatctacatcactggcttggttccactggcgccgactggtgtttttgtcaccattgatggactgcttcgttcccacatcggctacttttgctgtcaccgagggaatattacaaagctaagtcatcatttattttattctttatatgatattttgtcttttccttcgcctcactacatcaactggttcgccgttgactagtgagtcgggggctatagatgttatatcgtattttttaaacaattttcataatatttatcttgattgcttgcgacataatctgagtacaaaagtacctatcgagttatggagttctatgttcctatgctttccgtttggtttgccaatggatggttgcctttgggccgattcctagcacccgggggctcgttggatggaccgagtaacgcaaggtgctaagtattattcggaataaatcaaaagcatagagatgagataaatttattttctgctcttaataattgcaaaagtacccgagtagtaaattctgatccgtgaaactttgttccattaatgacgaactcatgtcactcatatgcatgtttgggaagtgcctaggccgactcccgatgcttggggactatgactagtcgggcagagtgtttaaacgtaaggagtcatctgctcggggaaatcaaaattgataagaggagaaatacatatttataaatattttaaaatacttgattttttctcgagtattatatttatatcagatactactcatcctatatgtttgttctgcaggatccaaatccagatatgcataaaagggattcatggttttaagcttatctcttacgctctaggaatggatctgtcagaacatcaccgaccggcttgccttcgccgccgccgactggtgtttccgcctgcacgttggcctattatgccgccgttgttgggcatctacgtcttcaccgaccggcttgccttcgccgctgccgactggtgtttccgcctgcacggctggcctttatgccgccgttgttgggcgcctacgtcttcaccgaccggccgcctcgtccgccgccgactggtgcttccgcctgcacggctggcctttatgccgccgttgttgggcgtctacgtcttcaccgaccggccgcctcgtccgccgactggtgtttccgcctgcacggctggcctttatgccgccgttgttgggcgtctacgtcttcaccgaccggccgcctcgtccgccgccgactggtgcttccgcctgcacggctgggctttatgccgccgttgttgggcgtctacgtcttcaccgaccggccgcctcgtccgccgccggctggtgttttcgcctgcacggctggcctttatgccgccgttgttgggcgtctacgtcttcaccgaccggc

SEQ ID NO: 21015 - DNA, 1770 bp, Oryza sativa
cacggctggcctttatgccgccgttgttgggcgtctacgtcttcaccgaccggccgcctcgaccgccgctgactggtgtttccgcctgcacggctggcctattatgctgccgttgttgggcgtctacgtcttcactgactggccgcctcgtccgccgccgactggtgcttccgcctgcacggctggcctttatgtcgccgttgttgggcgtctacgtcttcaccgaccggccgcctcgactgccgccgactggtgtttccgcctgcacggctggcctttatgccgccgttgttgggcgtctacgtcttcaccgaccggccgcctcgactgccgccgactggtgtttccgcctgcacggctggcctttatgccgccgttgttgggcgtctacgtcttcaccgaccggccgcctcgaccgccgccgactggtgtttccgcctgcacggctggcctattatgctgccgttgttgggcgtctacgtcttcaccgactggccgcctcgtccgccgactgttgtttccgcctgcacggctggcctttatgccgccgttgttgggcgtctacgtcttcaccaaccggccgccgcatccgccgctgactggagtcaccgcctgcacggctggcctcttataacgccaactgatgctatcttcttcacggctggctacatcgctgtcactactaataggcatcagtatcttcaacacaagctgcctacgtttgccatggctgccgactggtttcttcacttccatggctgcatgattctgccagtgttgattggccttaccatcttcatcgccggtcgtctcgtctgttgctgactagtgcccttacctctacgtctggtttatacagctaccactactgatggacatcatcatcttttgtcgccgactggttatgttgtcgccgactggtgcttttatcttcacaactgcgcgtcttcactaccggtttgcttctgttgccgccgacttgtgttcacttcattacggcaatacaactttgtcatcatggtggagcgacttcatctttattatcttcggcaccggcaaactctattgttgctacttcgcaagttttactacttcaccacccacgacgtctttgtgaacctcgacatctcggcatgcaatgccatgttattttactacaacaagtggctctccaatattcaggatttctacttggacatcttcaacacatatcttcaatcaagtgatgactactcgacaacaagaagctataattctcgactctatgttcagttgtttcccaactaatcaaagagtcgggggctacacaaatacatggctcaaaatttgacaagctttatgtcaagatgaagcaatcaattaatcagccaacaagtcaactctgggagtcatcaattttgtcttcgcttcagagcagtaggtcaagattaaattggagtcatcaaccaatcaactcatatcagattcaatgagttgaacaacagcatatactttcctccaagtgaagcatctacaacagtttgatggattattgtcactgacatcatcaccagcacatctgcttcatcagctctgacattccgcgttgctaatggatgactaagactttgccaacttgctattccgccttcacggttgacctactatgcaaacgctgatgagcgtcttcgtcattatcatcggctattacaccgctattgactggatcaccgacatcgtcatcttcattactgtcggttacatttgtcgtcgccgactattttcctcatc

SEQ ID NO: 21016 - DNA, 2106 bp, Oryza sativa
aaatgtataaagctgaggtagaaaaccaacttgaaaggaaaatcaaacggttgaggtctgatagaggtggggagtatttttccaatgagtttgcatccttttgcgaagagtttggaattattcatgagatgacgcctccctattcaccccaatcaaatggggtggccgaaagaaagaaccgtactctaactgagatggtgaatgccatgttagacactgcggggctttccaaggaatggtggggtgaggcagttttgactgcgagtcatgtcctgaataaaattccaatgaagcataaggaagtaacaccattcgaggaatgggaaaggaagaaattaaatctctcatacctacgaacatggggctgtttggccaagataaatgtacctatagccaaaaagcggaaacttggaccaaatactgttgattgcgtgtttcttggttatgctatccacagtgtgggttatagattcttaatagtaaactctggagtacccgacatgaatgctggtacaattcttgagtccagagatgctacattctttgagaatgaatttcctatgaaacattcacctagcacttctagtaaagaaactgtcatgccccatgagcactttgcaccgacagaacacaatgatcaaacgcctgaggaaaatcctgatgaggacaacattgtagatactcgcaagagtaagagacaaagggttgcaaaatcctttggagatgactacattgtatacctcgtggatgacaccccaagaaccatagaagaggcatattcatctcctgacgctgactgctggaaggaagcagtacgcagtgaaatggactcgattatgtctaatggtacttgggaagtcgttgagcgtccatatgggtgcaagcccgtaggatgcaaatgggttttcaagaaaaagcttaggcctgatggtacaatcgaaaagtacaaggcaaggcttgtggccaagggttatacccaaaaggaaggcgaggacttcttcgacacatactcactagttgctcgcttgaccacgattcgagtactacttgctctggcagcctctcatggtcttctcgtccatcagatggacgttaagacagttttcctaaacggagagctggaggaggagatctatatggatcaaccagacgggtatgtactagaaggttaggagggaatggtgtgtaaactattgaaatccttgtatggcctcaagcaagcacctaagcaatggcatgagaagtttgacaccacgcttacatctgcaggctttgttgtgaacgaagctgacaaatgtgtatactatcgctatggtgggggagaaggggtgatcttgtgcttatatgtcgatgacatactgatctttgggactagccttaatgtgattgaggaggtcaaagactatctgtccaagagttttgaaatgaaggatttgggagaggctgatgttattcttaacatcaaactacaaagaggagatgagggtgggattacacttatgcaatcccactatgtggacaaggttttgagtctctttggctatagtgactgcaagccagctcctactccttatgatcccagcgtgctattaaggaaaaacagaagaatagcaagggatcaactgagatactctcaaatcattggttcattgatgcacttggctagcgcaacgagacctgacatctcatttgttgtaagcaagttgagccggtttgtctcaaatccgggagattatcattggcaggctctggaaagagtaatgcgctatctaaagggcactatgagctatggaattcactataccgggtatccaaaagtactagaagggtatagtgactcaaactggatatctgatgctaatgagataaaagccacaagtggatatgtgttcacacttggaggtggcgctatttcctagaagtcttgcaagcagaccatcttaacgaagtcaacgatggaagcagagcttacagcactagatactgcgacagttgaggccaagtggcttcgtgaactcctgatggatttgccggtggttgaaaaaccagtgccagctatcctaatgaactgtgataatcaaacagcgattattaaagtgaacagtt

SEQ ID NO: 21017 - DNA, 9842 bp, Oryza sativa
ggatggcttatgtcttaatgtgatccgagtggcttttccaagcagagatgttgacctgcagaacatctcagaaggaacacacctatatgagttcgactgctagtcacattctatgaggtttgggcgatctctagatactcatgaaaggcctagagtttgacttatatgctccaaacagaggggatgcgaacggcagcccagtaccagtcaaggttctgagtaaaacctgatcacacaaacttacaattcaaggcatagtccattgttcagttgtggtctgatgtagctcatttcctaggtggaagttcaacttaacagtctccaccaaaaccctggtatctcaaacaggcacaacattgagaacatttcttatgagccttgaaatttggtggggattgttagaataattgggctaggcccaacttataatattaaatctcaaaggcccataataagtgttgaggataataataccaccttaggatttaagcgagaaatatctcaacctaaatagggagttattggaggctccctgttgaccagttgaggtgggggccggaatgccacacgcgcgcgcgcgcgcgccgggccgggccgtgggcgtgggcgtggcgggcgtgcgtgcgtcacgtcacgtcactatccttttgcagccactaacccacgttcccacgattccctccgcaacagcgcgtccacgttctttctcctcctgatagataaggaggccgcgagtccgatccggtttaatcgcttctttcccggtgttagtttctccttctccacgcctgagttgctctcgcttcctcgcttctgatctcttgcgcgcacgagagattggaaggagcagtgcctccgaaaccacaccttcgcctgagttctgcaccgggtaggcgggtgatcaggtttttgtggagtgcctcccgcacgactgctcatcgccatgtctggagttgccgccgccgctgctggcggaggtggtgcgccgccgacaggagctggatccggagctggtgcgccaggaggtgcgtgaacgacaacaacaacagaggcaattctgcctcaccatccagcggagggctattctcggggtataatcttctcctcctgttactgttgttagcgctatcgctatactatgtgcgctatgttcttgttcctgttcttcatgatgcctctagcatgttattgcgttactgttatgttcctgttcctgacattcatgatgcgcatagtatgctactggttatgttaagatcaccctacactgcttatgccatgattattgctttaattttttggattaaaacatgccgattaatgactatatttccaacacaaaagagcgtcaaataagcaattatctctttttaataaatccataggtgaaaaactatgcaaacaaggaaacaaattaagttcacttgcacgccttgatctgcaacaagttgaaaaacactagattccttgtaaaaatatctgaaagacaagttgataggcaacagtattagatagctctcaaatgtaaacatatcttttcatggatacaatattgcctgctttgttgcttaattacattgtccatagtattatccttccatggtaacataatcatcctttatttaattcatacatcactattcatactactctttctgactgttgctagagtgatcaagagtgactgacaaaatattctgccattctataacatggttccctctcaggcttgctgcttcctgttgttgcttccccatatcactaaaattgtaattccaaagcagacaccaaatcccaacccagtgaagagaaaaagtagaacatctatgggatccttcttggaagcatgtggcatgatgtttggttcagatcggtcgctacattgtttagacaatgggggtccgcagagcccaatatttccctcaaaagaggcattggaaaatgtcgagaagtgtgacgattgtggtattcttccagccaacatattataggacaaattcaatgttgcaaggaagttcaacgatgctagctcttgtggaatctcaccagaaagcttatttgaggagaggtccaacgactcaaggttgttcaaattgtcaaactgagttggaattggccctgtaagcatgttatgagacatgttgagtccatgaagcaacgcaagttccccaatgcttgaagggatgctaccatcgaattcattatttgagacatcaatgagcacaagtgatctcaagatcttggaaattgttatgtcattgcctttgtatgtgagtgcagcagtaaactggtatgtctggccatgggaatactgatgttccatgactaaagtctcgttatctgacctggtcatcatggacttgagcatcttaaacaactcttctggcaatgtgccactgaagttgtttgaggctatgtcagcaatccgcaacatggaaaattgacagttgtttccatctctggtatacaaaggatccattattttcccatggaacttgttagacttgaggaccaggacttgaagttcaggaagtttactcatccaacatgggaagtggtcactaatttgattgttgccgatgtcaaggatctccagattcctacaggcaaccaaagatcttggtagctgtccttgaatcatattgccactgaagtctaatgcacttaatgcacaaccttccttgatattatcaggtaactcgccagtaagatggttttgttttagacttaatacctgcaatgcacttgcattttgcgtcagacatgatggcattgagcctgtcaagttgttattagagagatcaagtagttgtaaactcttaattgcatcacaaatcgatgagggaatgtttccagagaggctattgtcggaggctttgagaacgactgtactcttaaggtaactggagaaattaagaggcatagatgagaaccggttggttgagtaatcaagtgtgatacttcctttttgtggtactggtattgctccatcaaaattgttgaaactgagatcaaagtattcaatgtaaaggggaagtaaaggattggatccaatactcgtaaagttattatgtgataggttcaacaagaaaaagttcatcgtccatgtctcccatgtccactgaggtattgcaccttggatctggttatatgaaaggtcaagactagtaatattagggagatgcctcaagatgttagggaagctagatatgctgcaagatgctagacgtaagaagctaatactggggtaggacactactgaagaactattttctccatcaaccacaactagtttattatttgagagattgaggacagaaagattttgcagttttgagtatgaggctagctccactgtgccaataaagttgtttgaatggagcaggagggtttgcaagcgagtcaaatttgatatcagcgcagatacctctcctgaaaagtggcaattgtacagtgccaattctctcaatttcgttaaggatccgacagaagcaggtattggtccggacaaaccacaatggaagaacttgagaacattcaaaaaagtcagatttgaaatccatgacggcatggatccttgtagctctaacccagacacctctagtatacgtaaagatttcagcttaccaatggaagatggcagcattccagagaaaccactagctccaagtgccaactccttcagatatttgaggttgctgatggaagctggaattgtgccggagaagttggtgttgctcacagatatactttgtaagtaactgtgagcagagaaattaggcagttttccggagatcccaagattattagtgaggctaatactagttaatttctgaagctggaatatgatgggaggaaacaccccttcaagcatgttatttgaaagctgaagaacagtaaggttggagagagtagccaggagctcaggaactggaccagacaaatgattgtagtgcagctctatcactgaaagtgatcgcaaggccgagagtgagtggcaaatgggaccggagagtgagcagtacggcatgctaatgacccgcagctttggggaggacctggccatggcgtcgcaccaccgtgcgccgtttctcgacatgttcaccatgcccagacgaagctcctccaggttggtgaggtttgcgagcaaggtctccaagctcggttccgagagctgtgaaattgtgtctgagtagtaatagatgacgttgttctcatcgtccagctcatcttcaaagaatgttgtggacaggtcaaggtaggccaggctcttgaggcggccgatgccaacgggtacccggccggcgaagttggtgctgcagaggtcaagatgggtgagctcggcgagcttctcaaacccagtggctgggagcttggacgcactgaagtcgttccaagagatgtcaaggtactcgagggaggttaggctgaagagtgcatcatcaagacctggggatcgtagccatcggtatcccaagtcgagggaggtgacggcacggccttgggcgccgccgcatcggatgccctcccagcggcagcagtccgtgccagcgatccatgaccggaatgcggcggagtagtcgccggctgttgcatcgaatgagttcttcaggcggagcagcgcccaagcctggcctggaaggcatggagctggctgtgccgatgccgacgagctcgtaccgtcggcaagcgtgctcctggactgaacctgtatgaggaggatgagtagcatggctaggagaggcatggaactagtgtaagcaaatgtcatagaggccaacatgtcggaggttaggtttgttttcagttatgtgagactgatacacaagaagcgaagggatatctatccgtttataatctgtctcgtctagtagcatttggacacgcattagtcaaactttcgatagtaaaaaaagaatcgaatcgtgaatggtattgatttgtatatttgtgttgaaaatatcttatgaaatactgtaattctatcaggtcagtatatatattgtacatataaattagtggctaaaactgtactcccttcgattccattttaattgacgttttgaacaatgacacggtttacaaggtacatcttaatttgatcttatttttctataataatatatataataaataaatgcatgtttacttttattatagtactttcaaagacaaatctatatatcttgttccagttcctttaaactaaatatttttaaagttattgatggtcaaactaataaaagtttgacctcaaccttgtctaaaacgtcaattaatatggaactagagggagtaccatgcatgtagacaatgccaatgtctaaaatgacttattttcctgggtccccaccaaagatggtttaagtccttgcataatttctgaaaatgctggggatcgggtgcccgatgcggtggaaaaaaaatcaggccaccctcctcctccacgcgcgcctccgcctcgcctcccacgtgtccccaccactcacgccccgttgcaacaaatcccccacatattacggaaacaccctattaagggaatccgttttattttttttccaccaataatgtttcagctagtaccctcatgatattttactatgtatggacgaaatgttgcagtgaattgaaatattcatttgcaacaaatcacccacatattatggaaaccctctattaagggaatctgtttcattttttgttccacacaaaatgttttatctagtgtactcataatgttttcttatgtagatcaaatgttgcagtgaactgaaacattctttcgctatttgttgaaacattgtttttatatagactgaaacaacgctcgattttttagaaaccgttgtttcatatgttgtaccaaaatgtttcatgagctgattttgttgtgtttcagctttttaaaagactaaaacattttcgatctttttagtgaaacatgttcgatctacttaggcgcctcaattttcttttttttttgtcgatcttttttttcgctggtttataggagccgagcgagacagcctgggtggatggcaatcaggatgggggcagtgggaggatgggtatagaattgctgtgcattgcaatgggtaaaaatgttttttctgtgatacaataactattaagagctgagcaataaattgcatgtctctctttggcctggcccataagtggagccacaggctcagctcacacacacgtcgtcttcaacctacgaaagaccgatccaccctattaaatccagccaaatccttctcgatattctaaaattggttgaggctttttatctgctcgatccccttttgctatttttttctcgaaattggaataaatccataaaactcggaataaaaacgatcagggaaggtcaccggttggccatcatcgatgactgagatttaatctggcaaattaaagttcaattgaaaggaaaatcgcaaggaaaataataagagaagtatggaatcgatttttgcaattaattgaaagagaacgtttggtgagacaaattgacgatagtgctaggttcgtaaaaaaaactgtgatgaaaaaaaacacacggaccaaaaaaatggagggacagaaaaaatatggtataaaaaaaaccaatgaaaaaacggcgatgagaaaaaccggacgaagcctgattgggaaatctgcaacaaaaacaacaaagcaccgagacaaaaaaaaacagaagctttatgtatatattaattaggtatatatagatatagattataaaaactagctaaaaccaacttagacgtggatgacgtactaaaatcccgacgaaaacatcttcaaatttttaaataatagacatagagatagagatatatgtcatcatatttcataagtcaacatgcggcatatatctaataattgttattcacagttccgatcgatttgcaaaagttttcataacattttttgatgaaatttcatataagttctgtcatgatcaaactaatctggtgcaaagtgagactttatttcaacaaatgctcatcagttgcaaactgaaaagcttgtgctagctacacacccttttagtgaaacaaggtgaacacgatacatactttggttgtgaaatcgagaattaaaagcgaatgtccttgtgtgtttttgggtgtgggcatggcccaggatgattgccgcacagaaccctgtacttgaccgcccgcagttgacctggtaagtcgtggttgctgcagcagtgcggttgaaatgggacgacatcgtaagaattactagttgcactttcgccgtggtcgtgcaggagcttcttgccatgatcagcttcttctgaaggaaagcttgacgccgctacgggcgtcgtcgccgccgccgctgccgtcgtcgtcgaccccgacgcggcggcggacgcatcgcggggcgggagcgatgcgaggaggaggtgcggtgcagacacgatgatgatgatgaggaggaggagcgacgacgctagcccaaccccgcgcaccgccgccatcgatcaccggccggcgcggcgtcgtacgttcccgaaatcacacgacacaattccggcgttagcttttgttattgctggatgaccgtgtaaggcctcctatttgtagggaagtagcttactccctccgttgaaaaaaagacaaactctgagtttccgtgttcaacgtttgactgtctgtcttatatgaaatttttttatatttagtatttttattgttgttagatgataaaacatgattaatactttgtgcgtgacttgtctttttaatttttttcataattttttttaaataagacggacggttaaaaattggatacggaaatccagagtttgtctttttttttttggacggaggaagtatgttgggaaatgaccacatggaatacaacggaaacatcttactcttggatggatgaatatctgtacggttgatcgattgcgtgaccatgaagtatatgcaactaaaccattatatgcacgcatttattacttcaccgcattttttttaaaaaaaaaacagtacaaaataattgttcacaatgcgtgcacactcatatctacgaatacgcacacacactctgtttctatgagcatttttaaaagactggaccgacatatcttaagattaacatagtcagcgacagtctagagccaacatcgctgaactactttctataatttacttgattcaaattaaaaactaatatgtgagatcaatgagttaaaattgaatagtatatgttttttgatttgtatgtgagaggctttttaccgtccttgagggaagacgataccaaatcctagccgttgatttcacgtcccacctggtacagtgttcccaacgagagcaagtacgatcagtttctgaggtgggaggatttcattgtaatttcgcatcaatgcttgtctcgatccagcgacctgatcgtggaccgcctccttcgagtgcttgtacgctgcggcctatggcctccctcttccctctcctaccgagtaccgaccactgcctcctctgttgttcgggcttgctccaacacaccgcaccagtgtcgtcggctaccatcgcctccgatcatgctctagcgcggacaccatcggtcgctccctacttcggtcacgcggtctcctccgctcctcatcccctgcaccttcactctgtctttctctaaaataaattaatccagcccaattgatctcttcctaggttcatttggatttgattttttttccgatataggtgtatatgttcaattgctcgggaaagtcatgtcatctaaatagtcataaaaaaatatgaaaaaaatgacaacatagattaatataaaaatatatcactccacaagcatgcaagtttaaattcaacttctgcaagttgtaacaaaaataacaaatatagttgtgaatgtgcgataactattttcagtttagtttgttatttttgttgtaacttatagaagttgaatttggtcttgcatgtttgtggactgatatatttcgtattaatctatgttatcaattttttttcaagttttttttagtaattatttagatgacatgcaaacaacgagggtatatcccctagagggatgaaattccacatcccaattgctctgcgttcatagtagttctcaagcggtggcagtgggttagacatggcttgcaaggtgttcctgcgtttgcgtgctcacaagaagacagagagcttgtctatggtgatggagattcccgggctgtagtttcctctcaagtatcaaccaggattgacccagtgggcagttaatcggttgctaaggtgtctgaatccagctacactgagggcagctctacgcgcggtgacgccggcttcacttgcaaagatggcagaagggcagcatcaactagttacagcgacagtacaagacggtgacagctaagacatgtgaattttaatcctacccctttcaaatcaagggttaaatggaggtggtacctggtgatacctccctaagaacggtaaaaattcttatcaattaaatatgaagaggaacatgtatgttctttcgatttgaaaggcattcaccatgggttgggacacggaccaagcatcagcgaaatgggttcttcttccaagttttttgatgaattttgactaaattttgatcaaatttcatcaaaatttcactacctagaacgtagcaagttctacttaaaaaatggtattatgcgtagagggagtggttttattttggagaaataaagaagatagacaaattaagtctatgtaggatgaagggagtacgccatacaatgttaggcgtttatgagtttcgtgcgcttgcgctgctgccgaaggaccatgcgg

SEQ ID NO: 21018 - DNA, 14726 bp, Oryza sativa
tacatataattagttaggtatgtaatcatggattgtgaaataaagttaaatttgagttgttttgttgataagtataggtatgaatcaaattattataactaggtatatactcacaatttgaaaattttgaaaaatttgagtgattttgtgcattagataccatggtgcccgggcaccatggtgccccatatgagtgtcctatatagtatatatatatatatatatatatgcgtatgtatatatgtataaatacatatattacacacatatttataatttaaagcacttaacattttatatacatatatgttaccaaaatatatattaacactaaagtaaatatacgtacatatataaatatatatatatacatgcatgtacagtacaattcatttacgcgctagctatagttacgacttcgacacctgcgttacgtcagaagaggaaggaccgacgttacgaattgtcgatccgtcgtagtggaattcaccatcgggattaaggacttcttcattgatgaaccccatcagttgttcttgaacagccgtgataaaatccttgtgtgggagtttttccctcatgtgaatacgctatcattcgaaaaatatgacatatcaatatatgaaattaataaacaacttaacaaattgatacgcaatgaaattttgaatggtttatgtatacgtacatcgagctctcgtgtggtgtatctttggtttgataggcagtgggcatactcgcatacgtagtagccgcataagttagttcccatgtcctgctttgcgcactacatgagaaacgatgagagatttaatctactctttatattaactgtaactagagattcaattcaatataattttggatcatgcatgtactcactggaaaatgaaacctctgtccaagtttttctttccaagtcccgcggaccaattgacggaaccgatcccaagccctacatgtgtagttgcaagctataattaattaaatattacctgagatcaacataatagcaacagagtcgcgcgactttggaatagatggcattatattacctgtctatcagttggaagaccttgtaaaaaaccttctcctctttattcattgagtcatacacagtgactctgcatgcatccaagtcgaaaaagaacaggacccagtggaatctggaatatgcgtgagatgagataaatatcagaatgtacatgttatatgtatgggaatgaaatttgttcgaacggcaataaaaactcactctgtgttgtacggcaatagtatgaacgtcttgaaatgctgctgcgttaggagatggacgagattgtcctctgtgtctttctcgtacttgtcgagcatttcggtgttgattttccgagggtcgatgaacccagtatcgtaaaccccccgccgtcgggccctttgaatctccattctacaacaatgaaaggaaattattattgcttacatatatgccaggagctaattattgaacgaaacaaatcgaactccaagatacttacaaaatccatgcgcttagaagagagacgtcgagggtgtcccgatggtacagatcgaagacatccttgaaatggatccatagaacatcttctccttgcaagaagtcggggtttctgatcctcgctccgaacatctctctaccattggcgctcatttccatgtaccgttcatggaatttgtacatttctgtcggtagggactgcagctggtcaggcctgacaagcggtttaccgagttcaaacttgtatgccacttccgccttcgggattggtgcgcctccaaccaactgagccatgggtagaccggtgtccaaaataaaatccgttatgctaaagtcttcgcctgtcaccaacggctcgaccacttggtgtggttgttctccaagctgaggaactggtttggacttcttgtaataggctttcctaagtgttcggtcacaatccgatagctttaaggcctccttgtttgcggtggacattcccttgaagaaattcttcacgctcgggtcaataggtatcttcttttcaggactccgaggcttgagttgcctcttcacttctcctgccacataagcgtcaagctccacttgactgcaaccgtacggtggctccttgtttttggtggtgtcaactttggccttcttcgttgcccttgtgctggcaggaggtggagcttggcgagaccttgtcttgggaggtgcaggcggacacggtggaggaggaggcggaggagccagaggagatggtgccggaggagacggcggagccggaggagatgctgcacgagacgccgcttgtcgccccgggaggatgatgtaccacttgcgccatagtattgtcacgcccggaaattcactagtattttccgaacttatttgtgcataaaatcctcgtccaggaatcagccgaggtacacaaactgacaatttaatatacaaatccatcataattagctaaaacgataaatacttacttaagaggcacttagtcctcaccatgaagaaaactgcagcggaaaataaaatctagcgaagctccggctcaactcccacaggcagctcaacctgtgtataagccaaacgtcttctcctcctagatcctttttcttcaactgaggttgattgattattgcaagaatgagcatatgacatactcaacaagccacacagcaaatatgcaagtgcaccaggataccaaaggatggcataatataggctcatttgcaaaagcagcatttagcaaaacatttaagagaagtaaaacagtggagtaattaatcagaaattttaatcaacactgaacaatacacccatgttgcacaggcccaaccatcctgaacaaccatacccggctgtacagatctaactccaaaccaggagctaagcaaattattaccaggtataacatccataattattgtgagaggtgtgggactaatcacgaaaaacattgctcaacccgcccataaccgcgggcacggctattcgaatagttttactctggccagaggtgtaccactgtacctacaagacacagcctcaacatcatgtctaccatgcgtcgcgatactggaaagtacccgaatagaggctgtgacaataccctttgtacaacacaactcaccacagtgcaccattcctggatcataatcacccccttataaaacaaggcatggactccccagcgacccccgtgggcttatctccgccacttctcagtctggtgctccgcaatgaatcatgctatacaaaaggtaaagccgttgcccacgctggcttgtggttggcacggttaatatttcacaacagtagctcgcgaaccggtccttaattgtcatgagcacgactctcaaaaccatgtgctcacaacccaccattatcaagttttagttgtcaagtaattaattaaccaatcacgattgaccatcgtgaactatcattaagccatcattaaataataatgagtcataagtaatcccaatagtgtgctaatgtttctaagcatggctaagcaatcatatctaatatctagctgaaccaatatatatagctcaactagttaagttataataacccaaggtatcaaggaataaagtaatcaatgcaaacaggccataacaaaggaatagattcacaccacccagtgacatttgaaaataaatgcacagttgaaataaatagagaatttaaatataggatcaacatgctcaaaggattgtgtttaggatccgtgtgacttgccttgcaataatcggtcttcaattaatcttcttgaatacttccggcgcactcacgaaccttcgcaacgacagaaacgacaagctaacatgcaaaacgaaaaaaaagactaataaaaaccaaataaacaatacataaaaagtaaacaaacatgtagatcatgattttagatgaattatgagacttgaacggcctcattctgacttcaaatgaatttattatgaattttacaagattaaatctaattaaagcccatttaaaaagaattaaataaatttaattctatttatggacaattttaatatgtagatctttattttatacaacttttgcaacttgaaccacattaaactgagttacaaagaattagttatgaatttttaaagattaaaccggattaaagcatttatatggattttaattgaattatgacgcaataatgaattatttttgaaaaggaaaagggaattattgcgtcagcggctagggtttgcggtggaccgggtgcacggcaacggctcacgggaacggacggccgagatcgatcctatccaaaacggacggccgagatcgaacggtccacgaccgggccacggcagacagcgatgatgacgtcagcgatgacgtcagcaccggcggcggctcggcaacgcatgctcgccggtgaatgacggcacgacgacgcaaacggagggcaccaagacgtagagcgcgacgcggcgaactcaccggtgaccaaaacaacggcggagaagaaacggacggcgccggcgacgaggaagaagcggcggcggtcttcgggtcgacggtgacggcagtgctccggcggtcttcggcggcggtgaagcggtggacggggacggcgacgacctcgcgatctcgatggtggcaacggcgaccgacgacggcggctacaacggcggcgcgacgcggctgaaccgacggcaacgacggcggcgactagggctacgcggaggcggcgctagacacgacggctggctaaggcaaaggtggcgacggatagaggagagctcgggggtgcttataaaggggctagcgagcggcgacggaggcccacggtgaccggcggcgagaaggaaaggttagggttcggaggaaagagatgaatccgattcgaggtcgaatccacaagtttccaaaccgaattaggcgagatgattccaaaagagaaaaggaagaggagatcgagatgatcatttcccctctattgatttcaccggatcgggaaaggggcgagcgaattggaaaggagacggcggcacggctcaactagggttcgggcgtcggcggcgcgaggaagacgaacctgacaggtgggacccacctgtcagcggccgagagagaggaggaaggggcgcggcggactgggcggactgggccggggagggagagagaaggttttgggccgcctttcggcccaaagccaaaagaggatttaaaaacatttttctatttaaattattcatgaaatgcaattccattgattaaaaatacttccttggctcaaataaatcccagaaaaatctaggaactatagaatcaagcaaagtatttaatgaaattttatctggccccattttatattgagatttagcaaattaaaattagatcttttcttttaggcttttaagatcatttctaataattccttttaaacaacaatttataatttaaggatttttaaacaagaaaagctcttaacaattataattagattattaatgatcaaataattactgaactgttctttgtatcatttaggaattgagctccgaaaaatccgagaaaatttcagagagttgacttaatcatggagaatttaataaaaattaaatccatccatgctttatatttaggaaattttatttcccatatttaacttcacttgtaaattaaagaacatttaatataaattctaataataatttattaaataatttataaatcctgaaacaaaaatcaggatgtgacaagtataatggcgtggcttgtgtctcgtagatgcgtctcaccgtctcctcccgggtagtccaactcgatgtcctcgtacacggcttccaccagctcaactttgaccctcgagtatcctgctggaatcggcctgcagtggtaagtccctgaaatgtccgttgggatggccattcctgacgccaccttcacgtgatgagaggttatctattagtaatcaacctaagcagcaacttgcggaacgtacgaatcaaaaatcatatattacatcgagcataccttgattaataagttcttaaagggaatatgcagctcacatggtgtccgatgcgtgatctcatcaacggggcaggtggtttcgtcctgggtttgcatggcgtccatgctatgtgatactacctgccccgttgaggcgcagctgctacgattgcctgatgggctgaccattggaggatgtatgtacggctggggatcatgtgaacgatgtgctgccatgcgttcatccaccttccgggccaccttctcttgcatgctgagctcgtagctcgataccctgtactcaagatctgcaatcttcgcctcggtatctctcttgctcctcatccgactcctgtacgtgtggatgtcctccttgaatccaatcttccagggaatcacgcctttccctcgtgttcgtcctggatgctcgggagtttgtagggcgagtgacagctcgtccttctctctgtcgggtcggaacgtgccctgagaagaggcttccactgcgtccgttagtcgattcgcagcctcgcgtatctgatcgctgaagaccaaggagccatcaactgggttgagcgttccaccgtgagcatagtaccagaacttcgatcgatcaggccatttagcggtggccggttcgatacccctctcaagcaagcttgcctccatctcctcccacttcggcatcgcgacgctatagccgccttaccccaagtggtgatggtacttcttcttggcagcattttctttgtttctttccatcatcgcctacccttgttgacctgtcttgtaagcaacgaactcgtccaagtgatcccttagcttcgggaatacgtcaaagttcggtgtctgccccttcaagatgtatttccggtacagatctcccttgaaggtctggaactgttctgccattttcttaagagtccactgtttcactatgttctctgtacccgcagggagcgtgaacgtctcgagcattgtggttcacagcatctctttctctgatttcgggacaaagctgtcattacccccgcgtgcccttgttctgcgctagtacaccttgctgacaggcacgttatccctcacaacccaaccgctgtggcgtacaaaattcttggctgcttgtgccggggcactaggtcggctgtctgcgtccacctcagttatgatgtgccgaccctctatcttcttcgcggcacctcgttgtccgcgtgccctcttctgtccagcggagggatgacttccactatcctcctcctcattcccctccgcatctctctccacgtttccctccttgttcccctctgcatccctctcctcgttcaagtactggtttggatcctcgttcccctcttcttcgttccagtactggctgcttcccgatgcgattgtatcgtacagtatctgttcctcatcgcgatcagccatctgttcatagaagaaatatttgctaagcgtaatattaacactctactaatcttgtattaaaactcaaataatcatttatgctaagtctaagtatcgtgtatttgtacggtagataatcatatatgctaagtctaattaagtttgaaatattacatctctaataatcttatattaaatctctaacaatcaaatatgtttcgaatattacatctctaataatcttatattaaatctctaacactcacatatgctaagtctaattaagtttcgtatattaaacctctaataatcttatattaaatctctaactatctctaacactcaaatatgctaagtctaagtgtcgtgtatttgtacggtagataatcatatatgctaagtctaattaagtttcgaatattacatctctaataatcttatattaaatctctaacaatcaaatatgtttcgaatattatatctctaataatcttatattaaatatctaacactgacatatgctaagtctaattaagtttcgtatattaaacctctaagaatcttatattaaatctctaactatctctaacactcaaatatgctaagtctaataatctaataatctttaacactcacatatgctaactctaataatctaataatcttatattagaaatctaacaatcttatattatatctctaacaatcacatctttacatcacttgcctgcgtgaattccttcgagggctagctaccacttcggcttgagggacgacaacgacgacgtcttctctgcaacatgcaaaaaaaatgtattagtctaaatgcaaaggaacatataatgtatttcatgttttcaagtatatataatcatatatatatggtaagttcaacaatagtttaattatctcgttcgtacacatttcgctcgcgttcgttctcacacttttagttcaagtgcattcacgttcgttaacgtttcaatcacgttcgttcacgtttcattcacgttcgttcgtgttcgttcactaacactcacgttcattcatgtttcagtcacgttcgttcgcgttcgttcgcgttcgttcgcgttcgttaagcgttcgttcgcgttcgttcacgttcgttcgcgttcgttcgcgtttggtcacgttcgttaagcgttcgttcgcggcggcggcgtctcgcggcggtgggggcgcggtgcggcgccgtgggccggcccggcggcgtgggggcgtggcggcgtctcgcggcggcggcgtctcgcggcggcgtgggggcccgacggcgtgggggcgcggcggcgggccacggcggcggcatgggggcccggtggcgtgggggcgcggcggcggcgtgccgcggcggcggcgtaacgttgcggcccggcggcgtacgtcggtgtcggcgtcgtcggcgttcgtcggcgaaagagagagagactgtcacgcccggaaattcactagtaatttccgaacttatttgtgcataaaatcctcgtccaggaatcagccgaggtacacaaactgacaatttaatatacagattcatcaaattaactaaaacgataaatacttacttaagaggcacttagtcctcactaagaagaaaactgcagcggaaaataaaatctagcgaagctccggctccactcccacaggcagctcaactgggatataagacaaacgtcttctccttctggatcctttttcttcaactgaggttgattgattattgcaaggtgagcatatgacatactcagcaagccacacagcaaatatgcaagtgcacaaggataccaaaggatggcataatataggctcatttgcaaaagcagcattttagcaaaacatttaagagaagtaaaacagtggagtaattgatcagaaattttaatcaacactgaacagcatacccatgctgcacaggcccaaccatcctgaacaaccatacccggctgtacagatctaactccaaaccaggagctaagcaaattattaccagttatagcatccataattattgtgagaggtgtgagactaatcacgaaaaacattgctcaacccgcccataaccacgggcacggctattcgaatagttttactctggccagaggtgtaccactgtacccacaagacacagccccacatcatgtcaccatgtgcctcagtaccaccacggtacctcggaaaggggctgtgacagtaccccttgcataacacaatccaccgcagcgcaccattcctggatcataatcaccccctcaaaaaccagaggcatggactccccagcgacccccgtgggcttatctccgccacttctcagtctggtgccccgcaatgaaccatgctatacaaaagataaagccgttgcccacgctggcttgtggttggcacggttaatgtttcacaacagtagctcgcgaaccggtccttaattgtcatgagcacgactctcaaaaccatgtgctcacaacccaccattatcaagttttagttggcaagtaattaattaaccaatcacgattgaccatcgtgagctaccattaaatataaccataagtgatagtgaaacattagttatcccaattgtgtgctaaggtttctaagcatggctaagcaatcatatctaatatctagttgaaccaatatatataaaactcaactagtccaattataataacccaaggtatcaaggaataaagtaatcaatgcaaacaggccataacaaaggaataggttcacaccacccagtgacattcgaaaataaatgcacagttgaaataaatagagaatttaaatataggatcaacatgctcaaaggaattgtgtttaggatctgtgtgacttgccttgcaataatcgatcttcaattaatcatcttgaatacttccggcgcactcgcgaaccttcacaacgacggaaacgacaagctaacacgcaaaacaaggaaaagactaataaaaaccaaataaacaatacataaaaagtaaacaaacatgtagatcataattttagatgaattatgagacttgaacggcctcattctgacttcaaatgaatttattatgaattttacaagattaaatctatttaaagcccatttaaaaagaattaaataaatttaattcaatttatggacaattttaatatgtagatctttattttatacaacttttgcaacttgaaccacattaaactgagttaagatgaattagttatgaatttttaaagattaaatcggattaaaacctttaaactgattttaattgaaatatgacgcaataatgaattatttttgaaaaggaaaagaaagattattgcgtcagcggctagggtttcggtggaccgggcgcacgggcggcggttcacgcgaacggacggccgagatcgatccaatccaaaacggacggccgagatcgatcggtccacgaccggctcatgacggacgaccccgatgacgtcggcgatgacgtcacctaccagcggcggcggctcggcggagcggacggctcgggcggcgcacgctcgccggcgaacgacggcgcggcggtgcaaacggagagcaccaagacgtagatcacggcgcgacgaactcaccgatgaccaaaacgacggcggaggagcaaaggacggcgccggcgacgaggaggaagcggcgaagctcttcgggtcgacgacggcgacggcgctccggcggtcttcggcggcggcgaagcggtggacggggacggcgacgacctcgcgaacccgatggtagcgacggcgaccgacgacggcggctgcaacggcggcgcgacgcggctgaaccgacggcaacgacggcggcggctagggctacgcggaggcggcgctagacgcgacggcgggctaaggcaaaggtggtggcggatagaggagagctcgggggtccttttaaaggggctagcgagcggcgacggaggcccacggcgaccggcggcgagaaggaaaggtcggggattcggaggagagaagtcgatccgattcgagatcgaatccacgagtttccaaaccgaattaggcgacgcttccaaaagagaaaaggaagaggagatctcggagatcatttcccctctattgatttggccggagaaggaaagacgcggccgaatttggaaggagacggcggcggcttgcgctagggtttcgggcggcggcggcggcgcgaggaagacggatccgacaagcggggcccacctgtcagcggctgagagagagaggagagcggcggctcggcggactgggccgacttgggccgagggaaagagaagagagggttttgggccggctttcggcccaaagccaaaagaagacttttaaaaccttttcaatttaaattatttcttaaatgcaattccatttattaaaaatacttccttagctcaaataaatcccagaaaaatctaggaattatagaattaagcaaagtatttaatgaaattttatctggcccaattttatattgagatttaacaaattaaaattagatcttctcttctaggcttttaaaatcatttctaataattccttttaaacaacaatttataatttaaggatttttaaacaagaaaagctcttaacaaatctaattagatcattaatgatcaaataattactgaactgttctttgtatcatttaagaattgagctctgaaaaatccgagaaaatttcagagagttgacttaatcatggagaatttaacaaaaattaaatccatccatgctttacatttaggaaattttatttcccacatttaacttcacttgtaaattaaagaacacttaatataaattctattattaatttattaaataatttataaatcctgaaacaaaaatcaggatgtgacaaatctaccccccttacaaagaatctcgtcccgagattcggaacggctagaaagaaaaacggaataggtaaactgcagtctatcttattattccataactccgataattattctaaggctttaaagaaaactactgcttctttgaaactggtggctgagctgcaacacttgaagacacaactcttgaagatgcaactggcactgcattggctcctgtgacgacaatgttgttgacttgaccttgcggctgctaatgcttcggcttcggacactcttttgcaaagtggcctggcttgtaacagttgaaacatacctgctgctcccttctactactgttattctcctgagtctggtcctgctgaactggcaccggctgattagcttgctcgatgttaacttcattgctttcattagtctctgatttgatctcaccaccgatattcaactgttgcgattgtccttggccagcggaaaaaggttcaccaatttggagtggcttgatacgctgcctctggctactgccttgtgcctcttggaatacagtcattttccttttacggttatccatcctgttcttcttgtcttcaagtcgaattgctttgtcaaccaactgctgaaaatcagcatagtcatgagagatcaacgtaactgacagttcatcctttaagccttccaagaacttctcctgcctttcctcgtcagtacgcacatcttctggagcataacgtgccagacgattgaactcgtgaagatactctgccacagtttgatccttttgcttcaatgccctgaactcacgcttcttcaaagaaacaactcctgtaggtatgtgtgtcttcttgaatgcttccgtgaagtccgcccaagtgattggttgtccttctgctctgttcatccggaaatgatcccaccattctgatgcaggtccttgcaactgatgtgaagcgaacacgactttctcctgatccgtacactggagcagttccaacttcttctcaacagcgtgtagccaatcacctgcttctactgggttggtagtgctagaaaaggtaggtggcctcacacgaagaaaatcagttaacttgttctgcggcggtggagcattgttgttcccttggttgagctggttctgcatctgctgtatcatcatgttcattaactgagtctgttgagccagaacttgagcaagagttgggttcccttcattgttattgtttccacttccactggcgcgagtgttcaccatctgttgcttattagagaggatagaaggagaggggttacactaaagacaagaccttaaccaggttaacactgatctgatgtgtgtagaccattatattgttcaagttgattaagcaagcaacctagtatagttacacactcatcattaatcacaccaatgacgggaatgcaaccatacctacacacaagcaagcaacaagcgttctaccctactaactattctccaaggacactttggcggcataggttctaaggtaggatccaaacttcattccatcttgacatctgggcacttcagatcgaccatcaccttcttattcatcgatccacttgacttaacctccacaagtagaccacattggcgtcttcaagtttcaacaactagtttcagaactactccagttgaaagcaggaggggagaggatgaaaaaatgatttatagagaattctagagaaggaagaaaggaaaattttcacaaatcatgttttcggaaaattagtccttaaggtttgaccatttggcttatcctacagtcaagatggctctgataccaacttgtcacgcccggaaattcactagttatttccgaacatatttgtgcataaaatcctcgtccaggaatcagccgaggtacacaaactgacaatttaatatacagattcatcaaattaactaaaacgataaatacttacttaagaggcacttagtcctcactaagaagaaaactgcagcggaaaataaaatctagcgaagctccggctccactcccacaggcagctcaactgggatataagacaaacgtcttctccttctggatcctttttcttcaactgaggttgattgattattgcaaggtgagcatatgacatactcagcaagccacacagcaaatatgcaagtgcacaaggataccaaaggatggcataatataggctcatttgcaaaagcagcattttagcaaaacatttaagagaagtaaaacagtggagtaattgatcagaaattttaatcaacactgaacagcatacccatgctgcacaggcccaaccatcctgaacaaccatacccggctgtacagatctaactccaaaccaggagctaagcaaattattaccagttatagcatccataattattgtgagaggtgtgagactaatcacgaaaaacattgctcaacccgcccataaccgcgggcacggct

SEQ ID NO: 21019 - DNA, 1697 bp, Oryza sativa
ccggttgttgttagcaaccggcagtgcagatatctttactcccggttcttctcaccaaccgggagtaaagatattttcccgctatttccaaattcttttttaaacccggttagggttaagaaccgggactaaagttaatagcactgaatattgaatttcgttgcatatatgtttctaaaatagtaaataatgcattaaaaattctaattaacatatgtaaatcccacatgcatgatttaaaacttttaaaaattctaataatcatatataattagcatatgcatgatattaaattgttaaaaattgtaacaaacatatgtaaatcccacatgcatgatttaaaacttttaaaaattctaataatcatatataattagcatatgcatgatattaaattgtcaaaaattgtaactaacatatgtaaatcccacgtgcatgatttaaaacttttaaaaattctaataatcgtatataattagtatatgcatgatattaaattgttaaaaattgtaattaatcatatataactagcatattcaatacatccaaaatagtttacaacaattacggcaatagattggcggtgacggttgtccacacgtactttctcctcactattgttccttccttgtgatcgctacatgagtaaggggtgtcttcgtttgataggaggatgctagggtcaaccgtcaccgtgaaagggggttgcccatcaaactgatcgtaatcctcgtcagtcttgtcctctactccgacgatttttcttttgcctgggagaaccacatggcgcttcggctcgtcaggccctttgcccttctttcctttgctagacatgtccttcacgtaaaaaacttgtgttacatcattggcaaggacaaaaggttcgtccgagtatccaaccttgttaaggtcaaccgttgtcatcccactgtcatcaatcgttacgcctccaccagtcaacctaacccattggcaccggaacagagggaccttgagaggtccatagtcaagttcccatatctccttgatgacaccgtaatacgtgccagttgtaccatcgtgtcccatggcatcgatacgaacagcactattctggttcgtgctcttcatgtcttgggctcttgtgtagaatgtgtacccattgatctaatatccctggaatgtcgcgatcgagccagatggacccttcgccaggaaggccagttgttggttaatcgtctcgttacccatgagatgttgtcgcagccacgcggggaaagtatcaatgtgatgccgtgtaatccatgcatcggagttaccgatgtttctggcgcgaactagagccaagtgctcctcgatgtaaggagccaccaatgaagattattgtaaaaccgtgaaatgggctttacggaataaattgttgtctaccgtcataattgctttccttccgagagtcccctttccccgtagtctcccttcatggcgtgattcaggtaccccgattgtgcgaaggtcttcaataaattctatgcaaaattcaatgacctcctctgttccataccccttggcgatgcttgcctctggacgagcatgttacgaacatacttcttcagaacgcccatgtacctctcgaaaggaaacatgttgtgtaggaacacaggcccgggaataccaatctctttcactaggtgacaaagcagatgcgtcattatattgaa

SEQ ID NO: 21020 - DNA, 984 bp, Oryza sativa
aacgaattgccgcagtcctcccacaagtttgttttgaaaaaaaaaaatcgccaccaatccttccggtgataaatgtttgtattcatctatttgccacatgtcacctaacatgctcttgtttcagatttgttcctttcttacaaaaagaatcagtcagcaatgccaaaaggtttcaaaaagatgttggtaaacattccccctatctctaatttgcatgtcctatctgaatgaaactaatttatgcagcacaccagacctagccaaatattgttccactcaagtacagctaaaattactggtagtaaggtttgagcatccatgttgcatcatttttgcatctttgcaacattgctatttccttcagcagattcttaaatagcagcatatccttggacataatggagttcttaaaatgcctggttaatgcttgttgagctggctgaagcctgaaggtgcatattggtaaattaggacttgaggttgcatgataatgttcctagtagaagagcttgatgcatgacctttctatgataaacttggtgtgtgattagaagctagtccctagatcatctttttctttgtagcgaatatgcaagagatgttctaagtgcatcctacctaaaagtttgcagactttggccctgctatttgaagtttctgatggctgagaagaactaaataaaccaatgcctattgagtgttgacttaaacttcaagaacactgaggatggtgtctcggcagcaccagctcttaccagtcgaactagcaaccaaaaaaaactatcatgacttccgattggcgtcaagcttctggtcatcattagcatgcattatggcatcgtgattaattgcactctgagaaaaatggaaaaaaaatatcattttcagaaacaaaagccgagacaaattatttgtgttagggataagaaataattgcttacatgaatccctgagcatcaaaaagactcttcaaaatgtgagatt

SEQ ID NO: 21021 - DNA, 907 bp, Oryza sativa
acacatgtccgtcaaagaaaggcggaacaagtctccgctgtcataaccttttccaacaaaagtcccatatttagatacgacacatttattggactcaaacacaagtctaaaaccttctctatacaagattcttctttattgaagggacatgctgcacgttcttcagctgcacggtctttcccgaagtaaacttcagatcaaccgtaccaacaccatgaacagccgcaagcgacccgtttcccatcaacaaggaggaacctctcccgacctgataagaagaaaacagagaaatgtcagcacatacatgaatattagcaccagtgtccacccaccaatcaggtgaatgaaaaacagagagaactgtaggtaatattttaccgtaccccgatgttcctccgccctcgctaattaccatgttggcagacttcctgtctttgcgctcaggacagtccttggcccaatgcccagacttgccacacacaaagcagtctccctttgcctttcccttgcctttcttcttaaaattggttgcagccttgggtttgacatcaggcttgactttcttgttgttgtgggatgcatgagagttcttcttctgtaccatattggcactagaacctccctcaacctttttgccccggacgtcctttgccctcaccttctcctcaacacccaaagagccaatgagatcagaaacactgaactcttgtctcttgtgctttagagaagtggcaaagtccgaccaagaaggtggtagtttggcaataatgccacccgccacaaacttgtccggcaactcacagttgttgttctcaagttccttagccagcatctgaatctcatgagcttgttctactacagaacggcatcgaccatcttgtagtcatagaactgctcatgacataca

SEQ ID NO: 21022 - DNA, 12575 bp, Oryza sativa
aaacagagaacaataatcatgaagcagggaatagagaatttttcgaatgagattataatttgttggagcaaatttttaacaaaaatcctcatattttttatagggaatgatatgctgattctgtgggtgatactataggctaccgatcttcagcccagctcagtttgatgtactatgcatccacagctctaggaataagttcatctgaggtccttaacttatcaacgaatccaattttcatccttcaaccagaaaaccagatacaacaggtctctcaactatcaaaaccggtgcagaaaaggtccctcggcggttttatcaaaaccggtgcagaaaaggtccctcggcggttttgactgacgtggcgcttacgtggctagtttgactcggtcttcactacaccaatcagctattgcaagcttaatttgacaggatttagtaaatgttggatatgtagtgcaagagaagatctgctggagaaagggtttttaatccggttcgtaaccccctgtagtcctggttatgcaaccgggattacgaatacatctttagtctcggttgagataactaggactgaaaattcattttacaccaaccgagactaaatatggagccaagtccagttggtagttttttttcatcatttttaattttgaatattgatttcactacatccccaaactatccccaaatcgatcatcacaaaacaaaagggatcatctccaaatacatcacaaattctcaaaaaaattatatcacaaattcaaaaaaaacatcacatattcacatcacatacaaattaaatacatcacaaatccaaaaaaaacaaatcttccccagcccggccgccgctgcttctcccaccgcctccccagcccggccgtcaccgccgatgagcccgctgcgagagagagaggacagagagagacaacgagagaagaagtgaggtaggaaaatgcaattctgctctcgggcacatgtgtacccacactcctataccgtctgaccttgttgagattcgtgctgaagcttcatcatgactcagccgtgtgtggtgcgtagatatagcagataccacctttgaaagtcgagcagcccatgccgtatacacatggatcaacggtgcaacatggtggaatgccttcaatgcccttctctcatgcgttggaaacatccacattatttaatgcaccattggtctatggtttctttcagacttgctaatggatatgcggcgtagctcgtcctccatcttttgcgatttcgaggcatcaggggccaattttcaggtgcgcttgtgggaagccggctgcacggatcctatccgagacggtgaagaactacacggatcctaaaagttgtcagctgcatttcaagccaaacatgtacagtgcccatgaagatggtagcgaattaaatatagggtgtgtttagttcatgttaaaattaaaaatttagttaaaattaaaacgatgtgacgaaaagattaaaagtttgtgtataaaaaaattttaatgtgatgaaataattgaaaattcgaagaaaaattaagaagggcttatttgtgttggataggactgtattttttgacgcagacagcacatagcagagagtaaactgatttgactcattgcagcataggagtactggaaacagtcagacgtataattgcctttctggctatcattttgacgaagaccgattgggcacatagaattgttacatccactcagtccttggcgaccgcgtcatacggacgacagggcattgtccgtcgaatgcagcagatgcaagaactcatttttcgcgcatcttgacaccgccatcggcctatataagggcactattacactgtagaatatatatctattaactttataagttcatagaaaaaaggtccttcacattcactcctagggcaacaaaaatatatataacaaaagtagtccgtataaatctagatatatatatggactttaactattataaccttcacaatgtacttcctccgtttcacaatgtaagtcaatctagcattttccacattcaaattaatattaatgaatctaaatagatatatatgtgacggagcgtggggctcctcaccgggggaccgcgcaggcccccctttgccggttcggccgggggcgctaagtgaggttcttcaccctcaatctgtggaatgttcgcgagagaacaaatgcacaagacacgggcgatgtagacaggttcgggccgctgagaagcgtaataccctactcctgtgttttggtggatctgtgtgtgaagaagttacagagagccggagaacaagagagttcaggctctagaacccctcttcctctttctctcctctacgagttccggtattctcagtgtcgtctgagagtccccccttcttcggtgggcaaggtactccttttatatctcaaggggataccaaatgcaccacttctacctactcttcttttgggtggggacccaccctatcttgaccaaaacttggctcgcgcctttgcctggaagctaaatcacagcttgtccttgagtgaggcccagcgccgtcactcgcctgacacaggggataaccctgtcattccttcattaatgggtagagatttgcaatggccgctgtccgaatgaccctccgatgggatgggtcatacctacctccactccgccggaagcagatgcaacgtgggagcacggttgtctgccgatgacgtgaccggcgtcagaccagtcacagaccggtcattcttgtccaccgcgcgtcagtttagcacgccgcacgtctgcccttcttcatacaatgacttccttgccatggttgcgatgaagcctggaatgaatctggccgggactgacataccaactccaagagttagcacgccggctccggctagggacgagtgcctggaggctctcatcattccgacgggacggggcaaggcgtgtgacaggctgcctgttgccacctaacccgcgatctgaccggcctgtgaccggtcacacactgcgatcggtcacggaccggataagcacgcactgcgccgcattaaatgcggcgtgacgcgctcgtcaaaccgctataagtgcggttaggtgagcgccgctgtgctcacctaacccacacacgtggcgccaaaaccacagggggtcggggcgccccagccctcggggccgaagcgggagcggcccgacccctcggggagacagagggaggggtggccacgtcaccctcgggcccgacccccccgaggaggtcaggccacgtgggtgaccatagttacccaagcctctagtcactatacccccggccccatgttaccgacagtagcccccggcgttacgtcagggcgatcgcccccctcgagggaaacgctcggtcgtgacgccactccttaggcccggtgacaggtggggccggtccatacaggcgggcagaaacccagcggtcgcaaatcgcgcgcatcggcaagggaaaaccgactgacaataatgagcggcctcttcgagaccgctacattacttgagcagcgcgcgaatcgggacgagccggttcgtttcgcctggagacatgatgatggcgcttttctcggttggcgagcgtatttaacgagcgctcgatctgtcccatctcaaccgccacggccgcacatctgccgcgcgtgccgcaaacgggcgagtggggtcagtggaggcgcgggcgtgagaaacgagggggcgagatagtgggcgcgggaagcgaggagccgggcatagcgttggcaagggtataaagacgccgaggaagggattcgtttccttcctctcgccacacttccccttgccttcgccacttgtgctctaactcttcgtttcctgcgccctacccttgccgcactcgctcgttctcaagctcctcctccgccggcgtcatggcacggggctccgcaccgctcgacggtagcgtgctgccgccttcccgcatcgtgagcgagaggcagccgggctgccgcgccgattcatgccggaatctaccaccggccgggaggtggtcgcgctgggcgagggacgcccggcgccacactacccggggcggtccgtcttcttcctctccttcgcaatggcagggctggtcccgccattctcttcttttttcatggatattctggagttttatgatctccagatggcgcacctcacccccaacgcggtaatgacgttggccatcttcgcgcacctgtgcgagatgttcatcggggtgcgcccatctctccggctgttccggtggttcttcaccgtacagccggtgtcgccgccgtcggtagtcggtggctgctacttccagccgcggggaccggtgctgaaccgctacattccctgcgtcctccgcaagaagtgggacgactggaagagcgactggttctacacccccctcgccgacgaagcgcgcctccgacttccgagccagcccccggcgcaggcctccagctggcgggcgacggtagatctgggagatggctacgacgccgttcttgaccgcctggcgggtctgcgatcccaggggctcacgggggccatggtgttcggcgactaccttcatcgccggatcgcgccgctccagcggcgcgcccggggcgcctgggagtacaccggatccgaggactacatgaggacccaccaggggcgcaaatgggactgggtccctgaagacttcaagatggtggtccaacgggtgctgaatctcagctccgtggaggcatccctcatcccccaaggagtcctccccctctgctgcgatccagagcgcgccaacatcctgaccatcatgcaggcggtcggggcgtcgggggagcgggccctccaaggccacgatggcgcgggcgggagccgcaggggggaacaatctaccccaggagggggtcgtgcttctgggccccacgacgggggcccggggggcagccgccctgccgacgcccgggggaagaggaagcaggagggtaccccttccccatctcctccccgagggggcggggcggtgcgtgccagcagcaggcgcccggagggtgccgtgccgacgccgcagcccgagggggagcggaagaagaaacggctccgcaagatgggggggaccgagccatgccgggggaacctcatctcgcccccgaggtggtcgtttagccgacctccccgcaggttcgtccccgcgcccaccgcggccgtattcattctcccatctcccaaggcgagttttcactcacccgtttctttttgtcttctggtttttcttctgcctcagcgagatcctgttgcgcccccccccccccgccattccaagtccggccggtctgaggccaaggagacggcgaccgcggaggcccggaggcgggaagctgatcggcgagaagccgcggaccgcctccgggaagccgaggaagctgcccaggaggccgtccgggttcgccaggctgaggaaaccgctcgggaggaggccagactccgccgggccgaggagtccgtccgggaggcggaggcagcgcacgcacgccaggcggcctgccaagcccccgacccgactccgcccgcggcgacgacgacttccgaggccacccacgatgaggccgcgggcgcaccgctcgggcccgacccctcgggcgacgctcgggacgagccagcttcgggggatgcccccgagtccggcacgtcgatcggcgggccgagccgcgtggcacccacaccgaggcggctctcccctctgccttccgctgccccactgagcgcggagcccctcctgcaagccttggccgccgcgaacaccacggtgctggacgggttaagtgcccagatggaggtcctgcaggcagagcgggcggagctcgacgcggcgtgggcgcgcgtcgaagaggggcggcgctcggtggaggccatggtggaggcgggccgcaaggcacaccgccggcacgcctcagagctcgaggcccgtcgtagggaccttgcggagatcgccagggaggtggaggaggagcgggagactgccctcatcgccaccgccgtgttcaacgaggcgcgggatgacctccgcctccaatacgggagccgggcggcggagctagaaaagaagctcgacgccgcccggggagtccttgacgccgcagctgcccgggaacagcgggcggcggagaacgaggcggcgtcccggcggcgcgaagaggcccttgagggtcgcgccacggcgctggaggagcgcgcccgcgccctggacgcgaaggagagggagctggcggacctcgaggccgccgtcgccacccgggaggcaacactggcggcgcacgaggccgcctgcgccgaagaggagtccacactccggagttcaccacgccccggggcacggctcggttctgggccccttttggcgattttagccggcccgggccaccgagggcaggatcgagcacgagcgtgctaattcaagccaagattcttcaaaaggaaacaatggcacatacacagtccttaggaaatcgaaaatgcttttattgaaatacggaagagaaaaaagataagtatatgcatgtggtagcccccggccaaccctgcacgcccggggggggtgcggggttggcccgagcccgagacctgacacccgacccctactaggggtagaagcgatgaaggtgttcgatgttccacgggttaggcagctctgtgccgtcgcccatggccagccgaacggagcccggccgggggacgccgatcactcgatacggaccctcccacattggtgagagcttgctcagtccagcacacgtttggacgcggcgtaggacgaggtcatcgacgcagagtgatcgggcccggacgtgacgctgatggtagcgccgcaggctctgctggtagcgcgccgctcggagggccgcgcgccgccttcgctcttccaagaagtcgaggtcgtctctttgaagctgatcttgatcagcctcgcaatacatggtggcccgaggggacctcagggtgagctcagatgggaggaccgcctccacgccgtagacgaggaagaaaggcgtttccccggttgctcggcttggcgtggttcggttcgcccagagcaccgctggcagctcctcgatccacgagtcgccgtgcttcttgaggatgttgaaggtcttggttttgaggcccttgaggatttccgcgttggcgcgctccacttggccattgcttctggggtgggcgggggaggcgaagcagagcttgatgcccatgtcttcgcagtagtcaccgaagagctcactagtgaactgggtgccgttatccgtaatgatacggttaggcaccccaaaccgagcagtgatgcccctgatgaatttaagcgcggagtgcttatcgatcttgatgaccggataagcctcgggccacttagtgaacttgtcgacagcgacatacagatactcgaacccgcccggggcccgcctaaagggacccaggatatcgagcccccagacagcaaacggccacgaaagaggtatggtctgcagggcctgggccggctgatgggtttgcctggcgtggaactggcacgccctgcaccgccagaccaggtcgaccgcatcgttgagagccgttggccaatagaaaccctggcgaaaggctttgccaaccaaggtgcgtgaggcggagtgggctccgcactcgccttcatggatatcggcgagaagctcgacgccttgttcccgaggaatgcacttcaggaagactccgttagccacgcgccgatagagggtcccttccaccagcacgtagcgcttggagatgcgctggacgcgttcactcccttcgcggtcctcgggtagagtcttatctgcgaggtacgcatggatctcagcgatccaagcaaacaatctaagggagctgggagcgctcccctcgggtcccgaggcctggactccgacgggcctcgggggccgttcaggcgcgtccgtctcccctagggggtcgggtcgcgccgacggctgggcaaccctttcttcaaaggcgcccggtggggtctgggctcgcgaggaagcgagccttgagagttcatcggcgaccgcgttatcccgtctgggcacgtgccgaagctctatcccgtcgaaatggcactccatacgccgcacctggcgcacgtaagcgtccatctgcgggtcagagcaccggtactccttacagacctggttaacgactagctgggagtcgcctaacaccaggaggcggcggatccccagtccagctgccaccctgagtcctgcaaggagtccctcgtactccgccatattattggtcgcccgaaagtcgaggagaaccaggtatctgaggacgtctccgctcggtgaggtcaacgtgacccccgcaccggcgccctgaagagacagggagccgtcgaactgcatcacccagtaggcggtgtgaggcagctgcgaggggcccgagctggcctcggggacggagacggcctcaggagctggggtccactctgccacaaagtcggcgagggcctggctcttgatcgcgtggcgtggttcaaagtgcaaatcgaactcagagagttcgattgcccatttcaccacccgtccagtaccctctcggttatgcaagatttggctgagggggtaagacgtaaccaccgtgacccgatgcgcctggaaataatggcgcaacttcctcgaagccatcagaatagcgtaaaacatcttctgagcctgtgggtatcgggtcttggcatcccggagggcctcgctaacaaagtagatgggccgctgcacctttcggcgaggccgatcctcttcgccaggggccgcatctccagggcgctcttcgtccgagaggccgcgcggggcgccctcggcttctgcgccgataacctcggggtcagaggaagacaggcgcggccttcccgcagtggccccggggccatcctgggggtcgggggcgcctggcaccgtcggacaagcaggcggagggccagctctggccgtcgggggccttgggccaccgttcggctcgggggcctctcctccctgctctctcccgggtcgagtcgacacaaggtggggatgcgcggagtgagggttgtcctcgtcgcgctccacgaccaacgccgcgctgaccacttgcggggttgccgccaggtagagtagcaacggctcatctggctccggggcgaccaggactggggtagaactgaggtacgccttcaactgagtgaaggcccgctcagcctcctccgtccaggtaaacggcccggagcgtttgaggagcttaaataggggtagcgccgaacacgcacttgtcggggttcagctttatgcgggcggagcggagactttcgaaagtttccgctagatccgagagtaaggtctcttggttgcgcgtcttcacaaccaagtcatcaacataggcctcaacattacgtcctatttggctacccaaagaaattcgagtagtacgttgaaaagtaggacctgcattctttaacccgaaaggcattgtcgtataacaataagttcctatgggggtaatgaatgcagtttttgcctcatcctccctagccatgcgaatctgatgataaccagagtatgcatctagaaaacacaaaaggtcgcaccccgcggtggagtcgacaatctgatctatgcgtggcagggggtaagagtccttaggacatgccttgttaaggtcggtgtagtcgatgcacatccgaagcttgccgttcgccttgggaacgacgaccgggttcgccagccactccggatggatgacctcacggatgaatccggcctctagaagtcgcgccacctcctcgcggatgaaggcttgacgttccggggcctgccgccgcactttctgccggaccggccttgcgcccggccgcacggcgagacggtgctcaatcacctccctggggaccccgggcatgtccgccggtctccaggcgaagatgtcggcgtttgcccgcaggaaggagacgagcgcgtcttcctatttgtcgtccagaagaccaccgattcgtgtggtcttggacgggccgtcgcccagggcaacctccttgaccgggacctcgtcgcacgtgatcatccgctgcctcggggcggctgggacggaggtgctgagcctctcgtcgccacccgcgggcttggacgccgcggcgaggtggtccgcgcgctgctccatacaagcaagcgcgactttgaggtcgccatggacggtgatggggccaccgaggctcggcatcttcatctggagataggcgtagtggaccgccgccatgaacttcaccaacgcgggcctcccaaggaccgcgttgtagggcagactgaggtccgccacatcgaagttcacccgctccgtgcggaagttggcggaaccaccgaaggtgaccgggaggtcgatatgacctagcggccaagtgtgccccggcgtcacaccgatgatcggttgggacagccggagcaccatccctggggccttgatggcgtcaaaggctgcgggggaaaggatgttgagggctgcacccccgtctatgaggacacgccccaacttcacattgcaaacggtgggggaaacaaccatcgcgatctgtcctccccgagcaatgcacggcgggtggtcggtctggtcgaaggtgagggcaacctccgaccaccgcgcccgccgcgtcgcctcatgggtaggggccgcggccagaagctctcgcttcatggccttgaggctccggcgagaagcgtgagcgcacgctcccccatcgacggtggcgacggtggcctcaggctcctggaaccccaggtcatcgtcgccatcgtcgacgtcctcggcggtggccttctgcttggcctcacctcgccggttgccggcgggagccgccggggctctgccctcacggcgctcctgcctcctctcctcctcccacttcctcgtccgctcagccaaacttttgaccgcgcggcagtccgcgaggtcgtggagggaggtgttatgcacggaacaccacttgccggtcgggcgctccctgctgggagcgccggcctccttctttttgtcgctcgcaggcctcccctttcgggtggcccgtgaagcgccctcgacggcgaggacgtgaccctcgtcgtcggaatgggccgacctcttcttcctcctcctgtcccgccgccctgaccgagcggcggacccgggggcggccggagctgccacaccggaaccggaggagttccaggtccaggcctcctccttgcgagccacacggtccgcgagctgaaaaagctccgcggtggtctggggctccttggaggcgatcttctcgagcatgcggttgtgccgcacggcccccctgaacgcgtagatcaccgcgtgtgcggggatgcatggtatggtgttgcggacttgacagaaccgctgaatgtacgagcgaagagactcatcgtcccttcgctgtaccgcatgcaagtccgcttcttcacctgggcgcggatatgtgccctggaagttcatggtgaactgctggcacaaatccttccaagagtggaccgacgcgggtggcaagttcattagccaaccccgcgcctgacctttcagggccatggggaagaaattcgccatgaccctgttgtcacccccggcggcctcgatcccggtcgtgtagatctggagaaactcggcggggttgacgcttccgtcgtatttttcggtgatggtgggccggaaccttgggggccaacggaggggctggcccccgtgcccggaccgaagtggcactccggacgaggaagcgccctccgttgcgtgggcagcacgacgaccattgcgccggcgctcgatgttgaggcgggcatccggccccccacgcacatcttcttgggtcggaggcgttgacgagggaatggcggacgaacggcgggtaacggccgccgctcgccgcgccctccgcctcgacgacacggagccggcggtagcagcgccagaggccttggtggcggaggaccgcccgccggcgcctaggcgctgctgcgccgtcatgaccaagtcggccacgtcatccagccaacgtcgggctggagtctctggatcggggacgacgggcgggtgacgcaggagcgcgcccgcagcctggagcgcgccctggggcgtgctgccatcgccgtagacgaggaggcgacgctccccgtctcgccgtccttctccatcgcccgcgggcggcgaagtcgcggatctttcgaccccctcgagcgcctcctcccgcccaagacttcggcgagagggggacggtggagtactagctcgacggcgcgggttctgctccccgtcgtcaccgctagcgctcggagagaggttgtgcgccactgcctgttcagccattgggctgagcgggagaagcttggcgcacacgaaagaggacgagggcttagaaagacacacgcgccccctacctggcgcgccagatgacggcgcgtggggctcatcaccgggggaccgcgcaggcccccctttgccggttcggccgggggcgctaagtgaggttcttcaccctcgatctgtggaatgttcgcgagaaaacaaatgca

SEQ ID NO: 21023 - DNA, 7307 bp, Oryza sativa
cctaacccacacacgtggcgccaaaaccacagggggtcggggcgccccaaccctcgaggccgaagcgggagcggcccgacccctcggggagacagagggaggggtggccacgtcaccctcgggcccgacccccccgagggggtcaggccacgtgggtgaccataattacccaagcctctagtcactatacccccggccccatgttaccgacaatatgtctagattcattaacatcaatatgaatatgagacatgctagaatgacttacattatgaaacggagggagtatattgatagcaaatagtattaaaaggagaaataagaaatatagaaagcatcgactatagtccataacgcttatacaataaaacagaaggatctttaaaacagaaggcaatagtccatatacgaatagggtgtgtttagttcacactaaactttcccccaactcccaactttccatcacatcacatcacatccaaaactttcctacacacataaactcctaacttttttttttcaaactatcaactttccccaaacttctcctcaattttagaaactaaacacagctagtttaaaaaaaattagaattctgaattaaaaaattaataaaagaataaaagtagaggttagaggccttttaaaaatgcaaatttatgaatacgtaatatattttctgttgtgttgtggtccgtacaatttataaacatcctttttggaagaccgattcggcgcttagactcgtcacatccagtcaggccagatcggccgcgttaggggtaggtagcactggccctcggctagagatgcagcagctgcagaaactcttttcgcgccacgcctcaccaccgcactttcttttgcagtgaaggacttccaaacgatagacgacgaagcccttatgagcttttaatatcggatgcattgaccgcccaatgctatatactccctccgtttcaaaacaaagaaaaagtctaatttttaatatccaacgtttaatcgtccgtcttatatgaaaactttttatagagtaaattgtattggtggtatccaaacttattagctaggtacaatttagtacataaacttgtaaattggtcgttttgatacacgaacttatctaatccgtacgaactaggtccaaaatggcttggcaaggttatttccacctaacttacgttgattaggatgtggcgtgcatacgtatagttacataaaacatgctatatttataaatttgttctctgctttatcttaaatttcatatgtttctaacccttatatcattgctcggttttttatatctttctctacaatcactatatctcattctatctttttattgaacgtgtgtatgtctaagtagcaaccttctcatatatatgtttacgtatatgtttacggacggttcaacatcacatatggatttttatgactgcacttattttgaaacagagtaagtatgatactacagtgtagtgagctcttaagaaaaaaatgattttgcccggtcgaatgctctgcccgacacgctgacacgctgaatgcatggcattgtttcagttgcttttatgtcttgtgtcaccggagagctccgcgccaaatataccacgccgtgtcctatatatgagggtagggacgtcaaaacagccaggatgggtacgtaccttcatcccgtggtcacccatataaccaagtgatgtacaaatacacgtggatgcattgccactgcgtccgcagatagggtaggccaagcaggtacacgtgtcgccgcctcatctagggtacatgtgtgctcgcgtgcagattttccaactcatatatatatatatatatatatatatatatatatatatatataatctgacctaaaatttgattttcgatctcctacctacaaataagaagtgagaaaactccttccttcgaaagaaaacctaaatttaattccaaaaattaaaaatggatcattctattaaattaccaatagaaatttccattttgttccttcccacacacgtgggaacgaggagagaggcggggagcgtgcgattgcgagagaaagaggcgagatcgcactccctttatcaacagagccagaattcgggagatgggaactccaaattctgggtgagagagtaggaaatttgttggagctattttttttctgttaaaatctctcgaacatcagttttgggaatggattagagggactgttcgtgatactcttaggccacgtttaagaaggcctaaaatgaagattaagtagaagcacgccacaatgtgcgcctctccggccttcatccaactttgtaaatgaagtcgtggcccgttgatttcaattccccaatacagtactagacgttatactgtcgttaccaattttgcgggttaaccaccgccgatgctaatcgtccatttcacgctagtgttactttcatctcatgattatctctactttaacagcggagtcagacttccccactatcgtagtcagtactgaataaaagagcgctcccttaaaaaccaccccacccaaaaaaaccagcagcatttcaaagtgaaaatcaatccatagaaaaaccagatagaaaaaaaaaactgaatccaataaaaccttccgtcaatatttaccacaattctgttgcaacatacacgcatggtccaactaaaagttagtcgtgagatttacttcggtctaacgaaaagtctctcgagacgataccaaattatttttgattgttgaatctaacaatgttcatcctatctagctatagatacaacgattgaaaacgatttagtatcgtgagatattttccgttgaatcgaagcaaatctcaaaagttgcttatttctttttaagtagttgcccacttaattaattggttgctactcaccacacattctccgtgtttgacatggcaaactagcaatcagttcaacagtctgatcagattgtcccgcacggtccttcggcagcagcgcaagctagcgcacgaaactcataaacccctaacatttgtatcactactcccttcatcctacagagacttaatttgtttatcttcttcatttgtctaaaataaaagcactcccaggaggaagattatcccgttgttgactatgtgatggtatttcaagccgccaagtcgacaacggttagataagttatcccaaatattgtactggtgtgattatgatgaataagagcaacaccggctttcggccaacaggattagagctattacctgtcagatatgaggcccgaacctgtataaaaatctttgtctccatctcttttacttcaatctcacatataccctggtaccaacgatccccatactatagtcgtgacctgaaacgtcgacaacaatttaaaagtgttaactagggacaaatagtcccttatgcccttgtttatttgatcctattatactaaggaaaaagtacgaattacccccccccgaactatcgcggtcgtccgaatttcccccctgaaccacaaaccagatattcttcacccccaactatgcaaaccggacgaaaccccctcgacccaatccgcggtggtttggactacgtggcatacacgtggcagtccagtcagcattctatttattaaaaaatgtgggacccacatgtcattctctctctattctatctctcacacacactctctctctcctcccggcgacggcggaggcagcgagcgcggggaggcgaggcgagacggcggcggaggcggcgagcgcggggagacgagcgcggcggcggcgatgcgaggtgaggcggcggcagaggcagcgaacgcggggaggcgagcacggcgaacggcggcggcggccccccttctggcatgccgtcttccgtgacctgctcggcgacgacatcttcaactccgacggcgagacgtgggtcgcgcaacggaagacggcggcgctcgagttcaccacgacggcgactgcagcagcggctgcgggcgtggaccggatgctgtgctccggctgcgccgtccactgcttgctgctctcactagaacgggatcgcttatctgtgacgggctgaaagcatcatcactatcgggtaaggccaccgtcactgggcaaaggtcactgatgtgaggaaaaatctcaatcaggcaaaatcccgtcatggatggatgttatctcaatcgggccgaaaacaaagcccgtcacagatgagtatgaccagtcaaaccagcgtaataaggagcccgtcacggatgactaatctcaatcgggaacaccactaagcccgtcagggatgagtagtcatctccatcgggcatttagccagagcccgtcaccgataggtttgaccccacgtattgagtcagactagtcccagttcagacgacttatctctatcgggtgtattctaaaagcccgtcacggatgactaatctctaacgggcaggactctatagcccgtcacggatgagttatctctttcgggcattagctaaatgcccgtcagggatgagtttagaaaaaaaaaatttgtctttttggctagcctcaggcctttgctagccatgcccgctgcaaaaatgacagaagcatatatatacatagtcccattcccagcaaccccattcccagcatcaattcacatattccatcacagccatttcatatagacccattcccagcatcacatcagccaattcacattcatattccatcacagcacaaccaattcacaaaatcaaatacatatacattcacatccacaacccattcacatatatgtcattcacatccatttttctctccaaaccgccgacatgtatcaaaacctgcaaaaatatgttataaattggaacaattttatatgtaactagaaatgtaagtatatacagagacgagctacctaggattttactctaaagaatataattgtattacaaagaatatttacaaaaaccaaatgtttgtcgcatatgcattgtgaatgttctgccattacgagacgaaaaatatttcaataaaaacagccataatacttcaaccatcacaacccacatcaattcatccatcccattggaccaaaaatatcccaaaagttttgcaaagaaccaaaaacaagaacaagtgtagatggtctgttcttattgaaaaaacccaaaaatcacaagtgtatatggtctgttcttatgcattaaaaacccacatttatacctaaacaagaacaagagtgagaccggcccaaaaattcatccattttgcaaaacatcccatacttccactcccccccaaataaaatgaacaagtgtagatggtctgttcttattgaaaaaaccccaaaaatcacaagtgtatatggtctcttcttatgcattaaaaacccacatttaaacctaaacaagaacaagagtgaggccggcccaaaaatgcatccattttgcaaaacatcccatactgccactaccctccaaataaaatgaacaagtgtacatagaaaaacagccatagaaaaacagccataaaaaacataccaaaactcacatttcctccaaaataattcaaccatcacaacccacatcaattcatccatcccattggacccaaaatatcccaaaaatggtatgttcttgagcaatcatcactggccattcatccatcatagcccacaatatttcatcatcactgcccacatctaaacaattttcatcacatcccattctcccccaaattcacaaattcatccatcacagccatataaaaatttatcagtagctaacacatatagaaatgcacaagtcatcacagccatataaaaattcaccactaggtaacacatataaaaatgcacaagtcatcacagccatataaaaattcatcactagctaacacatataaaaatgcacaagtcatcactagctaacacaaaaattcatcactagcgcaagtcatcatacgtagacattagcatctaaacattgaatcaacgaataatcgcactatcacattatcgaatttaaacattatcatcgaatcatcaaatcatcacatctaacatgtacacagcaaatcatcacattatgcatcatcatcggtgaggagtacctaccttgcacggtggcgggctcggtgaggaggttgacgtgggctcaggaacggcggtcttgggcggcactgggctcggggacggcgtggagggaggcaccgggctcggggacagcagtcttgggtggcgcctggctcggggacggcgtggagggaggcggtggctgtcggggaggccggatcttgagcggccccggaggaggtagcggcgtggaggaggtcgacgcggcggctaggacaaggtcgacggccgctgggcgtagatatggagaggaggatgtgaggcggccgtggtcggtgaggccgaatcttcgagggaggaggaggcgacagcgttgaggacgaggaggcggcgacggtcggtgaaatggccgtggcgtcggtcttgaggactaggcggagaggaagccggcggtggcggtcttgggcatggaggacacggacttggagaggaggccggcggcggcggcggtcttgggcgcggaggaggcggtggatctgagagagtgagagtgtgggagagtgagaggcagcgtcggcggtggataaggacccgtggatgaggattgactaagtaaaccctagtcaatcctcatctctatcgggcagactactatgcctgatgcggatgacactcatccgtgacgggcgttagtactctgcccgatacggatgatacctatccgtgacgggcattagaactaagcccgatagagatggaataatctctatcgggcatagtactatagcccgtcacagatgacttattaaaatatttttaagttataaaaatcatttataattatcttctacccgatttaaaattgctattacatttgattatcacatataattaacaaatgtcttatttacatagtttaaaattcctattaattttttaaattcatataattgacaattgcctttctcacatatagtttaaaattcatattactttttttaaattcatataattaacaattggatatctcacatatagtttaaaataacaagtataattttttaaaaccacataattaacaaatccatttcttcaaagagttttaactggaatggcatgaaacatatgcaattcattcattaaggctccaatacaaattaaatacatcattcacagtgatatgccttccgaatggtctgaacgaacgtaagccacttcgtcttcgggatcatcgtcaaggtcgatctgaggtc

SEQ ID NO: 21024 - DNA, 1028 bp, Oryza sativa
cggcccggcagcgtacgtcggcgtcggcgtcgtcggcgttcgtcagcaaaagagagagagacagagagctacatcgagagagagaggacgggggctctcacccaagagacgcggcggcggcgtctgcggtggaggcggcgaggaccgccaggcgacggtgagagacaacggcggcgtcggcgcggggttgccctaggcagtggcggtgaaggagaagccgatgctcgatctcgatggaaaaacgtctaagtgttggtggaggagacgagggcgcaccgggaatatttatacccccggatctttactcccggttggtgagaagaaccgggagtaaagatatctttacttccggttcctaacaacaaccgggattaaagatattttcccgctatttctaaattcttttttaaacccggttagggttaagaaccgggactaaaattaatagcactgaatattgaatttcgttgcatatatgcttctaaaatagtaaataatgcattaaaaattctaattaacatatgtaaatcccacatgcatgatttaaaacttttaaaaattctaataatcatatataattagcatatgcatgatattaaattgttaaaaattgtaactaacatatgtaaatcccacatgcatgatttaaaacttttaaaaattctattaatcgtatataattagcatatgcatgatattaaattgttaaaaattgtaactaacatacgtaaatcccacgtgcatgatacatactttctgtttcatccatacagtgagtgcaagccttgtaccccttgttggactgcccggataggttgctaagtgtaggccaatcgttgatggttacgaacagcagcgctcatagattaaactcctcctgtttgtcctcgtcccacacggggacaccttccttcttccacaacagtttaagatcttcgaccagttgtcttagaaacacatcgatgtcgttaccaggttgcttggggccttgaataataatcggtatcattatgtacttcctcttcatg

SEQ ID NO: 21025 - DNA, 715 bp, Oryza sativa
cctttatgccgccgttgttgggcgtctacgtcttcaccgactggcttgccttcgccgccgccgactggtgtttccgcctgcacggctggcctttatgccgccgttgttgggcgtctacgtcttcaccgaccggccgcctcgtccgccgccgactggtgcttccgcctgcacggctggcctttatgccgccgttgttgggcgtctacgtcttcaccgaccggccgcctcgaccgccgctgactggtgtttccgcctgcacggctggcctattatgctgccgttgttgggcgtctacgtcttcactgactggccgcctcgtccgccgccgactggtgcttccgcctgcacggctggcctttatgtcgccgttgttgggcgtctacgtcttcaccgaccggccgcctcgactgccgccgactggtgtttccgcctgcacggctggcctttatgccgccgttgttgggcgtctacgtcttcaccgaccggccgcctcgactgccgccgactggtgtttccgcctgcacggctggcctttatgccgccgttgttgggcgtctacgtcttcaccgaccggccgcctcgaccgccgccgactggtgtttccgcctgcacggctggcctattatgctgccgttgttgggcgtctacgtcttcaccgactggccgcctcgtccgccgactgatgattccgcctgcacggctggcctttatgccg

SEQ ID NO: 21026 - DNA, 2504 bp, Oryza sativa
aacggatcaacccagccaatctccaacatgtcctcctccatgagagttgctctcctagccatgctacccatcctcctcgtggatgcccaatccatggctgcgccaattcagtgccttccaggccaggccgcggcgctgctccagctgaagcgctccttcgatgccaccgtcagcgactacttcgccgccttccggtcatgggtcgccggcacagactgctgccactgggacggcgtccgctgtggcggcgacgatggccgtgcgatcaccttcctcgacttgcgtggccatcaactgcaagctgacgttcttgacaccgcactgttcagcctgacctcgctggagtaccttgacatctcctccaacgatttcagtgcatccaagctcccagccaccggcttcgagctgctcgccgagctcacccaccttgacatctccgacgacaatttcgccggccaggtacccgccggtatcggccacctcacgaatctggtttaccttgatctttctaccagcttccttgatgaagagctagatgaagagaacagtgtattgtactacacctcatactcactttcgcagctctcagagccaagcttggacaccttgctggcaaacctcaccaacctgcaggaccttcgtctgggcatggtggacatgtccagcaatggagcacggtggtgcgacgccattgcccggttttccccaaagcttcagatcattagcatgccttattgctcactttctggtccgatttgtcggtccttctctgccttgaaatcacttgttgtgatagagctgcactacaattatttgtccggtccgattcccgaattcttggcccatctgtccaaccttagtggtcttcagctttcaaacaacaactttgaaggatggttccctccaatcgtcttccagcacaagaaattaagaggcattgatctcagtaagaattttgggatctctggaaatctgcctaatttttctgcagatagtaacttacagagtatatctgtgagcaacaccaacttctccggcacaatccaagttctatcatcaatctcaaatctctgaaggagttggcacttggagctagtggtttctccggagtactgccttcttccattggtaagctgaaatctttagatttactagaggtgtctgggttacagctattaggatccatcccatcatggatctcaaatctgacttctctcaatgttctcaagttcttccattgtggcttgtctggacccgtaccatcttccatagtgtacttaacaaaattgacagatttggcactgtacaattgtcacttttcaggagagatagctacactggtctcaaatttaactcaattagaaaccctcctgctccattcaaacaattttgtcggcaccgtggagctagcttcattctcgaaactgcaaaatatgtccgtccttaatctctcaaacaataaattagttgtgatcgatggagaaaatagttcttcggcagcatcctactccagtattagtttcttacgtctatcatcttgcagcatatctagcttccctaccatcttgaggcatctacctgagattactagtcttgacctttcatataaccagatcagaggtgcaatacctcaatgggtatggaagacctcaggctatttttccttgttgaacctatcacataataagtttacgagtactggatctgaccctttacttccacttaacattgaattcttcgacctcagtttcaacaaaattgaaggggtaatacctataccccaaaaaggaagtatcacgcttgattactccaataaccagttctcatctatgcctctcaatttctctacttacctgaaaaaaactattattttcaaagcctccaaaaataacctttctggaaacattccaccattgatctgtgacgggattaagagtttacaactcattgatctctctaacaactatttgactggcataataccatcatgtctgatggaggatgcaagtgcactacaggtactaagtctaaaagaaaataatcttaccggcgaattacctgataatatcaaggaaggctgtgcattaagtgcattagatttcagcggcaatttgattcaaggaaagttgccgagatctttggttgcttgcaggaatctggagatccttgacattggaaacaatcaaataagtgactctttcccatgttggatgagtaaacttcctcaacttcaagtcctggtcctcaaatctaacaggttcattgggcagatggatatttcttatactggagatgctaacaactgtcaatttacaaagttgcggattgcagacatagcctcaaacaacttcagtggcatgttgccagaagagtggtttaagatgctgaagtccatgatgaccagttctgataacggaacttcggtcatggaaagtcggtattaccatggacaaacctaccagtttactgctgcactcacatacaaaggcaatgacataacaatt

SEQ ID NO: 21027 - DNA, 3136 bp, Oryza sativa
  unsure (1)..(3136): unsure at all n locations
tctggtactatgctcatggtgtaacgctcaacccagtggatggctccttggtcttcagcgatcagatacgcgaggctgcgagtcgactaatggacgcagtggaagcctcttctcagggcacgttccgacccgacagagagaaggacgagctgtcactcgccctacagactcccgagcatccaggacgaacacgagggaaaggcgtgattccctggaagatgggattcaaggaggacatccacacgtataggagtcggatgaggagcaagagagataccgaggcgaagattgcagatcttgagtacagggtatcgagctacgagctcagcttgcaagaggaggtggcccggaaggtggatgaacgcatggcagcacatcgttcacacgatccccagccgtacatacatcctccaatggtcagcccatcaggcaatcgtagcagctgcgcctcaacggggcaggtagtatcacatagcatggacgccatgcaaacccaggacgaaaccacctgccccgttgatgagatcacgcatcggacaccatgtgagctgcatattccctttaagaacttattaatcaaggtatgctcgatgtaatatatgatttttggattcgtacgttccgcaagttgctgcttaggttgattactaatagataacctctcatcacgtgaaggtggcgtcgggaatggccatcccaacagacatttcagggacttaccactgcaggccgattccagcaagatactcgagggtcgaagttgagctggtgaaagccgtgtacgaggacctcgagttggactacccaggaggagacggtgagacgcatctacgagacacaagccacgccattatactatggcgcaagcggtacatcatcctccctgggcgacaagcggcgtctcgtgcaccatctcctccggctccgccgtctcctcctgcaccaactcctccggctcctccgccacctcctcctgcaccatctcctctggctcctctgccacctcctcctgcaccatctcctccgcctcctccgcctcctccgcctcctcctccaccgtgtccgcctgcacctcccaagacaaggtctcgccaagctccacctcctgccagcaaaagggcaacgaagaaggccaaagttgacaccaccaaaaacaaggagccgctgtacggttgcagtcaagaggagcttgacgcttatgtggcaggagaagtgaagaggcaactcaagcctcggagtcctgaaaagaagatacctattgacctgagcgtgaagaatttcttcaagggaatgtccaccgcaaacaaggaggccttaaagctatcggattgtgaccgaacacttaggaaagcctattacaagaagtccaaaccagttcctcagcttggagaacaaccacaccaagtggtcgagccgttggtgaccagcgaagactttggcataacggatttcatttcggacaccggtctaaccatggctcagttggttggagccgcaccaatcccgaaggcggaagtggcatacaagtttgaactcggtaaaccgcttgtcagacctgagcagctgcagtccctacgnnncaaatgtacaaattccatgaacggtacatggaaatgagcgccaatggtagagagatgttcggagcgaggatcagaaaccccgacttcttgcaaggagaagatgttctatggatccatttcaaggatgtcttcgatctgtaccatcgggacaccctcgacgtctctcttctaagcgcatggattttgtaagtatcttggagttcgatttgtttcgttcaataattagctcctggcatatatgtaagcaataataatttcctttcattgttgtagaatggagattcaaagggcccgacggcggggagtttacgatactgggttcatcgaccctcggaaaatcaacaccgaaatgctcgacaagtacgagaaagacacagaggacaatctcgtccatctcctaacgcagcagcatttcaaaacgttcatactattgccgtacaacacagagtaagtttttattgtcgttcgaacaaattttattcccatacatataacatgtacattctgatatttatctcatctcacgcatattctagattccactgggtcctgttctttttcaacttggacgcatacagagtcactgtgtacgactcaatcaataaggaggagaaggttttttacaaggtcttccaactgatagacaggtaatataatgccatctattccaaagtcgcgggactctgttgctattatgttgatctcgggtaatatttaattaatcatagcttgcaactgcccatgtagggcttgggatcggttccgtcaattggtccgcgggacttggaaagaaaaacttggacggaggtttcattttccagtgagtacatgcatgatctaaaattatattgaattgaatctctagttacagttaatataaagagtatattaaatctctcatcgtttctcatgtagtgtgcaaagcaggacaagggaactaatttatgcggctactacgtatgcgagtatgcccactgcctatcaaaccaaatatacaccacacgagagctcgatgtacgtatacttaaaccattcaaaatttcattgcgtatcgatttgttaagttgtttattaattttatatattgatatgtcattatttttcgaatgatagcgtattcacatgagggaaaaactcccacacaaggattttatcacggctgttcaagaacaactgatggggttcatcaacgaagaagtccttaatcccgatggtgaattctactacgacggatcgacaattcgtaacgtcggtccttcctcttctgacgtaacgcaggcatcgaagtcgtagctatagctagagagcaaatgaattgtactatacatgcatgtatatatatatatttatatatgtacgtatatttactttagtgttaatatatattttggtaacatatatgtacataaaatgttaagtgctttaaattataaatatatgtgtaatatatgtatttatacatatatacatacgcatatatatatatatatatatattatatatatatatatatgtattctatatacatgcataatatatatattacaatgcatata

SEQ ID NO: 21028 - DNA, 2725 bp, Oryza sativa
tatatatatatatatatatatatatatatatatatatatatatatatatatatatatatatatatatatatatatatatatatatataatcaaccatgcagcaaacatggcaatgcaaataaaaaaaatggtacatagatctttagtcccggttggtaacatggatcagccggccacgtggctgaccgatctttagtcccggttgtgttaccaactgggactaaagatcgatctttagtcccggttatttcacccgggactaaaaatcgctatttttagtcccggattcgtagtcccgattagacaaccgggactaaagaggggtgacgaaccgggactacaaacgatttctccaccagtgaatcatggcacagtagtacgcgatgggcatggatattggcctggattgcaggtcggatacggagtcggaagctgtccactttgaagcaacaccctcgcggcggaggccatcgccggcgcctccagcagcgctgccgccaagacgaacatcatcatgacgagcacctccgccagccgccggccgccggtggtcctgagcgccgccgccatcgccgatcctccgatgatctttgctatctaagctactaattaactgattttgagacagttgtttgggttaatcactgaatttttctgcacgtttaatttaactatgtctggttatataggacgagctgagcgtacctagctaggagagatgtagaaaaaacaccggtggtcatgcattggtttgaccggcagcgtagtagctagtatatagtagtatctagggtggtgtttggatctagggacttaactttagtctctgtctttagacactaatttagggtattaaatatagactacttacaaaactaattacataaatgaaaactaatttgcgagataaattttttaagcctaattaatgcacaattagagaatgtttactgtagcatcacataggctaatcatggattaattaggctcaatagattcgtctcgcgaattagtccaagattatggatggattttattaatattctacgtttaatatttataattagtatctaatctatacgggccctaggttatctgtctggaatttagttcagttttccaccagcacattaaattatgcatgactaactgatgactaattaactgaactgaaagagtacagtacaattaaacggtttgactatatatttctcgtcaaattttctctaaaaagatttgccagatacaaatccaatacaattatgatgtaatcacttttaaacttttatcgacgacatcacttgtacgtaacatttaaaaacactccaattttgcgtttgtttctccaacaagaattggatgaaattttggatactcgtggcacgttttttaaactattaaacggtgtgtttcgtacgaaaactttctatatgaaagttgctctaaaatatcatattaatccatttttcaagtttataataattaaaactcaattaatcatatattatagccacctcgtttgcgtgaaacatttaatatttatctccatcttcatcttcaggacattattcatacaccacctttgtgtgtaccatgtgtttttttttacccccaactagctattgtatatccagcttgtctgtctggagtttaatttagttttccaccagcacatgcaaattatgcaagactaactgatgagtaattaactaaactgaaagaatataatattgtgatcactatgcaatagtgtgtacctaacttatcaagacaagtcgatcggtcagtcccgatcatcttggaaatctattagtcctatataaagtttatgtggtcgtgtagaaaatatataggcttgaactaagagagaagaacaaacacaatgacttgaactgtgacaatcgcatgttttatttctatgccataatcagaggccattcggtaggaaagaaattaggagttgtttggttcatggatacactttgccacatcatacttttggtaatcacagtttgttatgtatgtgtctggttcgctattatagctgtggcttgccacacttttttaagtagcatgacccacatgtcataggcttatttttcttgtcaactttgtcacactttgtggttagaaattcatccaaaatacttttatggctgccacaacttgtctaatcttagttgtggtaatgtgtgaccggcaaccaaacacacaataaaagttgtgcacatagcacaaggagtgaggaaaaaaagataatatagaaaatttccttttgtacatatatagtatgatatatggaagagcaattaatacatagaaatataaaaaacattattgcctcattgcagcttccactggtcgtaggtcaggctgtagtacacgcagatcgaggtattacatatttgcatcgctctcaaacatcacatgcaaataaatattttatttgaaatatatcttaagttgtagagaagaaactctgtaggaacgataactatttcattatatgctgttggttgattaaaagtaaactaataaccaacggcgtacagcttataatcatggcacagtagtaggcggtgggcatgaatattggcctggattgcaggtcggatacggagtcggaagcagtccactttgaagcaacaccctcgcggcggaggccatcaccggcgcctcctgcagcgccgccgccatgacgaacagcatcaggacgagcagcgcc

SEQ ID NO: 21029 - DNA, 1261 bp, Oryza sativa
agctcaggattatacctgtatggtctcaggttgactggttgagccccttcaataagaggaatcttgtggtcacaatttctacgaggtggcaagttcttaggctctgcaagcacatcctgatagctttgaaggacttgctgaattttttcaggtatgggaaattcttcctcatgagtagtctcagctatcttcaccaagtacattatagctccagatttagccattcccaccagttgctctatagaaatgttagcataggtactactttgcttcttaatgccatggagcctaatcaactgattctgatattggaactcaacccatttttgaatccaatctatctgcataggactatgttgctgcagccaatccatgcctaaaattatatcataacttcccagaggaatcaacttgaaatcatttttgaagctatgaccttgcatacaccaattacagccaggcagaattttagagcaaatcaactgtcctccatctgctatttgtaccttcagggaatgctggaactcttccactccaatcattttcatgccaacttgctcatcaatgaaagaattagtactaccagactctgtcacatttgctgcttgttgagaaattgccatgactattaaatcctccttctgtgtcgcagtttcagcagacaatatttcttcagtgtcctcttgcagaatatccaggagctcatgtactacatgcaactgtacagaaggagagcatttgtgatcttttccccatctttctccacatgtaaagcataaccccgtagatcttctataagatttcaatgttgcaagtctgtcctcttttgtcttggcagattcagctccctttttctcctccccttgagtaacctagttgttccttgttggagtggtttgtaaattcacttggaaattcaccttgtgcataggtctcagataattggtacagtcactcctcctgaataccccgattttaaccccttccaacgcttcctcctgcaagagagccactaagctggcagtatccatgtcctatggtctatgaataatcactaccctcctcacttcatccttaagtccatcaataaatttctgaacaaaatacacttgaggaactgactgttcataagccaacagcagatgcattagggaatcgaacttctccacatactcagctactgtattagtttgtctaatgtggaaccattgcctcaccaaagcttcctgcctgtccctagtaaagcgagcacatactcttt

SEQ ID NO: 21030 - DNA, 2423 bp, Oryza sativa
gaactatctcacgatccgacaggatcggagccgccgccgtcgtcgtcgccaccaggttccagtcgatagattcgttttgaactcctactcgttagatatacaggttctccctctcaccaactctcttacataggcttaatcacacggcccagttacacaaccctctccgaagacatatatttagtgttagccttgcgcttgcgcttctccttctggaagacggcttccgccttcccaccttcgctctgttgttcacccagctcattgccgccatgctccttctcctccaggcgttccagcggtactctgacaccactcctccaagaaccccgccacacgtccaggatgcagatggagcagcgcgtggaagggcaccacagccgctaccgcgaacgaagggtgacggacagcgcgcgaatggagaccgccgccgctgcatacgaaggcagatgagtcacgggcggatgggcactgccaccgcttccacaggtcaagggtcacgcgcggacaagcgccgctgccatagacaaagggcgacaggacgtggcggcaaactgcaattggtggctcgcagctaccaccgccagctagtggaggaggttagttgggggaggcggaaggtggaggtggaatagggaggggattgcggacggagaggaggaggagaaagaaggagcgtcatgtgagacggagatgaggatgtgagtaggcacggatatggtttgctcggtcggctctcatagcggttttttatttttttttagagtaaagtgtacgggcggtctttaaaacttgtaggggtatgtcttttaggtccctaaattctcaaaatgcatatctaagtcccaggacttgtcatagtgtgtcatctaggtcccaaatcgttacaacccattcaggatcctacatggcgttgatgtggcatgctacacagacatgacgtggcatcattttgaatgacaaatggtacccatttaaaatttttcagttttcatttttcttctctttttttccctttcttctcctttatctgtgaccagagcagaagaaaggaaaaaaagaagaatgagaagaaaacgaaaaagaaaaaacaaaagaagaaaaaaaaagaaaagaacatgtcatgtccatgtggcgtcatgtaggatcctagaggagatgtgtcgatttgggacctagatgatacactttgataagttctgagacctagatatgcattttgatattttagtaacttgtatgacataaccctacaagtttatggaccgccaatgcactttacttttttttatataggttttggtttttatctagaacttgcactataatataagtataggtgtcgatttttatttagcggctactacaatttattaaaggttttggttttttaataaacggcacctaaagtattgtgctagtttttctctatcaccggtacctatagtagattgaaggtgtcggttctataattttccatcctgtggagatacagaaaggtctatatgtatcggttttaggatttatggcaccaatagagctgtttcttttgtgcgtttctatagtagtgagtggctgggcctagggaagtgtggtcgaagcacgcccaccctatgtgcgtctttcacgacatgctcttgccttcggtttcttcctctggtcttctagcggtgtctgttccggtcatctgcaacatactctcatggcctttttttatgacaaaacctatctgaaatcgtcccccaggataaagactttatcgaccctcgagggatcgacgtaaatatattcgctagctataaaaggactcgaaaacctgagttaagtcaggcaagaaggcaagcaaaatcaagaatttcacttcaaattccggtcctcaacatccggctgaagacctcaacatcctgctgctcatggtatttcactatcagtattgaaaatgaaagctaagaagtcatcgaaactcataactagagagggtcccttatgaagaaaaccaaacttgttcatttcaaaacagctcggaaacggacaaaaaccacctctaccatttcttttttcatacctttcttttggaaccggaatcggaattgaaaacctcggatacaaaaatagaatcgaatatgaaaacgaagcaaacacgaattggagcgaatacggtaatagatatttatcggaataggaaaaccctcaaactgaacttctcatatcaacgcagagatatacctcattatttttctaaaacaacaaatccacatttcttatttttatcaataatataaatagttgtgcacttcaaatagcttttaggagaacaagaactatattcatctatagttgagtatggcatgacctattaaaataataaaaaagtcactaggcaagagaaagatagatctaatgccccggattggaaaaaaaaa

SEQ ID NO: 21031 - DNA, 748 bp, Oryza sativa
tgtttatttgctaaataaggttttataaaatagttgagtaggaaaatatagtgaaagttaatcttaaataaaagaaaacaaactaaattgaaaattaaaagaatttaaaacttaaaaaataataaataagaattatttggtggaatattttataatttttgtatgaataatgatatgtcattattgtatgactgttgaaagagtttgtgattattttatcattattgtatgactgtcattattgtacgaatgattatttgtgtacgatttttttttcatttcatgtagatggatcggcaatggatgtacgctgactggcgatccaaagagtttactgacggcgtgcattattttttgagagtggccgaagctaacaagcagaagggttttatttgttgtccatgcaataagtgtaagaatcagaaggagtattctgcatccaggactattcatttccacttgtttgagtcggggttcatgccaagctataattgttggacatcccacggagagcaagaggttgaaatggaagaagatgaagtggaagacgacaatattccagactttgctcagtacgctagatttgaaggaaatcaaacgggcgaggaggacatagatgctgattataacgacgttgcggatgatcttggtcagatgttgcaggatgccaaggaggactgcgaaagtgaaaaaggggcccataaattggacaagatgttagaggatcacagaacgtcgttgtacccag

SEQ ID NO: 21032 - DNA, 828 bp, Oryza sativa
gacgcccaacacggcggcataaggccagccgtgcaggcggaaacaccagtcagcggcggtcgaggcggccggtcggtgaagacgtagacgcccaacaacggcggcataaaggccagccgtgcaggcggaagcaccagtcggcggcggacgaggcggccggtcggtgaagacgtagacgcccaacaacggcggcataaaggccagccgtgcaggcggaaacaccagtcggcggcagtcgaggcggccggtcggtgaagacgtagacgcccaacaacggcggcataaaggccagccgtgcaggcggaagcaccagtcggcggcagacgaggcggccggtcggtgaagacgtagacgcccaacaacggcggcataaaggccagccgtgcaggcggaagcaccagtcggcggcggacgaggcggccggtcggtgaagacgtagacgcccaacaacggcgacataaaggccagccgcgcaggcggaaacaccagtcggcggcagacgaggcggccggtcggtgaagacgtagacgcccaacaacggcgacataaaggccagccgtgcaggcagaagcaccagtcggcggcggacgaggcggccggtcggtgaagacgtagacgcccaacaacggcggcataaaggccagccgtgcaggcggaaacaccagtcggcggcggcgaaggcaagccggtcggtgaagacgtaggcgcccaacaacggcggcataatgggccagccgtgcaggcgaggacaccagtcggcggcgacgaaggcaagccggtcggtgaagacgtagacgcccaacaacggcggcataaaggccagccgtg

SEQ ID NO: 21033 - DNA, 3749 bp, Oryza sativa
  unsure (1)..(3749): unsure at all n locations
gctaacgaagaagagaattcctgctaaggtgatgtggtatttccctataataccacggctaaggcgtttgttcaggaaaaaggggaatgctagaatgatgcgttggcacgctgaagaacgtcaacaggaccagatgctgagacaccccgcagatggttcgcagtggcgaaacatcgacagaaaatttaaagactttggaaaggacgcacgaaacatacggtttggtttaagtacggatggcatgaatccttttggagagatgagcaacggccatagcacttggcccgttacgatgtgtatctacaaccttcccccttggctatgcatgaagaggaagtacataatgataccgattattattcaaggccccaagcaacctggtaacgacatcgatgtgtttctaagacaactggtcaaagatcttaaactgttgtggaagaaggaaggtgtccccgtgtgggacgaggacaaacaggaggagtttaacctatgagcgctgctgttcgtaaccatcaacgattggcctacacttagcaacctatccgggcagtccaacaaggggtacaaggcttgcactcgctgtatggatgaaacagaaagtatgtatcttaagcactgtaggaaggttgtgtacataggtcatcgtcgattccttacagcaaaccactcggtacggaagaaaggcaagcactttgaacatacagcggaccaccgtacaaagcctaaacatcgcagcgggaaaacagtgtttgctatggttaaagatcttaaagtagtgtttggaaagggacctagcagccagcctatagagagcgaagatggtcacgcggcgatgtggaaaaaaaactccatattttgggagttaccctattgggaattcttggacgtacgccacgcaatcgacgtgatgcacctcactaagaacctttgcgtaaaccttcttggcttcctaagtgtatacggaaagtcgaaagatacactggaagcacgtaatgatctgaagcatatggaacaacacggcgaccttcacccggaaccaagggggnnagagccattacttgagtccagccaactacactcttagcaaggcagagaaggaaagtatgtttgaatgcttggagagcataaaggtaccgtctggatactccacgaatatcaagcgaataataagcacaaaggagaagaagttcacaaacctaaagtctcatgactgtcacgtgttgatgacacaactgctaccagttgtaataaggggtatccttccagacaatgtccgggcaacaataacaaagctatgtgcattcatgaacgcaatttcgcagaaggtcatcgatccggatagattagaagcccttcagaatgaagtggtgcaatgtctcgtcagttttgagttgatatttccaccttcatttttcaatataatgacgcatctgctttgtcaccttgtgaaagagatccgtattctcgggcctatgtacctacacaacatgtttcctttcgagaggtacatgggcgttctgaagaagtatgttcgtaaccgtgctcgtccagaggcaagcatcaccaagggttatggaacagaggaggtcatcgaattttgcgtagaatttatcgaagaccttcgcccaatcggggtacctgaatcacgccatgaagggagactacggggaaagggaactctcggaaggaaagcaataacgacggtagacaacaatttattccgtaaagcccatttcactgttctgcaacactcttcattggtagctccttacatcgaggagcacttggctctagttcgcgccaggaacatcggtaagtccaatgcatggattacacggcatcacattgatactttccccgcgtggctacgacaacatctcatgggtaacgagtcgatcaaccaacaacttgccttcctggcgaggggaccgtctgggtcgatcgcgacattccagggatatgagatcaatgggtacacattctacacgagagcccaagacatgaagagcacgaaccaaaacagcgctgttcgtgtcgatgccatgggacacgatggaacaactgctacgtattacggtgccatcgaggacatatgggaacttgactatggtcctctcaaggttcctctgttccggtgccaatgggttaggttgactggtggaggcgtaatgattgatgacagtgggatgacaactgttgaccttaacaaggttggatactcggacgaaccttttgtccttgccaatgatgtaacgcaagtctttttcgtgaaggacatgtctagcaaaggaaagaagggcagagggcctgatgagcctaagcgtcaagtggttcttccaggcaaaagaaaaatcgtcggagttgaggacaagactgacgaggattacgatcagttggatgggcaaccccctttcacggtgacgattgaccctagcatcctcctatcaaatgaagacaccccttactcacgcagcgattacaaggagggaacaatagtgaggagaaagtacgtgccgtaattatgctaattataattgactagaggatttttaaaagtttttaacatttaatttactagcattcctatgctaattataattgactagaggatttttaaaagttttaaatcacgcaagtggcaatttcatatgttaattagagtttttaacatttaatttactatcattcatatgctaattataattgactggagaattttaaaaagtattaaatttaatatattcttaaaactatcattcatatattagagtttttcacaatttaatttactatctttcatatgctacttatatatgactactcgaatttttaaaaggtttaaatcatgcatgtggcatttacatatgttaattagagtttttagcatttaatttaatataattcctacgctaagtacatatgatgattacaatttttattaattttaaatcatgcagtatgtacatacatatcttaattagagtttttaccaatataataatatcattcatatatatgctaagtatatatgattattggaatttttattaattataagtcatatatttgcttattacgatttatccacttaatttcttacagacaaaaataatttttcgaagtaattgtcattaatctttgtactttaaataatgttaatgcattaacttctattttataaacacatatgtaagcgaaaatcatatgcagtgctataatctttagtcccggttcttaaccctaaccgggtttaaaaagaatttcgaaatagcgggaaaagatatttactcccggttgttgagaacaaccgggactaaagatatctttagtcccggttgttgagaacaaccgggagtaaagattcgggggtatatatattcccggtgcgccctcgtcttcttcaccaacacttagacgttttcggccgatcgatctctctcggcctctctcctttgccgccactgcctagggcaaatccccgcaccgacgccgccgtatctcgccgtcgtctcgagctcgtcgtcctcgccgccgcctccgcctcctccgctgccgccgcatctctggggtgagagccgcagccgccagatctcccttcctgcatctcgatctctccgatctcgatctctctccgtcgcgccgcccgccacgagacgccgtgccacgacgacgacgcgccacgactacgacgcgccatgccgccgccttggccgccgcgcaacgccgccgccgcctgccaacgccacgcc

SEQ ID NO: 21034 - DNA, 2823 bp, Oryza sativa
gcatttatgcgttatacatctttttgtatcttggagaaaaaacggtgttgtcggagtagtccgtcaagcctgagtggaagagctagccctagaaggaattggagcaggcaagtgacgtaataatataaatgattgttatatttgtaatgcaattaattaagattattagacctgtaattagacttatcatataagattgtgtagtgttctaatattatttgagttttaatataagattattttattgcaaattagacttagtatgacattattgactacggaattggtgcgactcctagcaattgactattgtagtcttaattagacttagcatatacgcacgaaacacttagcatatacatgactattttagtcttagcatgtaatattatttgagttttaatataagattattttatttgtaattagacttagtatataattatttactagctagggttgtataatatacgtcacctagacttagcttatatcacgatttgtaattagacttagtacgtaaggttgtgtagggttctaatgtacgacatttacacttagcatacatgacttagattgttaaaacataaatgtctcgtgacttagcagatgtttcttgtatcaacagatggctgaccgcgatgaggaacagatattgtacgatacaatcgcggagggaagcagccagtactggaatgaagaagaggggaacgaggatccaaaccagtacttgaacgaggaagggaacgtggagagggatgcggaggggaaccagcaggggcacgtggaaagggatgtggaggggaaccaggaggaggaggctagtggtagtcaaccctccgttggacagaagagggcacgcgggcaacgaggtgtagcgaagaagcttgagggtcggcacatcataacggaagtggaagaagatggacgtcctagtgccccggccgaagccgccaagaactatgtacgtcacagcggttgggttgtgcgggataacgtgcctgtcagtacggtgtactggcgaagaacaagggcacgctgagatcatgagagctttgtcccagattcggagaaagagatgctgtggaccacaatgctcgagacattcacccttcctgcgggtacagaggacaaagtgaaaaggtggactctgaagaaaatggcagaacagtttcagagcttcaagggagatctgtaccagaagtatatactgaaggggcagacaccgaacttcgacacattcccaaagctaagggatcactgggacgagttcgttgcatataagacaggtgaacaagggcaggcgatgatggaaaaaaacaaagaaaatgccgccaagaagaagtaccatcaccacttggggtcaggaggctatagcgtcgcgatgccgaagtgggagcagatggaggctagcttgattgagaggggtatcgaaccggcaacagccaattggccggaacgatcgaagttctggtgctatgctcacggtggaacgctcaacccagctgatggctcactggtcttgcgatcagatacgagaggctgcgcgacgactaacagatgcagtggaagcctcctctcaaggcacgttccgaccagacagagatagggacgagctgacactcgccctgcagactccagagcatccaggacgaacacgagggaaaggggtgattccttggaagattggtttcaaggaggacatccacacatacaggagtcggatgaggagcaagagagataccgaggcgaagattgcagacctagagttccgggtatcgagctacgagtcaacatgcaagaggaggtggcaaggaaggttgatgaacgcatggccgcacatcggtcccatgatccccagctgaccattcctcctgcaatggtgagcccgtcaggaaacagtagcagctgcgcctcaacggggcaggtaggatcacagagcatggacgccatgcaaacacaggacaaatcgcctgtcccgttgatgacatcactcagcggacaccatgtgagctgcatattcctttcaagaacttatcaataaaggtaagatttagccattccgctagttgctgcttatatatgttgattactaataaataatctctcacaacatgaaggtggcgtcgggcatggccatcccaacggacccttcaggtacttaccactgcaggccgattccagtaggatactcgaaggtcgaagttgagttggtcgaaggcgcgtacgaggacctcgagctggattaccctggaggagacggtgagacgcatctacgagacacatgccatgccattattctatggcgcaggcggtacatcatcctccctgggcgacaagcggcgtctcgtgcaccatctcctctggctccgccatctcctcctcaggatcctgcaccgtctcctcctcatgctccgccagcaccgtctccacctcaggctccagcatcgactcctcctcaggatcctgcaccgactcctcctcgtgctcctacacctactcccccgcaagctcctcttccggcaccttcaaagtcaagggcccccccaactccaccgcctgcccacacaagggcaacaaagaaggcgaaagttgacgccgccaagaacaaggacccggggtacgattgcacgcaagaggagcttgacgcttacgttgcatcagaagtcaagagacaattcaagcctcgaagtccagaaaagaagattcctatagaccccagtgtcaggaacttcttcaggggtatgtctgcatctgtcaaggaggccattaagctatcggactatgagcgaacgctgaagaaagcatcttctggaaagtcca

SEQ ID NO: 21035 - DNA, 690 bp, Oryza sativa
atttcaggggaatctacgaactataccagctggacgccctcgacgtctctattatgagttgctggattttgtaagtatatcgttcagttagatttcttactatacgtctcctttaattaattaggtccttgtatataagtagactatagaaaataatatactcccttttatcgttgtagaatggagattcaaagggcccgacggcggagggttttcgatactggattcatcgaccctcggaaagtaaacgtcgcaatgctcgaccaatatccacaagaaacagaggacaatctcgtccatctcctgaaggcgcagcattacaagacgttcatactgttgccatacaacacagagttagtttaattttactgtcttcctacataccaaatttcattcccgtacgaacttgctaagtgtttcatatgtaatgcatcccacgcacattgcagattccactgggtgcttttactcttcgacctggaggcctgcaccgtcaacgtatatgactcaatggataaaaaagagtctacgtttgacaaggttttcgaacttatagacaggtaccgtcataagttcctttgttaattaagaaaatcttgttatgttaattgctactacaaatcatagctttaaactccatgtagggcttggtatcggttccgtcatttggtccgcggcaaatggagagaa

SEQ ID NO: 21036 - DNA, 8129 bp, Oryza sativa
gcgaaggagggttcggtatcgtttacaaggtataccaatcaaattgtactatccaaccgtacctgcacgtgtgctcatctttttactagcttattaagtcatgcatttacgcgaccataatatcccttagtgaagcatattaatattatttatagtaaccaactaaaataagtgtttgtagaacatactttgcaagaaacgtagttataacaataacatgtatattctgatttgtaatgtggccggttcacgtgtccgattataaactatgtactttatctgtccacaaatataattgatcctatgtacttcatctatccactttaacattgaggtggaattatttggtgttccaaaatcacacctatcgtttggaaattccatatttttgtagactgactgcgtagatgagaagtacaattttccaaatgacatccatgaatagagatgtgtacgtaaaatttagtggtgtccaattactttccattgataaagtataagtttcttgttattcgtacttgatgcagagatctaggattttttttattaactagctgggtggcccgcgcaattgcgcggctagcacctaaacaaaatcatatatttttttagtatgattttacttaaaatttattaaatagctatctcattgttttaagactttgaaagaccaaaccttatcatcctcatgtttataattatatagtttttaaaagtcacaccagttactacccctcatgtcttctccttctttattttcttgcttgatataccactatttctattcattcttcttggaacctttaaaaattggattttatagtttttagagtttattgtcacgttgggtttcatttttataatttctagatgtcccgtcaaacgttgccattatactcctctacggcccgtccactgtctcttctctttattgtcattgagattttaaaaatcgaacataattatcgtttgggttcatttttactttctagaagtcctgctaaaccatcagcggctttgccactgtactcctctacggctcgcccgctgcctcccttctttattgtcattgagatttgagattttaaaatcgaacatgattatcattggttttttttactttttagaagttccgaacctttaaaaattggagttgtaattttattttttataatttttagaagtcccatcaaacgatgccactatgcccctctacagcccgtatgctgcctactctttattgtcattatgattctaaaaatcaaacataactattattggaattcatttttttattttctagaagtcctgtcaaccgtcggcggctctgcaactatactcttatacaccctgcccgctgcttctcctttttattgtcactgagattttaaaaatcgaatatgatgatcaatgtgttttttttttactttatagaagtctcgacaaccgccttactcgtttgattcacggcctacctgatgttcctccttttaatcgtcattaggattctatttggtgttttattaacaatttttatatgtcgtatcaaccgcctccactctacttctttataggcatgttacttaatttatctcgtcacgtgttttagatagtcttttatttcaataatctttatttttatcacaaattttagttatttataaattgcattcctaattaaaatctttttttttctaatttcagaattttttaaaaaaaatttagttaataccgtattgtgttctttcgatgtttttattttttattttcaatttcagttgtttgaaaattatatttctacttgaactctcttttagttttctagttttggatattattttatttttttattctaaattttaattaatctcgtattgggtttttatatggattcttctttcaatattgcttatttttaattccgaatttcagctaattttaaattatatttcttcttgaactcttcttttattttcttttgctaatttcggatttatttatatttattccgaattttaattaatctcgtattgggttcttatatggactcttctttttaatattccttatttttaatttcgaatttcagctatttttaaattgtactcctacttggactcttatttccttttctaaatttggattttattttattttatttttatttcgaattttgattaatctcgtattggcttctttcaatattgcttatttttaattccgaattttagctatttttaaattgtatttttacttggactttcctttccttttcttattttggattttattttatttttatttcgaattttgattaatctcatattgggttcttatatggaaacttttttcaatattgcttatttttaattccgaatttcagctatttttaaattgtacttctacttggactctccttttctttttttctttttctctgattaatgtgggaatttctagctcccacagcgaacgtggtgcctcctttcaaagctattttaacaatataatagatagatgttgggatgtttaatatccccttttcacaagggatcaattagtgctattttatctttcaaaagaaaaccatataagaaataaatctcatatacatttatggaccataaaaaacaaatctcatataaattttacacccgtcagtcagtcagctaactcaattaactgggcataggcccaagctcggtgctgtagcatgtggttcaacttttttttctctttttctttatttctttgctctctagtgtctactattcctatctctttgctacattgaaggagcgtcggaaaattctaaaataccctctttcatctaaggctatcatttattttatctattttgtcactttgtgaatctgacggctaatattaatcagatgaatgtggctcatactagttgcattctgaggttcgcttttcactaatagagatttcatgatgaatacatatccataattccattattaatactacatatacatccacttgcacagggagttcttcccgaaggtcgagaaatagctgtaaaaaggctctcacaaagctccagacaggggatagaagagctgaaaactgagctagttttagttgctaaacttcggcacaagaaccttgtgagccttgttggtgtttgcttggaagaaggcgagaaactactggtgtacgagtacctgccaaataagagcctcgacaccattcttttcggtacagttcagttctctcactgccctaacagtttgcgaaaatggaacatttttttttccattacatgaaaaatctgcacgcacaactacactatagattcgaatgctgatttctttgtttgaatggaagattatgagaaaagcaaagatcttgactgggggaagaggctcaatattgtaagcggagtcgctcgaggcttgcaatatctccacgaagactctcaactgagggtagttcatcgagacctcaaagcaagcaacgtgctgctggacttcgatcacaacccaaagatttcagactttgggttagcgaaactgtttgagtgggatcagacgcaagacgtcaccagtcacatcgctggaacatagtaagtactaagtggacctgcaattccatcgcacggtagtatgaaagtataattaacgatcatctccttatttttcagtggatacatggcaccggaatacgccatgcgtgggcagtattcagtcaagtcggacgcgttcagttttggtgttctgatcatagagattgtcacgggaaggagaaacagcagcttctccaactcggagcaatccattgacctcttgagtcttgtgagcatcattaatctctgctcctcatcatcatcaccatgacctgatcaatcacgaaaaccatcttcttaatcgagacatcatcctgaagaatttatcctgattacgcatgtaggtatgggagcactggacaacggggacgatcgaggagctgctggatccggcgataggcagccgtgcagtgaacgttctgctgaagctgatcaacatcgggctgctctgcgtccaggacaacccggcggacaggccggcgatgtcggcggtgaacgtgatgctcagcagcgacacggtctccctccaggccccgtcgaggccaacgttctccattcaggagatggacggcgccgccgacacggatctctacgagtcgggagcgtacccccggagcgcgttccagcccaccggcgacggcaacacgagagcagcggcggcggcgtcgccgaatgagttgtcgctctcggagctggaaccaagatgagcgtttcgaatttggagcgatttgtgcggatgaccgcagggtttttcttcaataacgaaagaatcaacacgtgtggcctctgcacttgtttgtcgataataataaataaatgccctcgttgatggttggttggagctctgcatatagttgcaagattgttttttttaggcgggtcacggggggtaaaatgtccttctgaatatattacgtcaaacgattttacacaagacaaagcttcaaactacgcaagcgcagaaaccctggagaataagagaaaaaaacataggaaagacaaggaagagaaacacgacaggaacacaaccacccccgagggcacttgagccaccctaacaggactaagagagagagggggtgcatgatgtttttcactaacaagatcacaaaaccaaactcctaatctgagctaaagccaattcctaacttgacaacatctactctacactgcccgaaaaaaaaatctactctacacgcaaccttcaagcaccaggaattgagaattgccggaaggccattctcatctatagataaattactccatccatctcgtaatatggcattaacaatagtgcacttgacatattactaaacctatcttgatcctacgacactatctcacgtggctcgatcttttagtgaaggcataactaccccatacaattgctacacagtgttgtctttaagaatctggggcctgggctaaatataaagtgagaccttatatataatgtcgacgatgtgctagagctatgctaaaaatactcacctaactacttgaggtgacgacctggccaaatataagaaaaattttatgcacttattaggaatccttactgcttggaacacacattcacaatgttgttactttaaagagcatctttacggttcagcggtcgataccaaaatcctggccgttggatctggcccgatccaaaagctggtagagtttggtaccgcgaggtaccaattctgtccttggtgcagtacctcgtggagaacagaggtggaagggaaaaaaatgtaatttcgcgtgcaatgaatgggaggaatggacgggaaccctagaattcctcttccgcgtcgccgcctttctcttccgatcagctgccaccatgtcccttttccacgccgccaccgtgttcctcttccgccctgccgctgtcgtgtttctccttcagtgttgcaagatcggcctccgcaccatcagcgacagtggaggcagaggcggatgagccggcgacggagtatgtggttgcggcgaccgagaagccgctccggtggcggcagagtagaggaggactagctggtgccggagtaggccacgggtgaggcgcgatgaaggaggcggcggtgcacacgcgcgtggggaacaaagactgtggcgcgtgtggaaggatagtcatcgaccgagcgcaccctagcttattttctctcccgatcctacccttcccagattcaatggttggatgaatttccgtaccgaccgataccagtaccactcggtacattctgctggacgataaaaaatctctattttaaaagtagagtgaagagattttaaatatgccataacacattagcatagagtgaaacatacgggttttttgaaggccctaatatctagggtccaaacggtcgtttatcttgcacgtctcgagggacgggtcatatacacgtattcggtacaatctctaacatgcggcattccatatacaggtgtaattattctgattgctgtaatcgacatggacggtgtaactataataatatacaggtgggaacaatctttgcagagttacaaccagtatcaaactgagttacattctgcataaccactatgacacttccttttatctattctttattatagacaaacgagtgcagaggccatgacccatgagttgattctttagttattgagaagaagatcatgcagtcatctactcatctgcacaaatcgctccaacaaacactcatcttggctccagctcggtgagcgacacctcattcggcgacgccactgctctcgtcttgctgtcgccggtggaccgaagcgcgctcgagtagagatccgtgtcggcggcgctgtccgtctcctggatgcagaacgttggcctcgacggggcctggatggagaacgtctcgctgctgagcatcacgctcaccgccgacatcgtcggcctgtccgccgggttgtcctggacgcagagcagcccgatgttgatcagcttcagcagatcgtcagctgaacggccgcgcatcgccggatccagcagctcctcgatcgtccccgttgtccagtgctcccagacctgcatgcataatcaggataaatttgtcaggatgattttcaattaagaagatggttttcgtatcatgtttgattgatcaggtctcatggtaatgaggaggagcagagattaatgatgctcacaagactcaagaggtcaatggattgctccgagttggagaagctgctgtttctccttcccgtgacaatctctaggatcataactccgaaactgaacgcgtccgacttgactgaatactgcccacgcatggcgtactccggcgccatgtatccgctgaaaataataggagatgatcttgtaatgaacctgtacctactttcataataccgtgccatggaattgcaggggatatatatatacttactatgttccagcaatgtgactggtgacgtcttgcgtttgatcccactcaaacagtttcgctaacccaaagtccgagatctttgggttgtgatcgaagtccagcagcacgttgcttgctttgaggtcccgatgaactaccctcagttgagaatcttcgtggagatattgcaagcctcgagcgactccgcttacaatcttgagcctcttcccccaatcaagatctttgcttttctcataatcttccattcaaacacaaaggaaatcagcatcaagtcctatagtgtaatggtatgtatgcatgtatctctttcatgtatgaaaaagaggaacgcttcgatttcgcaaaggcagtgaggggattgtaccgaaaagaatggtgtcgaggctcttattcggcatgtattcgtacacaagtagtttctcatctccttccaagcaaacaccaacaaggctcacaaggttcttgtgccgaagttttgcgactaaaactagctcagttttcagttcttctatcccttgtcttgaactttgtgagagccttttcactgctatttcttgaccttcagaaagaactccctgtgtacagatgaatatatgggaaactattctaatccctcgaggggattttcctcgtttgctcaaaaaccatctaaacggttatgaaaaattctggaaaaatttgataacattcatacaacatatatatacaacttcacaaaatcttatccaaactcaactcacacgtcgagatataaaaaagacaaattcagcgtatgaatagtagtgcactgtttatatctaaatttgtctttttgtttctcgatgtgtagattgaatttgaacatgaattttggtggactagtaggtatcattatactctacattgtcaatttttttcagaatttttcacaactatttgcatcgaatttgaaagaaaaaggtatacgaggggatatccccttgagggattataatccactcccatgaatatatagataaacttgttaataatgaacacgaatgtattcactttctaataaaaagatgaacaagggttacatatggtttgatttgtaccttgtaaacggcaccaaaccctccttcgccaagcttatttctgtcagcgaagttgtctgttgc

SEQ ID NO: 21037 - DNA, 4333 bp, Oryza sativa
tttgttgacgcgctcgcgcgatactgtgttggtttcagaattatcctgtttttcatcgggataccggtatatagcagccctcttttataaacaacaaaatccgggcattcatcaacagaaggaaacgattccagataatcaaccagagagggttaggatgcaatgctgattgatatggtctcaattctaccaactagacaaggtttacagcttcagggaaaaaaaaagcatcatcatttcatcaccaaccaaacatggcagatttctacattactcatctactggtgtatattggagaaatatgttacatgatgacatgtcataacaattgacataggacaaacttgtgacaaggaggtgagttccattttccttgctttcttgatgaaatggctcctggagactgctacctaatcaaagaggctctctacaccgggctgaatttttcttctttggcccgtaaaagaaatgcaatgatcaagtaagttgacatgatcaagactgcaacgaaaaatatatttgttgagttcaggggttacatgtctagagacctctagttgcagtaactattcatcctcaaagatcatgaggcagcaaagaggctccatgagttgtgtttcggatatgtgctctgataagcagaggttggatagcagtcacacttcaattccttctccggctcaaatgccacactcttgttgctcttttgttcaagttcatctgaatcctttagtgaaccttgttcttctgagcctttcttgcgcttttcagtatcttcgagtctttcggtaccttattttgttcttctgaatccttcgccgccttcatatcttctttcgagttcgatggcttttgactctttcaaaatttttggtggcttcggttgttttgaatcttttgacggctttgattccctggattcctttgatgacttcgaataccgggattcctttcatgactttgaatctttcgatgatttgccagactgtttagattaggcatcacagataacagtgagcaccatgacttcaggatcatagctaattatatacaacatgaaagagcacatagactagtgcatgaagttcaaagtagagcctttttcaattttcacaattgtatagtgcatgaaatggggaaatatgtaactaaattttgactcaggtaccttctttgtcagtttattgagatcttcaggtccattttcttcaataaacttatcaagtgccgtgaggaagtcatcaaatttaccggaaagaccctttttctctgagggatataccaaatatttactatctggttctttataaacacagatatcacataattttggtacacataggctgcaccgctgaaatatggcaagacaggccagcaaataaagatcaatttcatggatggccaaaaaggaagcctgcaaaaatataagatggagagaccaaggaatttaatcagtcaatgtatcatgctaaccaatcataaatttgtgcaagccaaagggagggagagatattagagcaagcatgaactaacagatctttcttccttaccattatgttgtaatcaccatccaaaccaaaatatgcaatgctaaaaatcacaattgcattattaaaaatcctacaaaccttttatcacacagcaatggcatgaattgaaccatataattgcagaacacttgtaaacttgtattgatatctctttacatttttgaaaaagggaggagggtgcacctgacagaggaaaggtgtatgtttccgtactatatctaaacaatgcatgacaagaactaaataatgcttgcagttgcagggtgaccaagtgaactcgtaatttccctgcattagaataggcaacatgtattcccccaaaaatgccaaaatggtcgaagcctgtttgttacttttttgcaactgtttttttcatgtaggcatgttagaacattgtatggtcatagctactactgtttctatgctaatgataagcatctagcgtacctggatttcacgtggtcgtgtagtcctttagtactgagagtgccaatgtggtgcctattttcagatctaaaaaatgtctattcacagctcacaaagaaaatctggcgggagattgaagaactgggtggtgagatcagggttgcagtatagtgcaacggtgagaagaaactcaccgctcacaaaaagctgggacttgggccgtgcagagctagcacggcacggcccagtgtgcttcgtgccaaattgggccgtgtcggcccagcacgccccactcgtcgtgccgtgccgtgccagcacggcctcttcaggacgcggcccaagcacagcccaatggcccgacgggcctattcgtgccgggccggcacaagcacggcccaaaagatgggagcaggccggctgcgctgagaagaaactctggcggcgacgcgccagcggtggcttgcggcttcgtcgtcccgtcgcggcgacgcggcagtgacagccacacccatcctgctcctcctcgtcggctcgtcgcggcgacgtagcccaccggcgcggcggcgtgagtcagccaacaatcttgccaaatgctagtgctggcctgctgggctgctggccttgctggttgctgctacgtgctaccgatgagccgatgaagaaaacgagctgctacttgctgctacctgctggctgcataggaaatttgaccgtggatgggtgatgactgatgacctcgtgctgcagcagccattcgcgtaccgtgccggcccaagcacggcccagtggtcgtgccgtgccgtgccgcccgtcgtgcccgttgtccaggcccaggcacggctcacgtacgggccgtgccggcccagcccatttacgggccgtgtcggaccgtgctttctatcgtaccgggccatcatgccttgggccggcttgataaagcatggcccaagtcccagctctaagcaaggggtaaactttgccccctcccccccaaaaaaaaaaaaaattggccaaaaacacatttcgcccaaaaagcctacttaaagataaaatactcagagagtttcccctaaaatataaaaactcgaatgaagttctcctctttatagaaaagttcttttaggacatgtttttacccaaaggaaacagcgttatgaggaaaagtacattcgagttaatgtcaagtagacagatgtattcgagccaacttcatccacctgacattatttttcctaatagttgtatccgagcaggttcctatggagtgacaaggcgccaagataatgggaaagtatattcgagttctctggtgcggccaagacagctgaaataacaagaaaagaaggaaaagtcttatcgagcagttgactcattcgaggaaaataatcgtggggaccacttcgactactctaaccagctggcaccagatgtcgcctagggaccactagcaaagtactattatacccctagggcctatggatcactaggggtaatacggtaactttatgtaagcccatgatgacaaagatgtaaatatttgtggtcatggtcaaacactataaaaggccgaccagagtcctgtagcaagaacacaatgaaatagagaaaaagtaccttatatacatcctgacatctacttttgggctcactctcagggtaaacgggaatctacactttcccgtttacccccaactctgttcgtgccctaaggtcgtgacagtggcgccgtccgtggggacgtaaagtctccattggagtgggcccaagtggtaaatgcgacgttctcagagaccgaaaactgtgccaattcgttacactgacacttttgcaagtgggacaatagcacttgagaaggaacttgagaaggagtttgaaagagcatttgagcaaagtgatattgcgaacgtaacaaaaacgcttgaagagaagtgggcggaacaagtcaggaaaaggaaactgcgaatccctcaaaggaggaagcggggaaaacaaccacaagtgaagtggaacttgccgaaatggcacaagcacaaggggctgttatgataagcaaagaacaatacgaaggactatagagagagctacaaagactccaggctttgcacagtcaagcaattggagcaagtggatctggtgatcaactggagacataagaggctgatggaaaacaaccaaacttggcagaaaacactcatcaaggagatactttagctggagatcctcaagtcgtgaagttagcagaagagattcctcaagcccaaattatcaaaatacaagttcccacccaacaaatccttcaaatgcaaaaccccacccaacaaatccctcaaatgcaaaaccccacccaaatccaaaat

SEQ ID NO: 21038 - DNA, 2534 bp, Oryza sativa
ggtggtactccgcatggatgcgattttgcttattttcacaccattcggcgctatacaaggcaaaactcccaatttgggtgtgttaactttatgccacgcttaaatcgcggttgtccttggccagttgtctctgttatgtggaccaaatggggaactcattggcagtcaaaatggttctatcataagattccagcagatctgaaaaccatggaaaaatgcccttttgtgttttcttgtaaatctttgagtgtcatctcagatccagctgttactttgtcaaaagactttgctgacattcgccctcgaattgaagaacttgtctctaaatttagtgttcgagacttggtcgaggagttcatttatcttggtattcgacctctttctgccaactggactttatctcttggtgaaattcctgagggttctagttctttgcttcctcctttcgagatatctgcgaatagtaagtgtttaccttgtatatgtattttttatttcaagcattatatatatatatatatgtaattcatttttttcttctttttttcttctctttttttcttttttttgcagcaaaaattgtgaaggacgtggatgggccaagcaagaaatatattggcccttataccaagaaagagcatggcacatatcttgcggttcagcaaggtagaaaacaaaacaggattctaagtgccctcggccaagatatgatggttcgagttcatcctgatttgaagaagaaaaagaagaaaaactcgaatatcaatccaaaagatgctgcatcttcatcttctgataatgaggagaatagcttggatggggagtctgattcaagtgatgaatcgtctgatgacagcggctcctctgagtcgagcgaacatactcacactgctccttttgtgcaagaaaactcgagtcctgctttgaagcgtaaaaagatgccttcaagttctcctgttgactcgaacttgaaaaaagttcgaattgctctggatagtgatgatgaggatgaaaacattctgtcttatgagctacctgctatcagtgagataagttcagttgagattgggaatgtttcgaacgttaattctctttcagctgcagctgattacctctctgctcccttgaacgttcttacttctgctgccaaagaggttgaggaacctatttgcattgatgctattgatgtggacatgaaccctgtcaatcctgtaacaaacagagaacttcctgaagttgttaatctgaatttccaatccagaaaaaacatagttgaagatcaagccacagaatgaccccttctcccgagttgataaaagatatacttggtggtttcagcgagcgatgttcgaaaaatggacaacttggttgatgggtttgcctgatttttgcgcggatggggagactagcagtcgaggttctaagttgtgtcttgatgaccttaagtatcgctcgtctcttcatcagcttggaaatgaaattgctcctagcctcatcactccggagcttgaaaaggaatttttggagcacaatgatcttatctcagcttggacggcttttcttcttctttctttttctctaactctgctggggtccattctgccacaaattttgccaacacttgtgactttatcgctgttcttgatgtgtatttcaagtcaaaaggcaaaagttccatagcccatttggcaattcttcctgctatttccttgttcgacaacacctctcctattggataagttgatggtactgttatgtcgtgagataagaaataatgtctcaattttcttgatgccatcacaatagaatatatcatcttttccacttctgtataccttgtttttggtccttgcaatgcttcggacataaaataaactggcatttgcttgttaccctgttcttgtactaagactgcgcttactgtcaccagtgtggcagctacatatagcaacaaaggttctcctttttgtggacttgacaaagttggcatgttatgaaggtaatctttgagatcgtcaaaatctttttggcattcttcgttccattcaaagttgtttacccctcttaatgtcttgaaaaagggtaaacctctttctgctgatttggaaagaaatctactaagcgaggccattctccctgttaatctttgcatttctcttgtatttttgggtggctccattcctattttgcacaattcctcttttggatactaaaaacccaagtaactttccagctctgacaccaaacacgcacttttcaggattcaacttcactgaaaacttcctcaagttctcaaacgtttcttgtaagtcttttccatgtgtaaaagctttcttacttttcaccacaatgtcatcaacatatgcttctacgtttcggccaagttgatttgccagaaccttgcatatcaatcttgcaaatgtggcacccgcatttttcagaccaaatggcattcttatgtagcagtatgttccaaaaggtgttatgaatgatgttttttcttcatcttcttttaccatgaatacctggtgata

SEQ ID NO: 21039 - DNA, 704 bp, Oryza sativa
ccacagcgacccttcatccgacgacgaaccagattttcctaacttcgaccaacacgtggcacacatcttcggtggttcaacatcctattcctttaagcgagaatgcaagaaggtagaacgtgaagtttgctccacatcccgggtatcaatgtccaaaatgaagtggtcaggtcagaagatcgagttctctgataacaacccctgatagatatccgatagtagtcgagcctactatttggaatgtcaaagttgcacgtgttctcatcaacgatggcagcacaatcaacctcctctttgcagatactcttgacgcaatagggatccctagaagtgagctcatttcttcaaagcagctcttccatggcgttacacatagtcatcatcaagattgttatggaagataatgttgcttgtgactttcggcaaggctgataacttccggacaaagcagatcacctttgatgtagcagagtttcacactgcgtacaatgctatcatcaaaagagcggcacttgcaaaattcatggggcttcgcactgcgcatactagcggattaaggttccaggacctaaaggaataatcacaataccgagaaacgaaaagatggttgtgcagtgtgacaaaaggaatctcgacatgattgagcaaactgccaccactcccgccgcaaccgagccaccccaaaaagtgagtaaacccaactc

SEQ ID NO: 21040 - DNA, 13503 bp, Oryza sativa
tgtgttgtgaacaaatttattacttcattgcagatggtaagacattcagaagccacgtcgcccttacgagaaggagcgtcttgatgcagagctgaagctagtgggtgagtatggactgaggtgcaagcgtgagctgtggcgtgttcagtatgctttgagccgtatccgtaacaatgcaaggcatctgctcacacttgatgagaagaatccacgccgcatctttgagggtgaggcactgcttcgccgcatgaaccgttatgggctccttgctgatgggcagaacaagcttgattatgtccttgccctcactgttgagaacttcctcgcaaggcgtcttcagactcttgtcttcaaggctggcatggccaagtccatccaccatgctcgtgtcctgatcaggcaacgccacatcaggtatgatgatttaactactacagatctcctgtcttgtaaatgggtaaatatgaagctctaacctttatattacaatttccatgtctcagtatgttctctctttagtttcaattcccaagtatgcttctatatgatttttctacagcagcatggaagctgtatcattctctcatagtaatcgttcattgtatattcatcatttctcttgatctagcattgtgtaggcagagctaaaatgtcattttaggcacaacacatgctctattagctgaaagctgaaggccataatatattagtattggtcctgtactcctgttaacttcccatcatttgagtgtgcagatgctttcaagttagtctttttcgtgcatttgatactcttgttgggcttgtcaatgtcgcatttgagagtgttagtcttttcatatgtagatattacctgtgatgtttaactttgaacaagcaatttggcacgcaccacttgctgttgctgtagttcgttactttacatgatgttcctttacatcaatgttcctttacaagtgttactcttttcatatgtacatattgcctgtgatgtttaactttgaacaagcaatttggcacgcaccacttgctgttgctgtagttcgttacatgcctgctgcagtgttataattctagattagcgatgatgagaccatttggcaacttcacatgattttgtcctgaaaaaggctactgccacaacattctttaatgcactctaaagttactactattttagaggacttgtcgaccataagttgaacatgatgttgctattgctaatatttttttccaagttgatagcctttctgaagttcattcattaaagtttcaaaatcactgtgcagggtcggcaggcaaattgtcaacatcccgtcgttcatggtgagggttgagtctgagaagcacattgacttctcactgacaagcccattcggtggaggcccccctggtagggtgaagaggaagaaccagaagaaggcaagtggcggtggcggtgacggtgaggaggaagatgaggaatgagaacagaagtttgcaactagttgtttccgtaatgatcataaaactctgtgctgagtaactaggcccaaattctgtagcttgcctatctgggattcagaattcaagcaggttgtgcttcaggtgttggtttatgttaaccctttttggcattatgttaggtatagacttgtggttaatgctgttttatggattcgtttcatggtaatcctcatcgtaccagtgcgcttgaactagtgatactcactcgtaccaatgctgtttttaatgtttttatggattcgaagttgcaacatggattatggagttgttaagattaatttagtagcgtctcaggtaatatttacatgttcagaccaaaagatccaaatccaatcatacagcgcattttcctacaaatggcgttcgctagatagttcactcctatgttatcgacaaattttgaagaagtgtcatcaaaatccatcgaattccatcaaaaacctgttactgatggcattattcagaagatttttcctcctgttctttttgcgtttcaatactctgctcgaaaaaaatttgtcctcctattttttgcatttcaactgatatccccatcatcctgatgtgataatcagagcaatgtacaaaattctctcaaacattaatgaggttcagaaaatttctccttttgcatttcaaaatcagtaaacagcaatgattcattcactatgcatcctgggaagaaaagaaaagaggaggcagcggccatgggaccagtgtccacggagcaaactctggacgctgcattcgggcgtcacgccggtgttggctatgctgctgctacccgttcgctggagggacgagacgagctgcctcgacgacccaccgagccggagcccaaggaggaggctcccctgcgcgttcgcgggttcggcagtgacgatgaccgcggaggacggcgtgcgttggccgagtggctaagtcgatggtggcggcgggacgctggtccgctcgaacatcggctggtcatgtaggcgtatggcctcctatgcacatatagcaaaggaggaaaatgagcagctaaccattcatagtacgcaagaaaaaatggttgccagatttgctaggtccgcgtaacgtagaatacctgtcaggcaaatgggagcaacactgctattagagcatcaaattcaccggctcgacggcgatcgccacggccgcgacagtcacccggcgagcccggaggagcatgaggccgtggcggctgccctgaccgcgagctccatggaagaccgcgacctggaagaagaagttgaggcaggggttgccggagtcggcataggtggcggatcgaatcgttctcggtgcaggccttccatagcttcggtttctatccggagatcctcccgctcctccgcggcctgtccatcgccaccaagaagctcgcttacggctgccatggcgcctgcctccacctccgcgcccgtcgccgcggcgcccggccccgcctcagccttcacacccaccgccgctgctcccggccagccgtcgccgccgcgccaccgcgccgcccgtatgctgtaaaaaatgagagagagagagatgaggaagggagagagatgatgacgtggtcacctgacgtgtgggacccatgctgactctgccgttacgtagaacaaaaccggggtcaaaaccagcaaaggatataaagtgaaccgttttgttagttgagggacgtccgatatctcgttttgcggttgagggacgattttgtatattggatgacaggttgagggaccttcggtgtacttttttctttactttgtaagtttggaataagtccatttttgtctcgctcatctcttgcgcttgcgtgaataacatccctaaactggaaaaccgggtataacgcatccttcatctctaaaaaccagagcaaatcacctccctcggtggttttgctggcggtttcatccgacgtggcgttgttgactaggttgacaagcggactcaacgtggtgggacccacatgtcagtgtgtagctctctctctcccttatctctctctcccccggcctttcccttcaccccggtgcggctcgtcgacgtgggtcgagcccaaggcggccggcggcgcattgcgacagagaaaggtagccgtgcggcggcggcgatgcggaagcgcgcacggtggcgggcggcgcggacggcgcggtagttgactatgggtgaccttgcgcagtgggccaactatgcgcgggcacggcggatggtgaggccgggcacggggtggcgcggcgcgcggcgacctggcgcggcctgatggtggcggcacgacgcggtttgccagtgaggctcggcagtgcggcggcaaggcgcggtcgatggtggcctggcacaagcatttcgtgggcgcgacgcaggtcacggaggcctttgcggtgtggcgcgcggcagccttgtgcaggcgccggcgaggtgttgatgaaaaaatcgaacacaccggcctgggagatctgcttaggtcctgtacacgtccaaagattaatgagatacaggcgtgccagtcagtttaatcctgcaactgataagatttgtaaataatagatcaaacagccgatcggctgacaagccgatggagtagttccagccgatagtcgataatagccgatgccaataccagccgatagcgatagggtttaagcaatcggctatatgtccaatgtagataatgatataaaggcaatcggctgatgatgatgtaataaaataacaatataatccaatataaactaatcggctagcaatgatatgataaataagcatcgatacgaaggttaaagcacacatcggctagaggtccgatgtcatgaaatccacaagattagattaaacaatgaaacctttgttgtcatcggctaaatccaacttatatgtatatgcaatcctcatgagccgatgcaacgtccagataactcaccggctgaaaccccgataaaacccttattggcaatcaataagcaggctagagattatggttctaagcacgacttagtagatcaaaattaactgatgcagcactaagtataaaaagaaacataatatctagacaatcaagccgatgactgattttcagggtggtagatgcctaggctaatctaatctagcaacgcgatttagccgataccggcagaaaccctaaaacgagaagcagccgatagagctaaattgatatgctaagactagattaacagagacatatgataaataggtaggcaagtatatcatctaaaccagagcaatccaagaggtcgaatgtactgatgcagccttgaacgacgccgatgtagacgatacaattgcctgggccgacggaacattggacttatcccttcgccggagatcgaagacgatgcagccccgcgtcgggtgccaagtcctgccggaacgtaaaaacaaaagtagaaataaaaatggtggcgatgcgccgaattgtattgatcgtagagatcgattacatagaccccgggtgtacatatttatacccatgggttgatacaagtccttgtcggacaagaaagaaactacctaaagataaaaggaaaatatagagtccttatcggacactaaacaaacttttctaaagataaaagaaaactaacaaactattcctaattaatagataaactgccatgccgcatcctctttaaactcggtcacttaggaataagcttcctttagtagattgatttccttaaccgaatatagcaggaatccgactattggtgacttgataactcacatcggctgattccgagatgctgcagccgataatgattctaagccgatgacatctttgccgattaccaaatttcactgttaacacgaggccagcgagcatggcgcagacggcgatgcagccagggaggcgtgacggctggtcggatcggtgtcggtacggccggcgaccaacgttcgtcggcgtcttcttcccccttttcttttttccatttcttctcttctttgtttcttgttgctccggcaattcgctcgtcatggcgcaaccgtgcggcggcggcgcgtccaggccgagcggctagcgtcatgggcagccggtgctgcagtgcatcggcgtgtggagcggatgcatgaccggtttccatggcgccgatgctgccgcttttcctttctttcattttgcttttcttctttgtttcttgtcctctccggccgggcgttgtggcggagcgacggcgccgccaagatgcggacgcgaggtcgccgctgggcgtacaggcgcggggttcgctgccggtatgcaggtgcaggctcgctgctaggacggccacggcacgaccactccccgccgccgatgcccagctcctctccgtcagtctactccccgttcgtcgctagcgagcaccgctgctgcccatcgccggccgcgcccctaccccaccaaagtgaagagaaaggccgggggagagagagataagcgagagagagctacacactgacatgtgggtcccaccacgctgagtcagcctgtcaacgggtcaacaacgccacgtcagacgaagtcgccagcaaaaccaccaagggaggtgatttgctctggttttcagaaatgaaggaggcgttatacccggtttttcggttgagggatgttattcacgcaaacgcaagagatgagggaggcaaaatggacttattcctataagttttgggctttttcacagtcccactccgtgtctgagctctgaacttgtgggcttacactatctcttgctccttccagcccatctttttgagtttacccttcgattaacctactgaagttgcaggagtaatctgtacgacatttttaaccataccattatttaacaaattaataattatgtggttatatttagtttgttatcaaatattggcaatgtgtatagaattttggcaacattattaagccaatcctaccaaaattttagcaatgttgttaatttgtcaaatttttgatattgacaaattttagtaaggttaattttgacattaatcagaacagaccctaagactaaagagtctgtgatcgactgaagttgtgacttgtcgtgcttgttggcaggctggtggccttctctgcatcacgggaaagcctgccgcgaagaagagcctaaggatgaaagggaaaaggtgtaatgtctgcaactactgctactagctgaaacctgaatgttaaaattttgtgtacaaaatcatatacgagtaaacatctgaaaactgagggctgatttggtttgaagccaaaacttgccataccaaaatattggtattttgaacagtaattttggtaatgtttgttttgctaccaatacttaccaataccacacaaatgttgctaaaatattggcattggcaaaatcttgcccatgatttggcattgccaatagtttggcatggttgcaaaccaaacaatccctgaaatcgtcgtggtgtcgttacttcgtcagtggaccgcatgagattcggcgcgtgaagcgcaacttcctacgagagacgctggagaacgagctgccggagggcaccatcaggttctcttccaagatcgtctcgactggggaagatagcaacgtcaagctcctacatttggccgatggttcaacgataggtgtgtgagatcaacaatggctagcagatcacttgtacctctcttcttctcactaagagcagccatggcctgatgcattgatgtgcttttgttgaaggtgctgatcggatgcgacggcgtgaactcggtggtggcgaagtggcttggcctgccaaagccaatcctctcagggcgctcggccaccaggggcctcgccgagtacccggtacccctcccctgatggtgcgcaccgttgctagttacttctccttgacgagcagcaacaatggcggattaattcgctgatcaatctgtcacgtgtggtgtgcacagacggcgacgcggaggagagcgtggccaagatgcggagctacgtgctggcgaaggcggcgaggatcccggcgccgctgaggttccggtcgccgctcgcgctcgtccgcggcagcatcagcaggggcaacgtctgcgtcgccggcgacgccttccacccgacgacccccgagctcggccagggcggctgcgcggcgctcgaggacggcgtcgtcctcgcccggtgcctcagcgaggccttcctcgccgacggcgccgagcacgacccggggtacgaggccgtcacggtggcgctggagaagtacgccgaggagaggcggtggcgcggcatccggctgatcacggcggcctacgtcgtcggcttcatccagcagagcaccaacccggtgatcaagttcctcagggagaagttcttgtcaggattgctggcaaaaactatgatcgccatggctgattacgattgcggaaagctatgattctgttcacgagaaatcaagaacccaagaagagaagaaagaaattggcggtgagcgggaacagtcttaattagcacatggaacaatcttgtgatgttgttaaccaagcacgagggggcgagcttaaagtccaccgtacaatgtactagtaccacgtacacactcaccatggcagatgctcaaggcaaagtcttatgtacggttttctatgcctctgtatcaaagttgagttcagcatttgacttgtgggtatgtgtccgagacaagttttgttctagaaatttcgtggacaaaataagttcttggagtacaaggtaaacccaaccttggcataatttagacacaataacaaaattgattaaaaaaaaggtttatttagagtgcaaatagcacaaacagagttttttttaaccaaaacaagtagtcttgagatatttttttttcttttgattatatgattacatgaaaatacatttaccctcatttagcacattattaagacattgaggctagaaataattccacgaaactaactaaattaaccacattaggatttcaaacacagtgggtaaagtaatatgcccataaacttagcgtcaccgtttttcgctcacggtcaccagaatgtttagaatccgatactcaattcgcaagcctcataatatttgacacccaattcgtatatgtcttccagaaattaccaatttgtttggtgacattatctcccatttttctctttttccttcttttactctacgtttttttttcccttctcacatgattggagtagtggacagttttttgcactataacaggggtcaggccagttagcagttatcgagctaaaatcgtcattcccggtttcccaccgccaaaacccactggcgggtggcggctgcctgctggcccatcgttgagtgactcaaagaagccgatcaatctcagtggcgcagaggtagcaacagatcaagctgccataatcacatggcgtggttaatcgcccgaacatatgctgcaaatgggtaaaatattaacaaaccggtttgaccaagtggcttcatccgcatccaagaatcttatatggaacccatgatttaattaggagcaatttgcagtactgccaagtgtgaggaatccctgtctagtttgttatagtgcttatcatatagccgaccataagccagtgtacatgcatggttctgtggcatctttaatatgcgaaaaaaggttgtatactagctagataagcttgtagcccaaaaaatgaatcttgaagcatctgtagaaatcggaagcaaagtgtaacgtcccgccgccttcccccaggccgggcccgcttacatctgatagctttcataggtcacacatcttttctgcacactttgtcctcactcgtgtgcacccggaaagaatttcccggtcggtcccccatcccaaattgctccaggccaagcacgcttaaccctggaattctttggagattggcttccagaaaagaagttgcaacttgttgatatgagtattctattaatcctattaagccctagaccgggatgttacaccctcacccccttaagagagatcgacgcccccgtcgatcaaccctaggccaggaacgtcatctcttggccacgtccatgtgtgataccattttgtaacgtcccgccttcccccaggccgggcccgcttacaggccaagcacgcttaaccctggaattctttggagattggcttccagaaaagaagttgcaacttgttgatatgagtattaccctcacccccttaagagagatcgacgcccccgtcgatcaaccctaggccaggaacgtcatctcttggccacgtccatgtgtgataccattttgtaacgtcccgccttcccccaggccgggcccgcttacatctgatagctttcataggtcatagactgccctcacagaccaacacatatcttttctgcacactttgtcctcactcgtgtgcacccgggaagaatttcccggtcggtcacccatcccaaattgctccaggccaagcacgcttaaccctagagttctttggagattggcttccggaaaagaagttgcaacttgttgatatgagtattctattaatcctattaagctctagaccgggatgttacacaaagggctagcatcaaccctttaaacagaccaggttgccaatcatgtaagactgtgtattacgcacaccatagcctcagcaaaagaaaaggcttctcacggagtggattctaatctctcgagaggatatcctctcatgtatctttttctttcaaatttgatacaaatagttgtgaaaaattctaaaaaaatatttggcaatgtagagtatagtgatatctactaatccaaaaaaatcaaattcaaattcgatttacacattgagaaaccaaaagaaaaggcttctatcatcactgtcagtcaagtaacttaaccagaataaaacagagggaaatatgaatttgtcagctatttctgtcactgcagctctcaccattcaaatctagaggtttgaccatatgatctatcatggccaccaatagataaagtgaggtcttacaaactaattaaaaaatgcagtacatcactacatccacaaccagttgccctaatagtccaatggagggcctcggtgacagttgacttacaagcaagcaatagtttcttttcgtagatccccatcaaccaaacaaaaaacaacaaatctgagcactgggagagctccactacccccatcatctgaaacaaaaattaatcacctatttgcactgctaaattccctagcttccagacctagctaactgatacctaccagtggggaccacctgcaattccaagaatcaaactgtcatgggcgcaactagtggtggtgatttgtctgaggggagccgggggttggattaacgcgcgtcaaccgcctaaatccaagggggtgcaacatgattaccgacgcttctcgatccaatgaccctaggtaatcacgcgacctccccggccgtaatcccatgtgctccaggcagccgagtctcgtgacctcacgtgacgcttccgcctctagctctcgatcgatcgatcccaccactaattatccactcccaaatgattgtttagtggcccgtatcataagaccggccacgtcgtgcagctagtgtgacttgggagagacagtgtaccggccatttgccagatttgcttcctcagaaaaatagcagagtcggccgggtttgcagacttgcagagatcggaagaatctttctctttcgaaatgttgaggatttttggaaggaaaacaaaagggaaatggagatataggaatcgtggcatttaaggcggcacggtgcagcgtcgtctgtgggttgcaacatgcatcggcatgtgagtctgcctcgggaggcgcgcgctcgtcgatctcgtggccgccgcacttcctatttaagcaccgccgcgggtgacaccgtcccctcctcctcagtactcagatacattacccgcaccgcctaattaagcgctcgcatctgaagccatttcgagggacgtcatggcgcggagtgccttcttcttccactgcgtcgccgccgtcgcggcgtgcatcgccgcgacggccgcggcgctcagtggcacggccacgttctacggcgggagcgacgcctccggcacaatgggtatagtttagacatttgctaattaagcctgatcagttttacacacaccaatggactggtgctgacaatggcgtttgttgttgatcgacaggcggcgcgtgcgggtacggcaacctgtactcgacggggtacgggacgaacacggcggcgctgagctcggcgctgttcaacgacggcgcggcgtgcggcgagtgctaccagatcacgtgcgaccagtccaactcgaagtggtgcaaggcgggcacgtcggtgaccatcaccgcgaccaacctctgcccaccggactactccaagccgagcaacgacggcggctggtgcaacccgccgcgccagcacttcgacatggcgcaacccgcctgggaacagatcggcgtctaccgcggcggtatcgtccccgtcaatttccagaggtacgcacatactccggtcaccgtcgtttcgccggccggcggcgcacagaatcaagtagtgatcacgtacgtatacgtatgtgtgcagggtgtcgtgcacgaggaaaggaggggtgaggttcaccatcaacgggaacagctacttcgagctggtgctgatcaccaacgtgggcgggccggggtcgatcaagtcggtgcagatcaagggaacaaagacggggtgggtgaccatgtcccggaactggggcgccaactggcaagccaacaactacctcaacaaccaggccatctccttctcggtcacctccaccgccggcaagacgctcgtcttcgaggacgtcgcgccgtccaactggcagttcggccagacattcaccagcggcgtgcagttctactagctagcggctcgcgcgcgcgcgcggcggcgcatgagccgccgccgccgtcgcgcgcttgcccaacggcgagcggcgcatgccacctgccgccatttccgttcaatttttgcatttggaaaacttgtcaaaaagaccagcttatttagcatcattctgattggggaaaaaaatgtattcttagctaggggaacgccactgtggtttgcatggctgaggcgggttccaacggtgttcgtctggccgggcggcctgatcgatagcccgccatgcctaaccgcttttacgatgattgctgggaaggaaaactatttagacgactttgcttggacacgaggtaaggagtgcaggcactgatcgatccgtgtaatgctgaaatatggcgctcattggaaggcgcaaaccacatgcgagtttactgtttgacccgatgatgatctcaatgaaatgaattggccattggccctgtaaattgactgcagtatctttgtgctttcactgtgtattttgcgttgaaatttagctcatcctgcatgtggtgaaaccacgccgactcgtgtgcacgtcccgcgagtggaggtagagtacgggatgggggtgctaagaatcccgtcaaaaaaaattagttgtatctggatgttgattttcattcctcgaggggatattccctcattgtttgtatgtcatctaaatagttattaaatttttttaaaaaaaactgataacatagactaatatgaaatatatcacttcacaaacatgcaaaattaaattcaacttctacaagttgcaatgaaaataacaaattaaactgaaaatagttatcgcacattcacaactatagttgtctcaatacaaatttagacacccccaccaacttaagcttgatctaaagtagagtaaattaagcaagaagcaccctcctttattttgttcttattccgcccttgcgtgaggagcgttatggctatgaaagacctgctggtgagctggatgagagcatgtttgctactaacgtgcgggccaattttatagattcagattgagtgacatagcataggcatgtcacaaggtgacatagcgtagatctcagccctccaaaccaaatccaacggctgag

SEQ ID NO: 21041 - DNA, 17287 bp, Oryza sativa
  unsure (1)..(17287): unsure at all n locations
gatggtttgtgttagagggcgcggtcccagcctgaaggttatattatactggctttaccataggtctaatcgtagttataacttttggtaatacacctatacaactaaaaaaaatagtctaatggatgaggatcaactctatctttaagtcgtgcccctggtaacaattactatgtaggacttaggggctgtttggttgctagtcaaaatttgcctcaatttaccacaagtatggcaaataggtttgaccaagttagtatagtgtttggttctagccacaagttagtcatgccaaactttcctttaacttgaccccacatttcatagatacaataatgtgtggtaaggaggctaagatgtggcttcaattttcttggccacaactttggcaacttagccacaaatgtttggctggcttaggtagtgttacacaaccaatcaaacagcccctaaacccaacagtttcattcttcaaatcaaacagcatgaacgttcctttgtcagactttcgatgagtttgaatcttatacaacaatgctgatttcatgtatgaaaaaagagcgacggcccgctcttcttcccccaactatatacatagccaacatggagaggtcatgcgtcatggccggtcgcagagtgcgccatagcagtgtgtgtcgatgtcatgcgccaacgaggtgtcattggagaggcagctcaacgaccggcagtccggcacagggcatctttggaagggtaagtgcaggcagccgtcaatgggtgcgttcaacggtgcccattgccaataagcacgcccgtgggagttctatgttactagactagtcgagcgcttctcttcataatattgagtgcagatcggctatcatcgtactgtcgtcgccaccaccacctattactagttactggccaccaacagagccaaccgtactaaaaattttgggagatcaaggatagagaaagagaagaaaaatgtacgaagatgaaggataatgttatcatttcgatgcctttttttttttactaaatatgcccatttaacgtggtgatgaaaatggcataaaaaataatgaaaattttatcaagtagcatataagggaatagctactttttgacatcacagaatgaaaccattcaagttccatgctatctcgtgaacaatgcctcttttaagttccaagctatctcgtgatctctaaactagcgagttgctttggtgcgagtttttctgtgtagatttgggctgaaagcctgcctgagtgtctggcccgtgagagaagcccaaggctggaaatctgcagcataaccatgggccataaatcacatgtagcccatatgacactgcatgttaacaatagcacatgttaacatgcaaaaacgcccgttcaaaaaaaaaaaaacatgcaaaaacgtggtacatatgtacacgcagcataggtagcactacttgctaaacttggatatggacggcacaaacccaacgtcccaacctgccacatttccctagtggcgacgggtctatttttttcgagacaacatgcacaaaatataaaatagtacgacgtttttattgatatagcataaaaaatataagttagaaaacagaaaaggacagtcacactaagcgtttacgtctgatcctgatgctgaaaaataaaaacaagcactcaacatccggaatgggtattctaaatgacgccaagactatcgctgtttgcctatcctaaaatccacgatgtagttttcacttttttctaatatattgacgtgcaatcttttttgcgcgttcgaaaagaaaaatgtgattttcatccgaagaaaccattgggagaatagagaaaaacaaaacctcgctctaggcggaaagcggcgtccgcaggcgtcgtagttgccgggccgaagacgacgggtgtctactgtcctgtacacatacgcaacgacagtttgccggtgccggtgccggtgcggctgccgtatcgcgtggctgcctctggcaccggcgcggccatcgaccgttcaattcaagccgcgatgaggcccgtgagcaggtctcgtgtgtttctctcccaagttgggcaaaatttctcagaatcgcgtggtcaactgctgatagcctgataaccgacagagtgattaatagcaccctgtacgtaacagcagtcctctcctcttgtagtcttgtagagtagaagtatagagtaacagtacaggagaaatactccgatccatatataacttctagcatgttcacatttcttcagatttgtattagctgttgggtagccatgcatgttagctgctaatcaagagtcaagacactgctgagttcaaataattaatatatttgacgaattcaagatgtacatacatgtacaattaatccaaaaaaagtactaacaaattaatttcccagcttgagatcatgcagacgaacaaattcctctccctgctaataactgaactgctggttgctggtgaatgtcatgccgaagctccaccagctgggcacgacgttgtagatgtagagcgtctggccgccggtggatgtgacggcgaaggagagcgcctggccgacgagccccgagttgcactgccagttggcgccccagttccggttcagcgtgatccaccccgtgcttccccccttcaccgacaccgacctcaccgacccgctccccgccacgttcgacaccagcaccagctcgaagaagttgaaccctcccatcgtgaacctgatccctccctgcctccagcacttcaccctacacatcaattaggtataggtgtttaagatcgacgaagataaagttagtgcacacaaaatgagaaagttattagcgtatgattaattgattttttattattacaaactttagaaatagatttatttgatattttaaagcaaccgttcatccgtttgaaattaacatgttagaatgtacttaagagcagtaattacggattactactagttgtaatacactgtaagtacttactgttggtagaggacggggatgatgccggccttgtagatgccgatctggagccaggcgggctcggccatgtcgaagtgagggcggggcgggttgcaccagccgccgctgttgctggggagagcccagttgggcgggcacaggttggtggccgtgatggtcaccgcggcgcccgccctgcaccactgcggcgtcgcggcggcgtcgcacatgatcaggtagcactgcccgcacgaccacccgtcgttgaacagcaccgagctcagcgccgccgtgttcgtcccgtaccccgccgtgtacaggttcccgtacccgcacgcgccacctgaacacacagagtcacacagcagcaggtctccgtgagaaacactgacaacgcaatgacagattcgtagcactccgtagttgatagagcaccaaaggttttcttacgtacccatcgtgccggaggcgtcggcgccgccgtagaacgtcgccgtccctttgttccagccatgcgccggcgcgaagccggatgctgctagcacggtgatcaccaacgacgtggcgaataagatcgcgtactccatctccgtcgagacgatagagcagagaatcgaacactgatcaggaggttaccgaggttctgaattttctgatggttttgcagtgaacgtggagggggttatataagagcaggaatgagaattatggtcagatcagagcagggaattgcagagaacatgccggcgatatctcagtcagcagtgcaagctaggctcacatgcatgcaaggaaaatgtaagccgaaccctggagatggaattgcgcgttcaatcaggtgattgatacgctgtaaacctgcaagctgggcatcatcatcagcacggcttagcattttctcctgataatcatgacctggaaaataatacatttcatgcatgtaccttgcatgttcagtaatccgtacttgccggcataaaatggatctacttagatattagtctgataatctatggacaaaaatataatttggaatgaactgtgcatgcatgccatggcttatcagcatctatgtggaatttgcaaattcttggtaggaaagaaactctgagccacatgaggccatgagggggccagcactgtcagcacatggaagatagctaggaggtggataaacaactgatcagattgattattaactcagcgcctacttagatgtctaatcatttggaaaaagctgactaaaagagtcagcagatttaattagccaccggtaccgcgcgcggtacggcgttgaaattgattacatttttaagcaggaaaaatgctgtcaagttgtgcactattatactgacttctatttgctctccctttgaattaaaccatcaggcgtacgaaaaatgtttttctttctttgggcaaagacgcatcatatgctacgatagatgcctctgcaggaactagttgcaaacttgcatacggggtacttgtgtgtagttgtgttggcatgcatgagcttgtctgtgttcgtaggatttatcattcatatccagtaaattccactgccagttctcttagtggtagagtccttagactttccttcttcccttccccactgcaaaccactaaatgattcttaatgttccctgtttttgaattattgaaatgattcctcaaaaagtttttggtggcaggttgccggtcttgatgtcaagatcgtcagaaagagggttacaaggacatacaccgagttcagctagattacagaaaggcgctggagctagaagaaatcagcaccttttgctttggacactggcaattagcggatcaaagcattttgtggcatccaagtagacaataacagtgtcagtgtaagacaaagtggtgaggactaatcgccatttggtgtagccatgatcgtgtcttccgtgtaaacataaaagtttctcaggagtcagcaggaaaatttccgcattccaaatgagaccctgatttatatcacggtagaaatgactggtagccgccagtaagtagtaactcatgaaactcagcatataatttcatttcccggtgggaacaatgtacatcaagaatgtagttttaacatcatctacgtacagaacgaatgatagatcggtcacaaacctcgagtgagattactagttcgacctgccttgccatgaatggacctgcgtagtactactactactatacacattacataggctactagtcttcactagctctctcctggtgcatgctctttccccactatgtaagcttcttcaatctgcagccttattatactgatcttgctctgcatgccgttgtagtgtgcctgttagtaggaaaactggaggttggaggagaatgactggccgaacttccaccacgccggcacgatgttctggaagacgagggtctggccgccggtggaggtgacgccgaaggtgagcgtctggccgacgaggccggcgtgcgactgccagttcgcgccccagttcctgctcaggggcatcctgtcggtgttcggccccttcacccacaccgactggatcgacccgctcccggccacgttcgagatcagcaccagctcgaagtagttgaaccctcccatggtgaaccgaacccctccctgcttcacgcacggcaccctacatacgtccacaaagaatcacagatcgtacgtagtaatgatgattaattagtgaatagttaatggcattggtttgacttaattatcatggacatggagagtcaaaccgtccaatattattgtagtatacgtacctctggtacagcaccggcacgataccggccttgtagatgccgatctggagccaggcgggctcggccatgtcgaagtgcgtgcgaggcgggttgcaccagccgccgtcgttgctggagagggcgtagttgggcgggcacaggttggtcccggtgatggtcaccgtcctcccctgcaggcaccaccgcggctcggcctggtggtcgcacgcgatctggtagcactgcccgcacgacgcgccgtcgttgaacagcgccgagctcagcgccgccgtgttcgtcccgtaccccgaccagtacaggttcccgtacccacacgccccacctgtgcgtggtcacctcacctggcctctgttagctaacgacgactctgaaactgtacctacttactggtgcgccaatgcgtatacgtacccatcgtcccggaggcgtcgctgccgccgtagaacgtggccgtgccactggaccagcctgccgtcgtcggcgcgatgagcgacgccgcggcgatgacaacgacgagcggcagaatgctcggtgtcttcttcttcttccacatcgccatgaatcttgcaggtggactagctcgccgagttgctgcaatgtagttagtgacagtggtagtagtaactatgaagaaatgcgagtgatcttaaataggagcgggatcaccggcatggaatttttgcctgcgctgcagcgcgaatggcgcatgtacgtacactgcacacactcagctccaattaattgcgtcgtcagatcggtgatctccttgtttcttcgtagcttctttgcaggcacactaacatgcaaacgaagaagaagattctctcatttctctccaccagatcgatctgcagctacgcgtcttatattcgatccgtaattaagctgatcacgctgccacttccgcatgttctctgctgctgcatgctcagctcacccaagggcaaggggaatgattagctggaactatttacgcttcttaaaccggctatcttgtgaattgtttagttgacagagttgacacgccatggaaggatttggtgagatatgagaggcaagcaagcggcagctatggtacttgctcacatgagggagagcggcaagccgggcgcaggaagaatccaagtgcgctgtcacacggatatggcgagaagatggtgaattatcaattatcaactcaccggatttgcagaagtcgccggcagcgttcacatacagtaaccagattgatgtcatttttaactatactattttttgataaagttgctaaaaaaatggtacgtttagtttgttgccgaatttagtaaatacataagaaatcctaccaaaattttggtaatattgctatcttgccaaaatttggtaagatttattttggctataatctgaataggccgcagattttctatttactttttcctaactttttaacttttaattttaaaattatccatttcaaaaacttaaatatatatcgtttaattagctaacgacattgacacatggcaacatttgtcttgccaagtctccttaatcggtgtggcaggataaaactgtcacgttcgttatgggtgatgtgacagtgttgttttgtcatatcatgtgaattaccatggctaagagatttagatcttaaaataagtttctgatgatttatttttgaaattaaaaagttttaaaaaaaataataaaaagggtaaaatatctccgtcctcgccgggttaggcagccgaaaggcccagatgattacatcggccgtcacgtgaagcccaattcacatgggtcgcagtgtcttcccgtcccaactaatacggctcgttcgaacactgaaattccgttctgaccgaactgggccgtacgttggtgacagtcccgctcaggcccaacttcaacgggccgcagattggcagcaatcccgttcgggcccagtaagaacatggctcgggcctcaggggttcggagttgggaaaagtacactgaaggtcgctcaacttgtcatcgagttacaaaatcgtcctccaaccgtaaaaccggatatagcgcatcccccaacttacaaaaccagtacaaactaggtcactcagtggttttgacttcggttttgttcgatgtggctacacgtgtagtacctcaaggttctgagtttatatctccataggagcgaatttaagagattgggttatttgcggggcaaagttttctatttcaatggccgtatatatccagttggatgtagaggctggataaaaaatatcgttctctaaaaaaagaaaagagaaatggaagatttaggtggggaacctctctcctatgattattcaaaaaaaaaagcctcgacaaacatttctttttttttctctctgttttagtctccttaagtctatggtttacttgttatctgacttgactatcacaagctcagaacggttgtttgacggaggcctagtttagttcccaactttttctttaaatttttaacttttctatcacatcaaaactttcctacacacacaaatttttaacttttctgtcacatagttctaatttcaaagcaaacttccaattttagtgtgaactaaacacaccctgaaactgcacatcatcacctgtgtactgaattctatttgtctcaaaaaaagaaaaagagaaacgaactgtcagtcacctgcagttgctgtccaccactgacaagcatttcacttttagttcgtgtgccaaaattttgaaaaatgaaatggcatattggactcaaaaagctacttcagcctgccgctgacagaaaactctccaatccgacccatagggcgcgcttgccttttgtctcagattacaggaatagtgatgtccccttctgcagagcaatgtgaagcatgagtgcatgttcagtggagtgttaatagatggaactcaaggagggaggagactggagcaggagtgcaggacacgggcatgctatgccgtacctccggcacggccaatggcacaggtgccggcacgctttgctgctgacattagccgtcctcgccgcggctgttcatcgggccgttttgttttgatactaaaaatatgcactaccaatttataggcaaattgcaaattgaatagtatgcgttagttttgattgagccaaatatttaacagtgccccctatcttatttggtcatattttagaagcttcttccttatacaataagaatttggctttatatcggtaacaatctaaatgattgctaaataattttatcctaccaatattttggtagtgccaaagtttacctagactttgacactaccaatgaattagtagggtaatgaatcaaacaagcccatcatctgtcacccagctgcagtcactctgggcatatggagacgagctaaggcctatggtctatggcggtggctaagacaccatcagcagcgatgagggggacgaggatgctgaccgactcactccacgctggaatgctgcgtcggagctccggcgaagcacgacatgaagcggcggtgaagctgtggctgccaagaggggtcggtgtttaaaactccgactgggccgacccgttaattttgatgggaataagtccacttttggtcctcatctttatgtctagtttgaaactttgaattatatctaaccacaataccggatataaaacatccctcattgccgatgcagtgatgtacccattgtaatttacgtttggaatctgtatggagacgagtattttcctacagaatttacgtttgagttatccatgccttactgaacatctatctatctatctgccttgcgagccgtgacttcattatatcagcctacaccgccttctgtcaacccactttatatcagttcacccagttaattaatttcaagtttctgtaaaaaaaaactgtatggttaaacttgtaaattcagctgctatacttttaatagatctcctcttagttgtactctctcttaataattcgctggaaacggctggaaactaacctgttcggtctaaaaataacttgcacaaaataaactaatggagtctgttgcgtattcttaaatttttttaaaaaaatcaaatgaggtcaggacaaagtcgatagtgcctggagctaatcgttctgttccaggaatatgtgctcaacttccatatgaaaacgaactaaaatcgagatcgagaggaattgctgttatgcacatctgtccggaaaaacttgtactataatcgtctgagagaacataaacggtttgtcgttgcatgattatagttaattagagtagattcttcagttgatgataataaaaaacgacatggttacctactactacttgataatacttgtcattttggatgagactaatatcaaactttatttttttttaactaattctaaaatatgtcttttttttcacgaatgcgcaaaataattatatgtcaatatatcagaaaaaaaagtgtttatttacacagtgcaatcaaccagaccggcttatgccaagcgaagggagaaaagacaaaataaaaaaaaccaaggaaaaaggaagatactactacgatagtaaacacaactctaatcaacggaaagggggtagagccacactacctgtcacaccccaatctggcaccgccgtacaacggcacctgataggagcgtgtcgtaggaaaaacggcgcgaaccgctccctacgaaaccgcgatctcagtaccagtcccaggacatagcgctggtacccacggtgacaaatatgaatcattacaatccttaaaataaatagaggacttatttaccttaacttaggttgcagctcagacagcccgagaatgcaaccgacgacacggacgaggcaaacaccaacaacaacagcagcagcggaaccaacggtctaacacccaacaccacaggcgacggctgggaaccaggacaaaacccttaatcttcactttacttcatcttcaacttcaggacggaggaactatatatatttatatagagcaagggtgagtactttcgtacttagcaagtcacgggaatttaggtgtttaatgcaagcttggaagagaggcgaggttgttttgcaaatcctttgtttgaaatcattttgaaatcactaagtgatttacttcttgttaagtttgggctgaaaagagacttgcgtctcaaatcgacttaagagatgcttttcaacaactcaattggtaatgtaccgacctcccgggttagatcattacctctcggctcccagagccatttcacttgattaatcggctcccagagcctttctcattttctcggactcccagagtccagctgcccagcagcaccacattccgcttccactcgggaagcctagtctatgatgcccgtagacatcccgaatcacacagattcgtttctgaccactcaggtcatccatctgccacataggctgattctggttacgattcccatcccacaacttttcacaaagcacaggcaaacaaatctacgcaacggaaaccacctcacatccgcccatgaccgtgggcacggctgttcgaacagttagttaacctccgcagaggggtacactttacccacaagatacgaccttattccgaacacccgtcggtgtcggaggttcgcaacaaggcctttcctaagccggcccagggttacctcatgccacatagaaggatcaaatcctcacataaatataggccattttagttttcacaaatcaaactccaaccacctcgatcggtaattcagcaagcttctcttccttgcttaccaggaacccggtttggctccaaccgaccccgccccggcgttccccaactattggcatgcgaggtttccctgaaccgactaattacttagccagggtgtcccattccaccttgtggttgcactttgattatgctcgatgagtttcccacaggaatcggtccttatatgcgaatacaggacagtgccacgcaggcacaacccccgcatcgtgagttttcacaattcattttatgtttaaacacaccgacaccacatgtcgggttttcaaggcttctcaaacccatttcccaagttttcgacaatcaacggtgcatgtgagatatttggtatacgcgctcagagagcacgaataccaaagtaccacaagggtggagcgacaaggaatcatgatagtacagcctacaggaattagtgcgactactgggtaggtccgtcggtttggcacgcaaaccgaggccaagtaagttatgtgtgtgactctaataatgcaagttgtaaacaaaataataatgattttctaattataggagcaattgatcaaagggtgacttgccttgctcaaggtcttcacggagcttcacgaatcttcgagaaaacccgcgatcggcgaaaatccgataaccgcaactatacgcaaacaaacaaaaaccaaaacaaaagaccaagaaaaagaccctatttagactaaataatagtgcgattaaatagatctcaattttatggaaatactggaagttgaacggaatcaatcagagctacggattgagagatatgaattttggaagtttaattggaatttttgggcaaaggaagatatttgtggaacaaggggaaattgatttatgaaatttatagaaataatattctcaagaatattattgtcaatttatagaaataatattctcaagaatattattgacagtcacggacgtgcgggaccaagggaaatgattcatggaattttggaataaggaattgatttatggaaaaggaaatggacggggatgtatattagactttttcgggcggcaagggcgcggcctaagggttgaaggaggctcggccgaccatttaggccggcgcgggcgcgggaaaggcggtccattagggcgcgcggaagggagagggagcggtccggtggactgagtgcacctcgcgggttccaggtggggcccgcttgtcggtgacatggcccacggtgggatgggcgcacgcgaggtgcggcgctagggtttcgggtgcgagtggcttagagcggtgcaccgggtggatggatggcggcgggcccacgtgcagccacacggcttgccgtggaccgcgcgcacgggagggaagacggagggagggggcggctgactggcttggcccggtcaaagccgaggtggcgccgacgtggcgcctacgtggcagccacgcgggccggcgggaggaggaagaaggggaggccgagatggacggcggacggcggccaagttcaccggagctcgtcgcgacgattcgagagagagggagtacaccggaacaatgggaaggacgagagggagtgagccaccggatcggatttgccgaaggggattcgatggcgacggatttcgacggtggcggccggcggcgatcaagagggggaatcgcggcggggcgacgataggtcgattcaaggaggagggagcatctccggggcgcggggaactcatttccggcaccggatggggcggaggactgccgaggagggctggcgatggcggcggcctccgggagcgggcggcaacggcggcaagcctatggcgggcggcggcgagacctggggcggtgtccatgcgtgttcgggggggctggccgagctaccacgcgagctagggagggagagggcgagcgaaaagagagaacggagggtggcactaccaagccgggacgggcgcagttgtagcgcccgttccgtcgtggcgcctagcgggaaaatgtaatttctaaaaaccttaattgcgaaaattgtttcttcgcttgcagtcagtctccgtgccattccggatctcaaatccccgacctatcgtcacgttcaaatcccgaatacaaatccttcccaattcaaatccctccgcaaaagtctattttgcctccctcaggttcgatgggccgaattcctctcggcccatctctctccccctcannnntntntntntntntncctncctntntaccccgctctgcccgcccgccgcgcgcgcgtgcgcgtgagcccgccgagccgagcacccttcgcccgcgctgcccgttgcttcccgcgcgcgcacgccgtggtggccgaccgcctggttgccgccgctgtcagcctctgccacgcctgccgcccgtgtcgccgctccgctccacactgcccccgccgtcatcgccgtcgtcacaacccggccccgccactccgcgcgctagcctccaagggacggaggcagagctcctcctcctccctctgccgcgtcgccccctctccctcctccttttctcaaagtggcaaggggcaagccccctttccctcctcctttttcccttttctctcccgccggcgtcatcccccccctgtcgccgttttggccgcgaccgccgagcgctagccctctcccttgaccgccctaggtcggttcccaaaccgacatcgccatcctataaagcccaggcgccctccctcccttctcctcttgtttgtcccatcgcctccactccattggcgccgcctcccgtgctctgttcgccgccgcctttcgttgccacgcgtgccggaggagccggcgcgttcgtggacgcggaaggggactccgggagctcgtcttcttcctcttccccggcccgaggccggagagatcactcccgtgccgtcggcctcttgtcacagcgccccgcctcgtctcggtagtgcatccctccgttctccctcctcgctccatctcttccccttagctttgagtagccgctcgagtagtaccccagtactagttggcgccgccccagcgccgcgccgccgctcgcagtaggctcgccgctgtcgccgcccgagctcggaagcgcctctcgtcgccggcctccctcggtgcgtttcctcctaatccggcgcaagggacggattcccggagtcgcgtagatgctctagctcgcccgaatcgatctcccgtcgcgccgtcgccgtttcccccttccctcgccgccggttgccgccgccgcaatccaccgccgtcgagccccgtccgacgaatccgagccattggcttgtctctcctcgtctcgtgcaaccacccggtgtgctcgctttcgcctgtatcgccgtggttcgccccgccgttcgcagccaccgtccgccgtctgttccggccggcgccttcttcaacctcccgccggcccgcgtggcagccacgtaggcgccacgtcggagccacctcggcacgaccggatcggctgacccggtcagccgctcccttcgttccaccctcccccgtgcgcatggtccacggtgagccgcgaggctgcgcgtgggcccgccgcacccgagtcccccgcgagccgcgcgcgtgcgccgcgccccgcccaaaccctagcgccgcgtcgcgtgctccctccgtacggtgaaccatgccgccgacaagcgggtcccacccgggaccacgcaaggtggacccggcccaccggctccctctctcctctccgcccccgcgcgcgctttgggccgccttcacgggccggccggcccgtcaagttcgaccgagccgcctgcgaagtctaatttccctccctctttcttttcttttcctttttttttcaaaaaggatttaaataaatccttttcctttagacaaaaaatccaataatcttagaaattcaatatcttcccaaccgtaagcccgtttgactccgttcaacttccaaaattccttaaatctcgagatctatctaatggcacgcctagaggtcaatagtagggctttattttcgccgtttgttgtgttgtcccatttctcgtgtagtttcggagcccgaagacccgcagtgcgaggattttgaggatcaagctcaagatctcgagcaaggcaagtcacctttgatcatcttgcacctataatttaaatctaagtatttcttttccgcaaataatgcatgaataggatttacacaagtaattcggccgtggcttgcgagataacctgccggccccccaatcctaattgctgcaattaccctccttgaattattgaacacttaaaccccctttgtcgactgttgtgcttcgatgcacgggccttcaagcacgcgcatcgggacacctctcctcaaatttaaaaatatccaatgatgggtaaaacttgggttttacaaaagacttggaaaaacccgacacctgggtcggctcttgcgaactaaatgaattttcaaattcgcggaccggggaacgtaccgggagtacggtttcccgctcttgcacttaaggaccgtttccttggaattacatccgaacataagacaagtgcgaccacatgggtgaaatgggacacccctagctgagtaaattgctaatcgggggagccttgatgccaagagacatgtggattcaacggggtggtgtcggggagaacccccgggcttcctggcacagtatggtctgggacctaatctggtgttagtctgggacccctctcgttggcatacggtgaacctgtgtcggctttcgaaatgccttgtcgtgaaagccccaaagtcaccagacgtggctgttatgcacgggctgggtgaccaaggctagtaacgtcgtgtgggtaaggtgtaccccctctgcagaggttaacaaactgttcgaacagccgtgctcacagtcatgggcggatgtgaggtgattcctagcgtagttttgtttgactactgcttgtgaaattactgctgtggaatgggttcgatgtttggaaaatcggcggctgatgggatcagccaggcccgggtggccgtttgaaagctgttggccgggtgctaaccttgatcaattcaaagactgatacattgcacatactccgaccggacgagacgcactgtctcatccgtgtcatttgagaagcactcacctagtcgtttcaaaaaagagtttaaataaaatcaattgcaaaaacaatagcctttcctttgaagcctgcattaaacacttaattcccatggctagctgagtactcatgtactcacccttgctctatataaataaccccccccagttgctgaagaagatgatgtggcccccgctgacgaggagttcttctaggagcaagtcggctacgatgagttttagggtttcgacctagttcccaagtcgcgcctgtgatgtttggcccaagtcttggtttccgctttcccttttgtaatgcagttgtgagctcgggatctgtccgcagcccaacatgactgtactcctattctataataaagagacctctgttgctgtgatatactgtcttcctgtgataccagcactgtttcctgggactggtatcgattaacaggttaatttggagcgtcacgggctagtttcgttcggggctagttcggggcgtgacagcagtggcgagcggccgacggctcgggagcgagctctccggcctcgggccggggaatgggatgaagagggatggccggagtcctcatcttgcgtccacgcacgcaccggcctccgacgcgtgcgacggcgaagagacgaaggccagagctgggagcggcggcaaggcgtcaacaatggcgcggtg

SEQ ID NO: 21042 - DNA, 3550 bp, Oryza sativa
gtattataaaataagggtgtattatagtttgttacctcagccagcggaaacagtgtgaacatgacatgtaattagaaagactctatggctaacattcaattcagctatagcttgcgtgatggctagcagaaacgacattcgcgtgcgtaaatgatcaagagcatttctgctgttcggaacatttctgttattccccgcggacaagtcacaactacttctgttcagttttaactactcgattggaaacttcagtttcaaggtacgacttacagtttctgacgacagtagagcttagaccagcaaaccaatcatgcatcattacgcgttagtcaatctctcggcgtttgcagagccatgtgcatgcgatcgttggaacagtgttcgcatgcttcaataatgcataacgacaatcattccctagcttaattaattggtatgcaatccatgcctctctgcagagttcagacctcctagatcttattactactatttaagcaccaccaatgccgcacacatccctcacctccaaatccattcttcccaacaatatctagctgcacctgcgcaggagacctagctatagctacaggaaatcatggggaacattgtcctgcagctgctcgcgattcttgcactctgcattgcaccggcgaggtccggctggctccagggcaccgccacgttctacggcggcgccgacggctccggcaccatgggtacgtcgtcgtcgtctactccatttcctctcgcatcgcattgtgtcaaccattgcacggcaatgcatcatcatgcataatgcaagacacaatctgatggaatatatatgttggaacaagtgcatatgggatggtctcgatgggattaaccgctgatgtgcatatgtgtgcaaacaggtggtgcgtgcgggtacgggaatctgtacgaccagggctacggcatcaacaacgcggcgctgagcacgccactgttcaacaacggggcgtcgtgcgggcaatgctacctcatcatctgcaactacgacaaggcgcccagcgggtgcaggatgggcacggcgatcaccgtgacgggcaccaacttctgcccgcccaactatgacctcccctacggcggctggtgcaacacgacccgccctcacttcgacatgtcccagcccgcctgggagaacattggcatctacagcgctggcatcgtcccgattctctaccaacagtaagaataatactatcagtagagaccaccgtaaaagcactctaaaacgaagaagttgtgtgtgtgtgtgtgtgtgtgtatatatatatatatatatatatatatatgcatgatatcatgaaatagttaacacgttgtggtgtgatggattatattgaagggtgaagtgctggagaagtgggggagtgagattcaccatcaccgggttgaactacttcgagctggtgttggtgacgaacatggccgggagcgggtcgatcgcgagcatgtcggtgaagggctcaagcacggggtggattcagatgtcgaggaattggggcgccaattggcagtgtctcgccggactggctggtcaggcgctcagtttcaccgtcacctccaccggcggccagaccatcgtcttcgacagcgtcgtgccggcggggtggtcgttcgggcaaaccttcagcacctaccagcagttcgactactaagctatatatgttcagacatcaggaacatcaagatcgtcgtctgaaatgtgaatgtctgatcgatcgagcattcatacttcgttttcatttgtaattaagctagagcgctctaagatcgagcattgtttattgggatcattaattcatttgattgttcagttgctaattgatggatgtaaattaagttgcaatatatccaaggcaatcattattaaatgatatgaaattgctactgaagattgcattccacgagtattcccgtatatcatgaaatgtgtacgtgctagctagtagtagtttcttcatcatggatactatacaaatatatctctttgtactatgcattgttgatgcgtcttaatatacatttaattaatgtactctctttcatctagacaccaccctttgactgttggaattatatgggcaagcccatgtagttagacaataatttctgaaaaaaaatctcaaaggcccaaaaaaatgcacgtaaaatttagtaccatcttactgattctagaagtatgagatcgctttaaaagcgtggtgctctctatatgctactctctctccgtcgccatggttttccgcgtccaactttaaccgtttgtcttatttgaaaaattttgaaaaaaattaaaaatataagtcacaagtaaagtattatttatgttttatcatctcatagcaataaaaatactaattataaacaaattttaaataagacggacgattaaaattaggcgcggaaacttatggttgcccttaaaatgagacggagggagtactagagcaatatgcatggaagaaaactaaatccggacctgttacgctaccttactgtttgtgtgtgtgtgtctgattgagctgcaaattttcatctgtttgtgtgtgtgttttcttttcttttcaaaaaaaaaatgtttgtgtgtgcgtctgattgagctgcaaattttcatcctttgggcttgctcacgcaactacgcatgtaggccttcgggcttcggtggttcaacccaaaaccaaatttccatccttgggcttgctcacccaactacgcatgtaggccttcggtggttcaacccaaacccgtgtgacactcaaacaagccaattaaaccatttcattttcaagaaatctcttcggcctttctttgacaacttgtttttgcgaacatttctttgacaacttgcataacatgtgtgatctgtgtgtgttttccggtgcctcgtttcagtgttttcgcggatgcgaccctctaccggctggtctccagtttcacttcctatcaattccaagctttatatggttaaaccggtaattccagctgctacaattttaataagttgaattactaaaccacattcgacattcgataggaaaaaaaggaggtaaaatcttacaaacttctaaccttcatatctgcttcgccatccgtgctccagttagccaactctaacgaccttgttgaactctagcggacaacaacgacgatcctaactgtttaggatccggattggggttggggtgataggggtgggaagagggggaagagggggagtccgccagctttacagagatggccgtgatcggcggaagactggtagtaggtggtggaattgggcgggcaacaaagtagcgcccccgaaaccgtggggatgaaggagggcggtgggctggcattggctgcggggccaaaacaaagcgactagttaagaggtagtgggctagtggctaatggtggtggatccagtggtagggagtcgatagaaacaaggaagatcaccttgttgtcaccgacttcaggaggagtggacagagaggggggagggggggcgaagccagtcggagggccaagggagaggggg

SEQ ID NO: 21043 - DNA, 7455 bp, Oryza sativa
gggagaggggaggaaaatgacaagataattgttgcgtacaaatcttaaagtatatctaacggtccaaaatttaaaagatataagctggatttcatgtcacaaaatatatagactttgatagatcctctcttagatatatcaggtctcttacaataattcgttgggcctaactaagccattttgtctaaaaaaacctgcaaaaattaaatcaaaccaaggcatgtcaaagtcgataatgcttgaagttaatcattctgttccaggaatatgtgctcaacttccatacgaaatggaacttaaatatatacagggtgaattgctgttctgaacatgtctgaaaaaaaacttgcactataatcggtttgccgttgcatgattatcgttagagcagctgcttcagttgaaacttgatactaaacgacttacatggtggtgtactatattaattaatctattactataatctatcgatcgggcaaacaatgagtattactcaattaattatgactgcaatagagcaatggcggatacagatgtgaattgaatatgccccctgaatgaacagaacggttagttatgtgttcaaagaagcaaggtataaaattattgctattgtacgtgcaatgaagagtgcagaccttgcgctcccactaatcgtagtggaattcatcagcaaaataaataaatcatatagaaatagagtttttttactattttcatcatacgattcttgttggttgacctcaagcactgaacaagataatgcaaattatttggctatttcaatgtctggctcgccagtagttggaacttgggagagaaaaaaataagcagcggctgcaaagggttcaagggagttgagcctgttgtagttaggtggtactgaaaggataattgattcagaaaagtgaaatactccaacgtcctttccattccaacttctcgcttgtccaattaagaactttgaaaaattccgtactaattaagaatttcacggaacgaatttaggtagccaataaatgagcagatgcatatttttttattacaaattaaaactgattgagaatttctcgttgagaaatctgtgtgtgaaatatttctgatttagaatttcatctctggctggtaaaactgatatattacagtttggcacatcaggaagtatatttaattttttttaagatgatggatagaaatccgatcctatattcacacacatacttaaagattacatgggtacttaaggcacattctaaagagataattgagcttaactactactcgttttctattagcatgttttttaaactattaaacgatgtatttcgtgcaaaactttctatattaaaaatactaccttttcaaaataaaataatttgatttatattttttaataattaatacttaattaattatatgctaataaagtttttattttgcgtgtcgctaaataagacaaaacgttaagctggaaagaacgtgtcctaacactccaaatcccataactgacacaaaagaggaaaaacaacaataagaaagataaattttacagttcctaagatgtactgtatcaaaacttttaatgcaaacttagctcctctcggtacctacttaactactataaaatcactaaaagaaaaggtaaacacgatatgtagttagaaagattgtatggctaacattcagtttagctatgcatgcttgactagcatagaaacattcgcaagcatgcatgttcagagcatttctgttcttgctgcgaaaacgcaacgacttgtgttcagattgaactgaataatgctaatatacgacttatcatttctgatggaggaaacggtacgtagagcttagaccagcaaaccaattaatcatcatttcgcataagtcaatttctggacgttgcagagccatcagccatgtgcaacgatcgttggaacagtgatcgcatttttcaataatgcctacgacaatcattcccttgcaatatgtaatccacgcctctgcatgcaggcctcctagatcatagtactatataagcaccaccattgccgcatacatccctcacctccaaatccattcatcacaacaatatctagctagctagttatctagcttaattactctcgatcgactgcacaggctcaacctagctaagaggaaatggggaacattttcctgcagctgctcgccgttgttgcactctgcattgcaccggcgaggtcggactggctcccgggcaccgccacgttctacggcggcgccgacggctccggcaccatgggtacgtatacgtcgtctactccacatacggcccaaatgtccgactcacgtacgactgaatttgatttatttgattgccatggattaaccggatgcatgtgcgtatgtgtgcatacaggtggtgcgtgcgggtacgggaacctgtacgaccaggggtacggcatcaacaacgcagcgctgagcacgccgctgttcaacgacggcgcgtcgtgcgggcagtgctacctcatcatctgcgactacagcaaggcgcccgactggtgcaagctcggcaaggcgatcaccgtgacgggcaccaactactgtccgcccaactatgacctcccatacggcggctggtgcaacgctacccgccctcacttcgacatgtcccaacctgcctgggagaacattggcatctacaacgccggcatcatccccatcctctaccaacagtaataagcacatttaccgacctgacatctcctgaatttgtatgtgtgaattctgaagcgaagcagtacgtgtgttgtgctaaaccgttatgctatgaattgcagggtgaagtgctggaggtacgggggcgtgaggttcaccatcaacgggttcaactacttcgagctggtgctggtgaccaacatggccgggagcgggtcgatcgcgagcatgtcggtgaaggggtcatgcacggggtggatccagatgacgaggaattggggcgccaattggcagtgtctcgctggactggccggacaggcgctcagcttcaatgtcacctccaccggcggccagaccatcgtcttcgacgatgccgtgccggcggggtggtcgttcggccaaacattcagcacctaccaccaattcgactactaagcagggttcagacgtcgacaacatcgagatcgtcatctgaaatctgaatgtctacgatcgatcattcttgtttgggatcatttattcgattgttcagttgggatcattcattgatttctaactgatggatgtaatttgagttgcaattcaaggaaatcattattaaattatgtgaaattgctactgaaaatcacatttcatcggtctgtatgcatcataaaatgtgtatgtgctagtggtttcttcggccccgtttggcacagctctagctcccaactccaacttacctagagttagagctgtgccaaacggtacagatcctccattttttgagtggagctagttgagctactcatagaaaatgaactacgggggttaggggtggacagaaaaagaccgaaccgaaaagaccgaaaccgaaaaattcggtcctaggtagtgaaagaccgaattttgttcggtcaatttggttagtctcctcggttaaccgaatagaccgaaatatcaaaaaattctaaatgcaacctacaatccactatatttaataggattaaactctaattttcacatccctacttcttctaggcatgcaacctaataaaagtctttactcataagtgcttaacgaatttttttgtgatttttgtgttgaaaatttccattttttctttgcatatatgaaaatattgttgaatttcggtcaggagcgagaccgagaccgaatttatcggtcctgactttttgcgctgaaattcggttttcatttttcaaagaccgaaaagaacgaaagaccgaagaccaagaccgaaattttcggttagaccgaatgcccacccctaacggggatggagctggatttttgctgctccacagctccactctaccccaaaagacccactaccctttaattttttagtctatttatacaaaaatgccactcaactgctctttcagtcctcctctcctcccccatcttcctcccgatccaaaccgagctgcatgcggggagcggtggcgtcggtgggtagcggcgacaggccgaaggcgcgcggaagacgacatgcggccggcggcggccggcgcgcctggggacggcgcacggccggcgggccggcggcggatgcggaggaggatgacagagcggcggtcttcttcaacccaggcatgggctctgggcgcaagggtggccggttgtttgtgcctgggtgtcacgccccgaactagtcccgaccggaactagcccgtgacgctccaaattaacctgttaatcgataccagtcccaggaaacagtgttggtatcacagggagacagaatatcacagcaacagaggtctctttattatagagtaggagtacagtcatgttgggctgcggacagatcccgagctcacaactgcattacaaaagggaaacggaagccaggacttggaccaatcaacacaggcgcgacttgggaactaggccgaaaccctaaaactcatcgtagccggcttgctcctggaagaactcctcatcagcaggatccgcttcatcttcttcagcaactgggggggaattatttatatagagcaagggtgagtacgggggtactcagcaagccaggggaaataagtgtttaatgcaggcttcaaggagaggctgttgtttttgcaattgattttatttgaactccttttttctaaaaacgactaagtgagtgcttctcaaacgacacggatgagacagtgcgtctcgtccggtcggagtatgtgcaatgtatcaatctttagatcttgaaacaaggttggctcccggccaacagcttttcaaacggccacccgggccaacaacttttcaaacggccacccgggccaacaacatttcaaacggccacccgggcctagctgatcccgtcagctgctgatttttcaaacatcgaacccattttctcaacagcaatttcacaagcggtagtcaaacaaaactacgctaggaatcacctcacatccgcccatgaccgtgggcatggctgttcgaatagtttgttaacctctgcagagggggtacactttacccacacgacattactaacccggatcacccagcccgtggggatcagccacgtcgggagacctccaagctttcatgacaaggcatttcgaaagccgatacaggtttaccatatgccgacgagaggggtcccagaccaacaacaggttaggtcccagaccatactgtgccaggaagcccaggggtcctccccgacaccaccccggcgaatccacatgtctctcggcatcaaggctcccctgataagctagttactcagccaagggtgtcccattccacccatgtggtcgtacttgtcttatgtttggatgaaattccaaggaaacggtccttaagtgcaagagcgggaaaccgtacacctggtacgttccccggtccgcggttttggaaattcatttagttcacaagcaccgacccaggtgtcgggttttccaagtcttttgtaaaactcccgttttacccaaattgttactcagattttaagtttgaaggcgaccgtcgatactcgcacagagtgcacgaatatcgaggcgcaactgggtggttacaaggggacatggtatggcaattaacaatcgaaggatcaaatgcaacaagtcaggtaggtccaccaatctgccttgcagatgggacaaaagattaagtgcggtcctatcaatacataatatttttcaagcaatataattaaatttcaattataggctcaagatgttcaaaggtggcttgccttgctcgagatctggagcttgatcctcgaaatcctcgcactgcgggtcttcgggctctgaaactacacgcgaaacggaacaactcaacaaacggcgaaaaaataaagccctattaatgacctctaagcgtgccattagatagatctcgagatttgaggaattttggaagttgaacggagtcaaacggatttacggttgggaagatattgaatttctaagattattggatttttggtctaaaggaaaaaggatttaattaaatcctttttggaaaagaaaaagaaaagaagggagaggggggaatatagacttttctcgggcggctagggtgcggcccaagagatttggggcggctcggccgagcttaacgggccggccggcccaagacggcccaagcgcgcgcgcgcgggagggaggagagagagtccggtggaccgggctcaccacgcgtggccccgggtgggacccgcttgtcagcggctcggctcaccgtgcggagggagcacgcggcgcacgcgcgcgggcggggaggaacgcggtgcacgcgcgcggtccgcggcggacgcaggtgcggcgggcccacgcgcagcctcacggcttgcggtggaatgcgcgcacgcggagggaccgaccggggtcggcccgacccggtctgggctgagctggcgccgacgtggcgcctacgtggccgccacgcggaccggcgggaggtagacgacgatccggccgcgaatggacggcgggcggcggcggcgagcggcggagcgaaccacggtgatacgggcaaaagcgagcacaccgggcggttacacgagacgaggggagacgaaccaacggctcggatttgccgggggttgctcgacggcggcggattgcggcgtcggcaaccggcggcgggagaagagggaaacggcgacgaggccacgagaggtcgattcccggcggtgagagcatctatgcggcttcgggaactcgacgctagcgtcggattgggcggaactacgccgagcgaggccggcgacgagcgggtgctacggagctcgggcggcgacggcggcgagcacacggcgagcgacggcaacggtcggggcggcgccggctaactacgggaaggctactcaagctactaccgaaagctaggggaaggagatggagcgaggaggaagaacggagagagacatcaccgagaagaggaggggcgctgtgatgagaggccgacggcgcgggagtaatctctccggcctcgggccggggaagaggaaggagagggtgcggccggagtcctcttccgcgtccttgctcgtgccggctcctccgacacgcgcaacgacgatcggcgacggcgaaacagagggcggcaatggcgcggaggcgaaaaatgagggagtttggagggggagggcttgggcttaaatggacggcaatgtcggtttgggagaggggaaccggcattgaacggtcaaggcgcgagctggcgctcggcgcttgcagccaaagcggcggcaggaggatgacgccggcgaggagaaagaaaaggggaaaaaa

SEQ ID NO: 21044 - DNA, 7423 bp, Oryza sativa
cgggggagagatgggccgagctggattcggcccatcgaacccgggggaggcaaactagacttttgcggaggaaattgatttggagggatttggattcggaattgaactcgacgatagatcggggattgagatcttgagatggcacggacactagacaacaagcaaagaaacaaatttcgcaattagggtttttaagagataattttcccgctaggcgccacgacggaacgggcgctacactgggatgacaagctgcgaccgctccggcgccttgtgctgtggcggcgacggccggcagccggcggcgtgcctggggccgccggctaggtctctttttttcattttttttcattttttttccagatctagagctgaaaggtagcaaaaaacttttcaacttttcaacgagtcttcaactctaacaggagctagctctcactggagttggagtttggagccctaccaaacgaggccttcatcacgggctcctacacaaatttaatatggtggcccgatgtaaatatatctctttcgtcttcgtggaaaccgtatggacatattatgcgtcgtgcaaacttggtttagcttgtgagcggcatgcaaaacaagataagctattagcacatagataattaagtattaatcattataaactttaaaaattaacttaattgtttttttgaaaaagaaacatttatataaaacatttagaaaaaaaaaacacatcatttaacagtttaaaatgtatgctaatggaaaacgagaaagttgtagtttagatttgaaaaaactagacctaataagttgacattaatgtactctctttcatctagacattagcctttaaggccccctttgattcaaaggaaattcataggaattttaaaggatttcattccaatttttcctatatagccctttgaatcaaaggaatgaatactatggaattctatgaaattcctatggaatgcattttcccatgtaagttttggaggaaatttagcatgaggtagaacctcatgttaaaaatcctttgagtttttatctctcctcaaattcctgtgtttttcctatggctcaatcaaacgaccatttctacgtttttcctgtgttttgtaattctctcttttacacttgtattcctgtgagaatcctatgtttttcctattccttcgtttttttcattcctatgatttaaagggggctaagtgttggaattatatgtgctaaatccatgtagttagacaatagtttctaaaagaaaaaaaatcaaggcccatcacatgaaaggatgcacgtgaactttagtatcagcttactaattctatgaatatgagatcactttttttaaagtgcggtgctctctatgttactagagcaatatggatgagagataactttaagaaaagcgcaccttaaccactcacttcacggagttttgtcatgttgtcttagagtggctagaaattcaaaccgggtatgctaccttattcttttctgcttaatggatagattgattaacgatacgtttgctaaactgctaaacgatacaatgtttgtccctttttgcatgttaacatgtgagggaggatgttcatatggaccagaggatccaattgcctacgtacatgtccttttattgggcaattgactatatgtgatttatggactatgagtccatgattaacgacacgttcggcttaactctcgggcccaggcatgctggtaggccttcgatggttcggcccaaatccgtgcgacactcaaacaagttaagccatttcattttcaagaaatctcttcggtctttctgacagtttttttttcttttgcgaacatttctttgacaatttgctaacgtgtgtgatctgtatgtgttttccagtgcctcgttgcagtgttttcgcggatgcggctccatgagatgctaccggctggtctccgatctccactccttatcatttcactcagtcaatttcaagtttctgtacgaaacctttatatggttaaactggtaaatctaacagctacaattttcataaatcttttcttagatgtatcaggtactcttttataattcgatcggcctaaccaagctattctgtctaaagaaacttgcaaaaattaaaacaaaccaaaaacatgtcaaacgatataatgcttgaggttaatcattctgttccaggaatattgtgctcaacttccatacgaaaaggaacttaaatatataaaggctgaattgctgttctgcacatctgtctgaaaaaacctgcactataatcggtttgctgttgcatgattatcgttagagtagcttcttcagttgaaacttggtactaattaaacgaatatacatatttgggcatattaataaataaagtatactctatagtaattattgatcggtgaaaaagtgattaataatattctatactacttaattaattatgactataataatgcaatggtgacgcatgtgtggatcgagtgcccccgaatgaacaaaacggctagcatgttgtcaaagaagcaagatatgacactattgctaatggaatggttttttaaactcttgaagatgtttattgtatgttatccaagtaattatgaaataatttgataagatatataatatgtgttatatcacttcacaaaaattaatctctataagtttaaaaaataacaaatttaactatagtagttaacgtatatttatagtcaagtttgtcttttaacttgtagaagttgaattctaacttacatatttgtgaagtgatatattaatctatcttgacaaatttttttaaaaaaaattcgtagatggcgtgtgaagaacaaggggacattcccttgagagtttagaattgtttcccttattactggtgtcgatcgacaaaccggtattttgtatatgtgcagaattagttactccctctgttacaaaatataagcgatctccaatattcaaaattagtactacaatataagcatttctatgacactatgacactgattctattataaggaaattcataggttttcaacaagtcaagtgtttgggagaggaatataagcgattcaaaatttaaccattatggtgacagaaagggaatattttcccttaaccttagtgtttgtaaataatctatataaatgcttatattttgtaacggagggaatcctaattacgctgtaacacatcagaacaagaaattcataaagatatgcagtattctactagttgatcatacggttctggtggttgacctaaagtactgaacaagataatgcaaattatttgactatttcttcaatgcgtcgccagtggttggaatagaaaaagagaagaagttgtggctgcaaagggtttaagggagttgagcctttagttagacacttagacagtactgaaaggacaattaattaagaagtgaaatactcctactactcgcttgtccaattaagaaatttgaaatatcccttacaaattaagaatttcatggaacgaaattaggtggccaataaatgagcataggcatattttcggtgtggattatttctgatcgatatataaaattgacatgttacagcttggtacgtcaactagcagaggatatgctagtagcaataattttattttttgagagagaagcggaggatataatttcgttagccaaacagagtaaaacaaaatgccctagtcgactggaagaatggtactccagttcagctatagcagaaacattcccgtgcatgcgtgatcttcggagcatttctgttcttccctttcacaacgatcgacttctgttcggttttaactactcgacttgaagaatgctaacatacgacttatagtttctgatgcagcaaacagtgatcatcacgcgtaagtcaatctctggacgttgcagagccatgtgcaagattcaataatgcatatgcgacaatcattcattgttatgcaatccatatccattcctctttgcaggcctcctagatcactatataagcagttaagcaccaccattgccgcagacatccttcacccccaaatccagtaatcacaacagtatttagctgcaaggaatcaagctagctgtagcaaacagaggagatcatggggaacattctcctgcagctgctcgccgttgttgcactctgcattgcaccggcgaggtcggactggctcccgggcaccgccacgttctacggcggcgccgacggctccggcaccatgggtacgtcgtcgtctgctccaccctctggaatagcattgtcaattatgattgacaaatgacaatgttgcatgcatgcatacgtgtactttctctattctaaaataaatcaaactaaggcgaaccttactccccagcacgcaaaataaagtagcgtttagcacatcattaattaagtattagctaaaataaatttaaaaatagattaatatgacttttgaaagtaactttcgtatacaaaatttttgcaaaatctataccgtttagtagcttgaaaaacgtgcgagcggaaaacgagagaggtgagttaggaaagtagagataagaactcagccctaatgtgggatgtaacatctaagctcctagtactaagggtgtgtttagttcacgccaaaattgaaagtttggttaaaattggaatgatgtgatggaaaagttggaagtttacgtgtgtaggaaagttttgatgtgatggaaaagttggaagtttgaagagaaaatttgaaactaaacacgacgtaagatattattcaaatttgtagtattaagatatgtaacattttataataataatagattgatttattttgaaacgaaggaagtacgtcatatgcaacctgaacttgtgacagaatatttgggtgcatctgtacttgcaggtggcgcgtgcgggtacggcaacctgtacgaccagcgctacggcatcaacaacgcagcgctgagcacgccgctgttcaacgacggcgcgtcgtgcgggcagtgctacctcatcatctgcgactacggcaaggcgcccgactggtgcaagctcggcaaggcgatcaccgtgacgggcaccaactacggcggctggtgcaacgcgacccgcccttacttcgacatgtcccagcctgcctgggagaacattggcatctacagcgctggcatcgtccccatcctctaccaacagtaataagcattaaccaacctgacatcttctctgcatttctatatatatgtctgaactctgaaacgaatcaagtgtgtagtgctgtttgtattgaaaaatttgcagggtgaagtgctggaggtatgggggagtgaggttcatcatcaacgggttcaactacttcgagctggtgctggtgaccaacatgcccgggagcgggtcgatcgtgagcatgtcggtgaaggggtcatgcacggggtggatccagatgacgaggaattggggcgccaattggcagtgtctcgctggactggccggacaggcgctcagcttcaatgtcacctccaccggcggccagaccatcgtcttcgacgacgccgtgccggcggggtggtcgttcggccaaaccttcagcacctaccaccaattcgactactgattgagctatatatgttcagacatcaggaatatcagatcctcgtctgaaatctgaatgtctatctgatcgatccagcattggtaatctgtttcattgtaagatcgagcattatttgggagtaccattcatttgatcgttttaattgctagtcggtggatgtaaatcaagttgaatccactgctatctttaatcgatgtgaaactgtagtagtaccactgaagatcacattccatcagacttcgattacatcataaaacgtgtaccacatgctgatgacagccgacgagtcatattcctcgatggaagcagagtggcaattaaaggctacgactagagaggctcacgagaaaaatacatgtacaagtacgcaataatatcaacaccaaagccatcaaataattcgagactcgtacacaagaaaactgacaggaagacagcggttgagctgattctgaacgaagcctttcgtgtggaggtgattaccaaacgagacgagctacgcaggacagacagcgtcagccgctgtctggtgatgcatgacagcagagacagctctggggatcgcaacaagagcttttacttgtggacggacgcttgcaaaatccatcgacgatcgtgggacgtggctagctcggcgatcaatccaaaggagtaccaggagactactagctaggagtgtggaaccttatccaacaacacaacaagacaggagaagataaaggccccggattctcacgtaacagcgtgtgttttgcgcttgcgttttttttttttttgacttttttgcgcttgcattcgaatcacgttcctgtatcttcatgtttatgtcttctcatcagtcatccctgcatgcgttcgagagatcaccttttccttttctgggttccaaaagatccgttaaaatttggggcttatttggtttaataccctatcaatatatgttggtagtgccaaactctaggcaagttttggcactacaatattttagtagggtagaattgtaaatgagtgcatttgaatttataccaattgagagccaaattttaaattgtggtgaagaatattctaaaattatgccaaattgagtattggcattaccaaacatttggcttcaaaccaaatcatcacatttgctatttaaaccaccaaaaaattggtatggcaatattttggtatcaaaccaaaacgccccttaatataggcaaaatactgtagagatgcatttgatagtacagtgataaggagcgtattcaatcttcaacacgaaatattgcaccaatagtaacacgctagaagcatatctgaaaattcttggttgaaaaggcagaacaaagaatatatgctgattcactattgttttcaaaaacaaggagctggggcagtgagcgatgaggttgggcggcgaagggatgaggtcgtcggaatccagtaggccagtagtcgtaggccggagagacaaaacaaagatgggcggttgcccctccctcctcgaccaccgctggattttctcatcccagacgtcgcaattatttcactttcccatgacgtggatcctccgcggcatcccccgccgtcgatccggcatcggacgggccgcaccccgcggggccgcgtggatcccacacgaatacctaccggtgccacggccaggtcgggcccacgtgccagcttcccctccgcgggacgccagcgcgagcggctttagagcggcgcgggggggtgggccccacaccgggatagcaatcgtggccgtccgtgtcgatcggacggtggaggcggtgtgaacaggtggtcgctgcgcgacttgtctcctctctctct

SEQ ID NO: 21045 - DNA, 4179 bp, Oryza sativa
ggacaagcgtgccctggccagagccatccccagtctacaccccaagccaggagcaatggaggcggtgatcaccaccagaatggtcgatatggttcccatccccaagccgaggtagtggctggtggtggggggaacagaggggcaatggtggaggtggaggtggaggtcgccgtggacaggagcaccatggtggttttgatgggcaacgccgtggcggtggccgcagggacggccatgggcctggacaccagcagcgcggccaccatccatcttacataagggctcctctggctgttgtgactgcggcgcctcctccaccaccaccatttgttaaccctgctactccacaaacaccaccttatggagctcccataggcttccctggtatgccatgcatgtggtttatgagatcatagagttgttctattgttatgtcaccttaatttgcttcgtttcaaatagcagagatagcacctcatgtctactattttacgtctcccctggaaggtgttcaagcactgccttttgtgcctcacccagcaagccctccagctatgttaattcctcaatttgatcctcttcgagcggagctgctgaagcagatagagtactactttgggtacttttttgtctacatttacgtgaaatatttgttccatatcattgccgaggtaaatttactgagccacttgttcaacttttgcagtgatgacaatttgtgcaaagacatattcttgaggcggcatatggatgaccagggttgggtgccattacccctgattgcaggatttaatcaggtgagtttgcaggttctacatgatgttttttttaactaaaaatattgtcaatgaacctttacttcgttgctattgttcagcagattaatgacaaatttaccaactgccttgtaaggttctgctcactgtcaccatcgagtgagggacatagaaaactttttttttcttattagtattagatatcttcttgcctggttgcctgattgtgtgagaaactgcatgcacatttagatattattcaaaacttctgataagtgataacttatatcctgtgtaattcactacataaatgacaacaaacatgcaattgtctctattttttaagctgaatacatacaattgctcatgcattgttaattgtgtcgacaaatatgatggaagagacctcaatctattactgttgtataggcatatttctttatggattttccgaatcatatccttcacagttagttagtttggtgagtaccatttaccattgcatcatgggaatgaggtttgtattcccctcaggttgctttaaccatgccaagactcttttttggggttatttcttcctctttcaactacatatttcctaactttggtcttgtattatgttctttataatgtttctgtgccttccgatgcactatgtacaaaagtcttataggtttgcatactgtatttatgctttttttttttgtcttggtctgttacttcttattccttgtgtgtgctggggagggggggggggtttctgcaacaataagactgaagcatccaaaatacaattcatttttctatatgaacaaactttctgcaccttggtaattaagcatttaagttccaagagaatgactacgtctgaggactgaatctttcccatgaattgttacaagtgttaatgtttttctaaaagaacaaccaggagttataattgcactcaaatgtcagatatgttggctggtcataagcagggcaaagagagaaactagccactggaatgcaaaaagaactgtagaaaagagacaacaaaggtagaggctgactaaacagtgaaaaggttcttaaaagtgctaatgttgttgtaagacaattacacaataggaatgttttgtgatgcagatagttagaataatggaaataaagtgaatttgaagatgctctgagttgtttttgctttgcaccggcacatgggacattccacaatatggaatcatggacacatatttcacatgactatacatggatgattaaaaaaagagagagaaaacttattctatgccataacatcatgcatgtcctgccaaaaaatatatatcaatattcattggccaggaattaaaatagatattttgcttcttttacaactctgactgattctgacttatattgtttcgtgtaggtaaaaaagctgactaataacgtgcagtttatcttggaaacagttctgcaatctaccgtggttgaagtacaggtgatctttaattctcataatttacctttgaagtaatttcatattttgagtttcaaacagacttatctgccatatacaagtgctgtaatttataaatatgcaagtaatattcatgttctgctatgtgcggactgcggaatgtactgctggtttagagcatgtactataaggatttaggtgttgcctccaaaagtgccacataggattaggtgatgaggtgtagagagaggatgagccacccttcatgcaagggacaacctccgcacaatctccaagagaaaaagagagaatgagatagtgtgggagtgaaccaacacaaaaaaaaatgatgtttgtgtattagaggtaatatgttgtacatgttgcctcttaattaatggatagatgacatggctaaaattagaggtagtagccaactctactataagatttgttcttagtgagcagttttttttaagtatttaaacttgatttagtgagcagcttaccattacaaatcttctcttcactagatatttcagaaagggtaaacatgacattcaaatgggctgtaaatggcgtggcatgctgtataaaaggaacattctagggaaatatttttggtttctgatcttcaaactgacattatttagtttcagtttgtaagggatgctgtactttactgatgatctttagagcagcattatttagttccaatactttacattcaaaagcttgttcaccttttattacaaccaattgggtagctctttatgctatatctgcatgacatattagtttgcgtgtctacctaggtaactcggcctatatctgcatagcgtcttagcttgtatgcgcacctttggcgtaacgttagtagtaggaatattggagtactcagactgttgtgcatgcccaacttaagtccagttgcatccttgtagaatcttagtccaatcttgtgtgtacattggatctggatccacatgttgaaatgtgcgcacgacgaacattgccatggcgcaaaggaatgcaccattgatttttaaatagtatattttttagcaccctagatgatctcacatgccaggaagcaggccttctctattttttcttccttcttaacgcaggacttcaaaaatgaattgagagctgtttcattactaagttttacttgccaagttcctttggttaaaacttaatgtatatcacttacaggtacactcttaactgattagccactaggaaaaactgaatgtctctgaacgtaatgctagaacatattacgaggagaatcttatctagtgatagcaaacaagttgtcaataggtgtattcaataatgatcttaaggttttcctatagattggaattgtgatagcttgacaacactgttatttatcattctacttacccgcatattcacttaagttaaaaatatctaaatagtaaccaccaactcatctagaaatcactcatctatcctccttgattagaaatcactgtaataaacttctacagtagtagccttttcttttgtcaatcttctgaaacaatatgacttgaaggaaaatttcgtttagcctgtgacaccccaattgactccccaagacgttagaaacatcatgtacttttggtttcctatcatggcttcttgcttgaaatgagaatgacatgaatatgttttttttttaattctaattcacattttctccatacatctgagttctcgctgtgtttcttgcatacttactttacagggtgacaaattgcggaagcgtgaaagatgggagatctggttgcttccaaaacaaggttattctgctggaaattcttctggttcgctgtcccctgtgacatccaacattgtattcactggcatctcagtttcaatctgttggacttgagggggcaggctaccatgcaagtcaaggaatgcccggtg

SEQ ID NO: 21046 - DNA, 1569 bp, Oryza sativa
caagaagtttactccggagcgataccttttgaggttttacacaagaaagattacaacggcatgccgagttttctctggttacggcacgcgtacctcatctactggggtgaggagtgaggactaaaatccagttgatttggaagaaaacaaccaaaaaaaggaaataaaacatacaaaaaagagagatagaaatacccaaaaaaatataaaaatataaaaaccaaaaaaatcgaaaaacttaaaaacaagaggaaaaaacatagtaggtagtattatgtgcaggacttatgtattttgtggttgtgctcttgctgggacgtgagtacgtgacattacctgttaagtactcgtttgattgttgctcttttgcagactgagttgttatggatgttgtcagtcggaagctgttaaagacgagacaaacttatttcaaaaaactgatgacattattatcagttgtgcatcttctgctgcccaaattgtgcatatgcattgtatttcttttgaaaatcgtattcatgttatgtatactttatgctgatttggtcgaacgtggacatcgatctgccgctatgaaacatctgccttcttcggcaaaattgctgttatgtgcttctggcacagagatccttcctatttacttgggggaaaaaatcttattcatctctatagttgtgctcaagagtataacaaagttgtgggcaggccattgtatggtctgcaattggtattatctgtgaatgatacgttttattagtaataatgtcccttacgaaactttggtgatatcaaattatgtcattatcaaattttaggaaagtaagacggacatgtgtggtgttaggtttgagacattctggtaaggtttcaacagtagaaactactgaaaatgccacaacttgataagattgtgttgacttggtattgatctagtgaactagtggtagtatgtgttaccttgccaaattttaaatgtcaaaatttaaaattaacatgaaagagaacaagcccgaagatagatcacttctaaccattctatcagtagcaatttattttttaaaaaaaagaaggctaaagttttgcctcgtatatattgatagagcaggaggaaaaaccaaacaaccaaataagttatttacatgtccctgccgtaaaaaaaactgagtccgcaaaaagggaaactacgtaggttcttccaacggggttaactcagcgagttttgcggatcccgtcttgatccaagctaacgcctcctcttagattttagcgatgatggtggttggggtggtggccacgtggcagaatatcctagcgtcaatggcttcaatctaacactaaagctacatggtactccttctgtcccaaattatagggcgcttctttttttttttaaagaaaaatcaaactcggtagtttttactaataatcatactaactatatatatatatatatatatatatatatatatatatatatatatatatatatatatatatatatactaagtattatacatgttatatcactagattcatatttttgaagtactttttatatgatactccatc

SEQ ID NO: 21047 - DNA, 3960 bp, Oryza sativa
ctctcacaatgcctttctttcacaggagggtttaccggtttataggctttccaaacgaagggtatctgatgatcgatgatgccacctttcccaggtacttataccgatagagatggctgtgaaaaggataaacttgagacgcttcttgtgcttctgacgaaaaaacagtgtactgaaaatacaagcagaatgggctgagcgcacgcatctcgcgagtgtaccgtggtagagaatagtaacatggatggacgagtctggattgctctgcatgcttcccaaatcccaactcattagttggaaatggagctctgtccggttgcttctatttggatgtttccacgcgtgataggctttcttttgtgaatcaccttttcgcgaaccttctacgctcctttgctgttttggtcgggccgtgctgtgcatcttttttgtgagatttcattcagttccaccaagcattgtctagacagagagaagaaaaagatctctgttgtgaatcttcctgcatgaagaagccttatacgattcaggctgtgatatatacactacactcgccttcaatgtactatagcacgtctgaaatagctgaatgattttgcgaacaatatagagaaattcacatatataaagttttttgcgaaaatcgcactgttaattcaccattttattcactggagaagaacacttccttactcagttaatcaggtacttcaacaacaatagaagagattttttacctttgagcttttttacctgcttctggtttgatcatgctaccgatagaagagattgaaatgttacagtgatggaagccaaatacagcacaaaaccacttcctttttttctggaggaaaaaaatcggtgtaaagtctgtgtctaccagtatacaatttgcagtcatacaaataaaatcctctgttaccaatctaattgccaacaatattaaggaaacaatgtcgtattgcgaatacattagtataggctgaaaccgaagaactgcccaactagaagagctattcccatgcatattgctacaagtgaagccgcccaggtcagtttctctgttatcctagggaccttttctttcaaggcctcactacaagaacctacaaaagcagtgtaactccccatcgaaaatacagtccccatcaaaaacatgccaagaaatgctgcaccagcgaagcgtgagggaagggccaatgaaggcaacaccatcagtagagcatctggttggagaccatgaacaactccagtggcaaatgttgcaaaaccaactttcttcttcctgggagcagcaggggtttgtaaaggctcactgctggttatgttgcagtccacgccttccagggcgagcgacgattcctgaacctctgtagcttctcggatgcccatacctcctatgattagaagggtcagaccaaccactcttgttccccatgtccggagaatctcaatgtgcaatcgatccttgagtaataagaatagcaggccaaaaataacttgtcctgcatcatgaccacaaccccaaagggcaccgaccagtccactttccagtcttgatcttccaatcgacagtggtgccaaagcaacgagatggtcaggcccagacaaggtatgcaagcatccagcaatgaaaccagcccaaccactgcttagtatctctgatgtaaatagtccaccagttttggttattgattgcactgatgcatgggcaggataaggaatgctagattgcagggtgccggtaacaagcgccaccaataggaaaagagcagctctggaagcctgtgatatagcaaaatgttgactaaatcagaataatgatggggaaatacgattttaaaaaaccaaagcatatatgcacaaaaccaaaccagaaaacaagcataatgcccttgcttctgatgaaaaataatgtagtcacctccacaacaccttagctatatttgaagagctttagtaaaatctcaaaaacattacacatgtaaatcagtaaatgcaatcccatctagcatcagatactcacaaatgctactagacaaggtccatttcgtatacgcatatctcataatccatccgaagccacattccatacctaactagatcaactactacacttttaaacatgtgctgcatagcaagttatctaaagtaccataaaaacatgtcagttaagaaaacattaaaatagcaacgcattcttccaataaatcatgaagagaacattgggctagggaatgatgaatgcaactgattatcatggcattttcacagttgacggttgacacacagtcgaacatttttatgacctgagttaaataacataatagccatgatgttgcgagagaaaatgatgcaaatatgttataaaacagtgcaaaaattaaagacactaattcatgatatcatctctcactttgttcacagttgcaagaactatcacatagtgagcctgacacatttatgattaaaaattgtgtccgcaatggaaccccaatatggtacagtgctcactacaaaaatgataaaaacaaggtctacttttcaatttggctaaggctatgagatacagtttctttgggaacggaagaactgtgaggagtgagatctaatcagatgttaccaatttagcatcaatattaactaccaaatgtatcactcaaaaactaaagaccgcatggacattaaacgatcttacaacacaccttgttagttgcccaaaaccctaactacgatcacaggtatcttggagttctcacaacattctgggttagttttgataatgaagcactaaaatcatctctccccaaaacataccaaatcatcacttagtttcaagtgaaatactatacttcagatgtttacctacaacaaaattccgttttgtaacttgctatatacaggcagtggcgaagctatatagtgtttggggggtgcacatgaacccccgaaattcctaatttctcacttaaaaagactagaatatacaatgttgtactgaaattttctagattctcaatggtagtgcaccccccttgttttgatgctagcttcgcccctgtatacaggtctcacaattccacaaagaccgcatatcggttctttttcatacccatctagtatacagtatcttaaatcataaacatgattgtacataatggagcacaaattaagagtgctcacatgttcccctctgttctgctaaaataaagattttcttgtgcattggctttgtatttttccatatgaagtatatggaagcgccagaaaacaccagcttaatcatttatagaggtagagccaacacaaaaacagcatttcatttggagatctctttcatttgctacaaagcatactactcttctcatcccatacacagccgtggcattgtcaaagcccagtcgaggcatgtgtcatgctattcgatctcaaacagaaggttgtcatttgtcaagctgaacgaactttctcaaggggcataattaccacaattaagtactacgactagcactagttgagaacctaccatggcaattctaccgcgcgcatcattttcgagccaaacattgcaattccagtagatgaaaaaaaagaaaacccaaaattggggcagtcaccttggggagcagactccacagcaacttccacggaggtccaaccgccgccgccggagcggcctcccgcggcggggccgacacaccatcgtgcggccgcgccgcgatcggcccgagacgcggctgcgcccgtagcctccccgcccacggctcgacgccgccgccgccgccgagacccgcgacggcgaggcggcgggatggggatccgccccccggcagagggatccgggcggcgacggacttggagatcagccgctccatgcgcgccgccgcgaggaggagacggagaagaaagaaggcaaactaaactagaactagaagagtccaaggcagcgagagatcgtgc

SEQ ID NO: 21048 - DNA, 5843 bp, Oryza sativa
gtcacgataagctatcattgacgatatctttagcccaatctttttttttcttatactacctctatattatgacgccctcgactttttatccaacgtttgatcattcgtcttattcaaaaaatttatataattataatttattttattatgacttgattcgtcatcaaatgttctttaagcatgatataaatattttcatatttgcataaattttttgaataaaacgaatggtcaaacgttaatcaaaaagtcaacaatgtcatacattaaaatacggagggagtacttacgtttatcagccaaaatttaaattttcaaccttaaattcaaaattaattttaaagttttcccatcaaaatttattttgcagtctttgtttgtagatagttaataacacatatataaaaaaattataaattatttttcgtttacaaatataccgcgtttagcgtattccctggataaacgaaacaatcgctttcttggatggatctgcgtctgctccatgagatgtggggtacgttacgtgccggatagaaatcacgtgtttaattgtgttatttgtttatttatttgcttgatgaggcattgtttgactcaatacaaaataaccgagagttgacaataagggcatgtaaaaataattatcgtgtcatgagtttgtgactgttgatactccattagtcacgagactcgtttttggtttgtttgaagcattatatggctgcttctctgatccgttttttatttaagtaaattttatagaactatttctacttttatcaaactattataaaactatagatttaaagaggtagtattacaaaccacatattaacactatatttttcacgaaactctatattcaaggtatgatatcataaaatttagtgatgaatttgtcaaaaacctaccgtactctctaccattggtcatttttagccgttagattaaatgcggccggatgtgatcgatcgctacggtaatcaacagtaaaccgataccgtatgagtgaacagtactccgacactgttcgcacagcgtttttactgtgtttatggcaagatattgtagctcctggcacattttactgtgcgtctcaggctctcagccattctctccgtaatatcagacgatgcaaatcctgaaatccgacactcgacagtcgacacccgccgagcaggtgaaccagtatcagccttagcgacaccttccacaattataccttagcctgtcgccaacagatcattccagaattatttccagttgcggcgagcagatcccattcccatcccagagatcatcgaggacctctgatctctcaaactcgtgccactcccgcgtatgtgggactacctccaatccctcgagcacccgctccttgtcttcaacgacatgcccatcgagcaagtgcacccgtctcatcctcggcgacgccttcatgacatgcctgacaaagccgatttgccaccctactgcattgaagccgacgacaacgagctccttcaggcaatggtactgacgatcttgagcttgcacgtctagccaagaagccatattttccgacctgttgtcaatctgcactaaggtttgagaattctcgtgtgaattcacagatatattccaaaaaaattgaagaggatatttaaggaaaagagacttgtagagtgcatacatgaacatggcatgactccaaaaccggcgcagcatcaagcagggtgacaatccagaatatatcccaattaattggtacgtttgcaatgaatagcttcttgagatgaagcaacgggtcgggtacagctattggctcaatccacacctgcacacatgaaaatgcaacgcaatttcacttagagacaagaggccactacactattactattagttcatacactagtgactagtctgttagttcatttcaggagtatgtatgatcgctcacctcaggtcctttgaactgcagaacaaggctctcaattggcgggatcctcttcaagaatttgctcagtggatatgttgtgttgctaacacttggatcgactttgctgtcgccttcggtttttagatagtccaaacctacatgccaagtccaggcacctcgccatagtatatcttggaaggcagtaggccccggcaagcaaaagtttcaagacagggcagtgaatgcagatagattttcccaaatttgcagttgtccaccagcagattctttaaccttgatgttgggacattgatacggagaccaccagcacagtaacccggacaatatccgatactaaagtccaatagatgcacacaatgtgtcaaaatccgattagccaatccaaagtacgaagttttacacaaggagagtctcgtgagcctctgaaacgtcaaggaattaaatgaacccaagggagggcagttgaacagaacgagccgcttcagctgcaaattctgacatccatcaagtatcttgaagtcataggcgatgcaacggccttcaacgttaagctcaaaatcctcaactccccacctggcaatcgctgcagtaacccatcgctgaatgaattggttccacttcctgccaaaggtttgaagccttagcttttggatagttcggtgcacaccatcggggggcagaaggaatgcatccacccgcttgacatagtgccgcatggcccagcgttcatagcgttccagggcagccgtgagtggacggatcctcctcgtccactgatccatcttgtccttcatggcataaaagtcgctcaggttcacagcatccctgtttgttgtcacatatggtgacttctctgcctcatacgctgccttggcttccatccacagtcgcttcaacctgtggtagcgtggagggaggaggtcatcaacggcgaagtcgtaacatgtgtgggagcgccgaggaagattaagccatcgctttgaaaggatagtggtggttattgttgtgcgtgcatctagcttgtcgagaatcaggatgagtatctcatcaggtaagctgctgagcctgtcctcgttagtattgcgctccttactcagacgcacctagtaaatttgatcagaaaggagatggaacaacagtaagctaactaaagccactataagtaattgtcaaggctgctagtgaaaaattttcagactaacagactacgttgcgacatgaacaatggaaaggtttaagtgaccaaattattaaaccaaactaaaacttcttgcagtgaaaggaacatattgagctgcgtgggtaccaataaggcaataacaacgggtattgttccactttcttgatggcgcaattcggactaaaaggggaaaagctcgtttctactgttaaactagtcaacgattattcaacactaatctgtaacactacgccaccgcgaaactcgccgccgacaagagagagagatatttagacgagatcggagttggggacgaagagaaacagagctgaggcagaggagagacagagtttggagagagataaattcgatttctttttgccaagttggccacagccattctctctctcgagtatttatctcctgattacatggaccgttggcccaaacgatttaaggcacgcaggccgcattctatttgataaagtctagcccaaaacacacacactatcattcacagttaaacctctttctcagtgtcaccattgccggtcatgacagtgccgcccgcaggagtttcagcttgtccccaagctggagcatctggaaagcgagtcttcacaacatgatagtcctcccaagtagcatgatctgctggtaataaagaccatttcagcaacacctggacatgagctgcattaccgcgcttcactagtcaatgctccaaaatcgcctcaggaacaacgtcagcagcatcaagaaccactggggatggcaaagaagtataaacaggagtatgatctggcacctgagctttgagttgagaaacatgaaacaccggatgcacagtgctgctggcaggtagatccaaacgataagccgccactccaatgcgctccaaaacagtaaaagagccaaagaacttataagccaacttaggatatggtctattaactactgaggactgagcataaggctgtaacttcaagaaaacagcatcacccatagcaaaaacacggtcagaacgacctttatcagccttgttcttcatacgcagctgggctcgagttaactgctgctgtaaaaattcagacaagtgctgcctttcagtctgaacatccaccacatcaggcagagtagccaatgtcagatcaggaacttgagaataatgaggatccaccccaaaaagagccttatgaggagaacagccaagagatgtatgataatttgtattgtaccaaaattctgccaaatgaattcaatggctccacttcttagggttagcctgagtcatgcatcgtaaatacatttccaaacactgattgacacgctctgtttggccatctgtttgcgggtgatatgctgtgctcatctgtaattgagtgtcccaagtagcaaaaagagttgtccagaacttgctagtaaagagacgatcacgatcagacacaatagaacgagggatgccctgagttttaaatacagttttgtccaccagatgagccacttgtgatgcagtgaatggatgacgcaaaggaatgaaatccgcatacttagtaaaacgatccaccaccaccaaaattgcattataaccatcagagcgcggtaaaccttcaataaaatccatggagatgtcctgccaggcctcttttggaattgggagaggagctaacagtccaggaagccgacagtgttcatgtttggcctgttggcaaacctgacattgcttcacaaaattttcaacatccaacttgagaccaggccaagcaaataatttcttaaaccgatgataagtagcagcaatcccagaatggccaccaagtgcagaagcatgaaaagcttgaatcaacttagtatgcagtcctgcattggatccaatccaaatcttattctggaatctaataatcccttgtgtcaatgaatacccttgagaattaggagaatgcacagccaactcagctagtagctgctgagcttgaggatccactgtataagaattgatcacctcctgaatccagatcggttggaccacagaaagagcacaaaattgagaggaggaaggcattctagataaagcatcagcaacaatattatcaacccctctcttgtattggaaagaatattgcaaacccatcaatttagtcattgccttttgctgtaattcagtccccaatatttgatcatccaaatgacacaagcttttgtgatctgttttaatgataaatggacctctctgcagataacatctccacttatccacagccatcataatagctagaaactctttttcgtaaatggacaatttctgattaacaggacccaaagttttgctataataagcaatagggtgactctgctgacttaaaacagcaccaagaccataagcacatgcatcattctccaaagtaaaaggaagctgaaaattgggcaaagctaacactggagtgttactcatagctgtcttcaactgatcaaaagcaagctgagcagcatcagtccaaagaaaggccttcttcttcaacaagagtgtcaatggtcgtgctatgatactataaccctgaacaaattttctgtaatagcctgtcagtcccaaaaatcccctcaattcagtaacagaagtaggcacaggccaagccagcattgctgctgtcttctcaagatcagtatgtagcgcccgttccgtcgtggcgcctagcgggaaaattatctcctaaaaaccctaat

SEQ ID NO: 21049 - DNA, 7224 bp, Oryza sativa
ttcccctctcgccggcgtcacctcctgtcgtcgctttggccgctagccggagcgccagctcgccggcttgaccgcccaatgtcggttcctctctcccaaaccgaccttcccgcctccaataaacccaagcccccccccctcccttccttcctctcccattcgcctcctcgccattgccgccgctcccgtgctctgtctcgcctccgccgtccatcgccaagcgccgggagagccggtgcgttcgtggacgcggaaggggactccgggcgcgccctcttcttcctcttcctcggcccgaggccggagagatcactcccacgccgtcggcctctcgtcaccgcgcccgtcccgcacggtagtgcctccctccgttcttcctcctcgctccatctcccccccttagctttcagtagtagctcgagtagcctcctggaagatagccggcgccgccccgaccgttgccgtcgctcgccgtgtgctcgccgccgtcgccgcccgagctcggaagcgccgctcgtcgccggcctcgctcggcgtagttccgcccaatccgacgctagcatcggattcccgttaccgcgtagatgctctcgccgccgggaattagcccctagtgacctcgtcgccgtttcccccttctcccgccgccggttgccgccgccgcaatccgccgccgtcgagcaacccccggcaaatccgagccgttggttcgtctcccctcgtcacgtgcaaccgcccggtgtgctcgcttttgcccgtatcgccgtggttcgctccgtcgctcgccgctgtcgaccgccgtccgttccggccggcgtcgtcgtctacctcccgccggcccgcgtggcagccacgtaggcgccacgtcggcgccagctcagcctagaccgggtcgagccgaccccggtcagtccctccccgtgcgcgcgttccaccgcgagctgtgaggctgcgcgtggacccgccgcacccacgtccaccgcgaaccgcgcgcgtgcatcacgtccatcctccaccctagcgccgcgccgcgtgcttcctccgcacggtgagccgagccgctgacaagcgggtcccacccgggaccgcgcgaggtgagcccggcccaccggctctctctctccttcctccgcgcgcgcgcatcttgggccgctctgggccgccttcttgggccggccggcccgttaagctcggccgagccgctctttctctcgggccgcgccctagccgcccaagaaaagtctgttttctctccctcctttcttttcttttcttttcttttccaaaaaggatttaattaaatccttttcctttagaccaaaaatccaataatcttagaaattcaatatcttcccaaccgtaaatccgattgactccgttcaactcccaaaattcctcaaatcccgagatctatctaatggcacgcttagaggtcatcaatagggctttattttcgccgtttgttgagttgtcccgttttgcgtgtagtttcggagcccgaagacccgcagtgcgaggatttcgaggatcaagctccagatctcgagcaaggcaagccacctttgaacatcttgatcctatatttgaatttaattatgttgctcgaaaaatattatgcattgataggatcgcacttaatctgcttgttccgtccgcatgacagtttggcggacctacctaacttgttgcatctgatccctccattgctaattgttataccatgtccccttgtaaccatccagttgcgcctcgatactcgagcactctgtgcgagtatcgacggtcgccctcaaacttaaaatatgataaacatcttgggtaaaacttgggttttacaaaagatttggaaaacccgacacctgggttggtgtttgtgaactaaatgaaatttctaaaaccgcggaccggggaacgtaccgggtgtacggtttcccgctcttgcacttaaggaccgtttccttggaatttcatccgaacataagacaagtacgaccacatgggtggaatgggacacccctggctgagtaactagcttatcaggggagccttgatgccgagagacatgtggattcgccggggtggtgtcggggaggacccctgggcttcctggcactgtatggtctgggacctaacctgttgttggtctgggacccctctcgtcggcatatggtaaacctgtgtcggctttcgaaatgccttgtcatgaaagcttggaggtcccccgacgtggctgatttccacgggctgggtgatccgggttagtaatgtcgtgtgggtaaagtgtaccccctctaaagaggttaacaaactgttcaaatagccgtgcccacggtcatgggcggatgtgaggtgattcctagcgtagttttgttttactactgcttatgaaattgctgttgagaaaaggggttcgatgtttgaaaaatctgtagctgatgggatcagctaggcccgggtggccgtttgaaaagttgttggcccgggtggccgttgaaaagctgttggccgggtgccaaccttgtttcaattctaaagactgatacattgcacatactccgaccggacgagacgcactgtctcatccgtgtcgtttgagaagcactcacttagttgtttcagaaaagagttcgaataaaatcaattgcaaaaacaccagcctttctttgaagcctgcattaaacacttatttcccctggcttgctgagtactcccgtactcacccttgctctatataaataatctccccccccccctcagttgctgaagaagatgaagcggatcccgctgatgaggagttcttccaggagcaagccggcttcgatgagttttagggtttcggcctagttcccaagtcgcgcctgtgatgtttggtccaagtcctggcttccgtttcccttttgtaatgcagttgtgagctcgggatctgtccgcagcccaacatgactgtacttctactctataataaagagacctctgttgttgtgatattctgtctccctatgataccagcactgtttcctgggactggtatcgattaacaggttaatttggagcgtcacgggctagttccggtcggtactagttcggggcgtgacacagtactaactcctttgtcagaaatgatatgtcctaagtattccagttgagtgcaagcaaaagagcatttagacctcttagcaaataactggtgttgcctcaaaatagcaaaaacttgctgaagatgatgcaaatgactatcaaggtcagggctataaactaagatatcatccataaacaccaacacaaacttcctgataaatggtgcaaagactgagttcataaggcactgaaaggtggagggtgcattcgtgagaccaaatggcataaccctaaactgaaattgcccatgatgtgtcttaaaggttgtcttggcttcatcagtttccaccattcgaatttgatgatacccagctttcaagtccagtttagagaagaatttagtgcctgagagctcatccaataattcatcaacaaccggcataggaaacttacttttaatggtgagagcatttaatcttctgtaatccacacaaaaacgccaactaccatcctttttcttgacaagtaaaacaggtgatgcatagggactcatactaggtgtaattaaaccagcatcaatcatttctttcacctgtttctcaatctcgtctttttgtaacggagaatagcgataaggtctgtagttgacaggagtagcatcaggtactagagaaatagcatgatcaaaaaccctatgtgggggaagacacttaggatcgtgaaagacatcgtcaaagtcagttaacaattgttgcaccgaagaaggaatcacatgctggacatcatcctgggaatgttccaacaaagcagcagcccatatttcacaacccttatgccatttcaaaagttgtggcagagtgacagcagcaatttcagaagggactgcagcatcttgtactccttgaagagaaatccaagacccttgatactgaaacttgagtgttttattagcccaatgacaagacatttccccccattgctcaagccagtccatacccaagatggcatcgtgaccccccaaagtgaccaccctcatgtcataagtaaatgtgtgcccctgaatccaccaaaaaaaaccaggaaccacatactgacaaggtaagcaatcaccattagcaactttcaccagagtagaaggaattggttttagaggtaaacccagcatctgtgcaaagttgtaatcaataaagttgtgagagctgccagaatccaccaaaagtaacaagactttactatgaaccaatgctctcaaacgaatagcagtaagaaggtaagctcctgtcaatgcattcagagaaatatgacagtcctcctcatcatcagattgttctgcagcaataacaacatccaatatgtcatcagtgagcacctcttccaactgcatagctttgatttggcctccaacagcacaacgatgttcaggagtatatttgtcaccacacttaaaacaaagaccctgagcacgtcgatagtctttcaactgcttagccttccatagatcccctttatctactcgacctggagtagtatcagaactgacatcactcttgtactgaggaagtttcacaaatttccctttgagagctttggtagctctactagccaagacagattcctacataagagcaatagcagatgcttgctgtacagtgtcaggcaattgaacaacaacagcagctcgaatttcttcagtaagaccattcataaaacgagtcactaacattttaccccccacagatggatcaaacactctgatctgatagacaagagaatcaaattgttgtttatactcagtcactgtactagtttgagtcagagtatctagtgcagacattttcttacgttccacaacaccctcaaattctgttgcgactgccattctaaattgatcccaagagttaacctcattcactaacttataagaatgataccattgagccgcatttcccgacatatgcaacacagcagcagagactttgaaattttgagtgatttggtacatgtcaaaataagtctcacacatatccaaccaaatccgcatatcagaaccatcgaaacgaggaaaatccattttaggaagtggctgatgacgccaataaatcccatcaccaaaaccacgacccaaatcaaccccatccaacataggaggaacaggtggattcaacggcggaggagtcgcagaaccacttgtactaacctgcgagatcccggaaggcgaacccaaaatcccggcctgatcagagcagctggccacccgcttcatcgaacgggccaactcagcacactcttgctgcaccttgccgacggaatccatggcgagatccaccttggtagtcaccttctcaagactgccaccttgggaatccagccgctgatcaatctcgtgcatccactttgtgatgccttccaacttctccaagagtttggactccatggagtccatagcttgcttcaaaggggctgaaagttttgcgggcgccgtggcgaatcaggaagaatccaacgcacggcgacacccacaacctgtctctgataccactgtaacactacgccaccgcgaaactcgccgccgacgagagagagagatatttagacgagatcggagttggggacgaagagaaacagagctgaggcagaggagagacagagtttggagagagatagatttgatttctttttgccaggttggccacagccattctctctctcgagtatttatctcctgattacatggaccgtttgcccaaacgatttaaagcacgcaggccgcattctatttgataaagtctagcccaaaacacacacactatcattcacagttaaacctctttctcagtgtcaccattgccggtcatgacataatcctacagagtacagatcggaaaaaaaggtgtagtttttctgtacaacacaactgcaggagctttgaatcaaaggatataacagtagaacgggcatatgtgatacccgcttggagggcggggaggcaacgacggcggtggcggtggagacatcgatggccttcctcaaccgacggtagcgtcgtggagccgcctcctccgtagccatcggatcttgattgtcgccggctggatgaccgatcggcggcgagggattggagagagggctggacggattcgagaaggatggaggcgcaagcggcggcagagcgattggagaggacgggccgcgagcggcgccgggggattggagggggaaaagctccggggcgtccgtacagttttatggtttgcatctcagcccgtttgtgttcggctcaacgtgtcctttccgatacgaaaaagctccgattttggccccctttttctgcatctgaagtttggacgcaactcgggatcggcgcccgatgggattcagcttgggtgactttgtgttggcatgtcacaacgtgacattgtgaggatctctgccatcaaaaacacatccaacggctcgtttggttgggcccgcctgcaggtcggaaatttagccgccgatccatccgtcccgcgggagatggcgcccgccgatccaacccatcccgtttcgcctcgcccgagtccagccgtcgccatcgccgtgagccagctgggaggcttgctgtcaccgcgcgaggccgtcgggctcgccgcgagtggggaggggaccgggcggccgccgcgcaaggccggggtcggggccctgccctgctgccacgaccgaggagagaagccaagccgccgcgcgaggccaactccatgccctgtcggcctgtcctgccgtgacctgtggagaggcgccagggcgtcgaggccctaccctgccgccgcgaccgggggaccgggaaagctaccaacagtacgatagaacatttttctctgaaactcagtcagtcaacacaagggagatagctatatccaattcactcacaaatgcagtgaaatcattgcatttccctccatttgaatggcacaaccatacatctcctttgaagtcatatatatcaagcatcagcgcgcgaacaccattctgcaaaaaaaaaaagaagctatttctatgagaatcaattgtggctagatgtatcgtcagacatgtagaacaatggctagaacagatgatgcatatagcaggtgcgacatttaattgatcagtgactgtatctcttgg

SEQ ID NO: 21050 - DNA, 5267 bp, Oryza sativa
agctgcagattacagaagaaaaatgaggccggttcaccacggctgcagatcaccacgactgcctggactggctcggcggcctccaaccgcaaccaccaccgcacgagggcaggcctggtggccgaccgctgctcgcgccggcagggccaccgcggcgatctcgacgctcgcgcgcggcggccccaccggagtcccgcggcgacaacccccttccgagcggtggcaccggcccccttccaagtggcggcggtggtggttctgggggattcgcgagcagcgtgctccggcaggaaacggagcaatgcggggtgaaagctgaggcctgcaggtgggccagcgcagtggacccttggatttattttcaacggcccagatcgctgcaatgtcacaccgtgccataccatggcaatgtcacagaatctgagtcccgcccgatgggagggggaaaatcggaagctgacatcagtataacacatgcgcgcaaaatcactttaaactattttttctcttaaattatttatccaagtcattgaaaaccgcatgtcgtaatattgagtcgatggttatgcagttgttcgctaactttggatggagattcataaataggattcaataatttttgtgatctttttatgctgtgagttttcattaatctgtatgcttttgtttattcaggtgtgagtttttattgagttggagtaataattggctatagctttttgagcaaaggcaaggattatattccattatctaaaaaattagatctatacatagtaaaacattatgagtacactaacatttttttttaaaaaaaatgaaacgaatttccttaacagaggatttccaaaatacgcgggcaatttgttgcaacggagtatgtggtggggccacgtggctggtgggggcaggaacatgtggtgggcccacagagcacgtgcgcgtatcgtgggggggagagcgaccgatttttcccctcctcgagcgaccgatcagcagcaattctgctgaagttctaaacgtatgagaaacttttggtgacagctcaaacaacgttggctagatgtaagttagtaaaatttattgttagaacttttgatttttttaatcctaatttgtttttagcttggcttttaaattttaagattgttttacctggaatagctctaatttacaccacctttagaataggacatgactatatagcgcacgatcgctggtttgattaaggccctgtttagatctcaccctaaaattttttgacctgtcaaatataatgtttgaacacctgtatgaaatattaaatgattatacactgtaattataattgttaaatttttagaaaaaaaattgtcgacagatatgtagccaaaagtgaactggcaataccaacgccgaacgcatacgcaacggcgtcatagcacgagtagcaccttttctcatggccctatgtatcgtggagtctgtgtgatatttgttgtaagtattgggaagtggaggaccagactttgcctaagctgtgcgtcgtcaagtttcaaccaggtcaggtgtgtgcctctcgctgtagtagtctctaccattcccagcgcatgaaaccgaccgtaatgaagaaagcccacgacgcaccccaactacccaagtgacactcgtcactcgtgccgtcggtcatgtgcatgcaccacgcacgcatggaatccacggcaacagcggcgacgcacgcccaccacctctagactctagtagttgtagtacaccccaatgccacatgcaaaagcgaggggttgtttggttggcatactcacattactaaaacgtgccatactttatttagctaaagctgtttggatgctatattaagtttgccaccattcaccatactttttatgctacacttgtctaagttgtgacttacaaaaagtgagccacaccttagctagcaaaattgaattatgccacactttattgagttgatgatatgtgggacccaaatagataagaagtaatactgccacaagtgtggctataaaccaaacaatatactaacttggtcaaacttatctaacataagttgtgataacctttggcaaactttgggagcaaaccaaacaacccctaacatgcctaacatgtggctaacaaaattgaagccacacttcaactataggagagcaaacttgccacacttttatgtgtcaatgatatgtgggacccacgtcatggtgaagaaatcttatcataagtgtggcacgaaccaaacgaatgcctaacttaattaaacctggctaatttgagttgtgtcacagtgaagcaaattgtggcattgagcctcacagcccctcaattctgctgcgggtcgcgactttgcgaattgcgagtagttggcgcacgtactactcctactacacgtccactgcgtgtgtctgcgttcccggacaaaattgccagccagtgcacaagtgcaggcgtgcggccacttcccaaagaaacccaagtagtggaatttccggaaattaaaacagcataaagtgctcctaccactcctactagtagtactactacttctacccaacaatcattccaaccagtctccaaacaaaaataaaactattgcaaccagcctccaaaaaaaaaaaaaaaccttaccccaaccgccaactcacgggctttggcccctggcacggcagccttaacaccctgtttaattccatctccatgcctcatacctacccactaggctagcacccacgacacacataaaccgagcaacctgtgagcagatggccccatttgtcactggcaaatcgtggaggcgacaccggtgtgaaacaacaagccgcacgaccccccagaaatctcctcctttgcctcggcccctcccacggcgagagagcgtccacccgacgctcagcaactggagcaagcacgggcaacgagtcgcagtaaaacagcagtgcggactcggagacagtacggggaaaacgcacatcgaacggtggagagtggagtggagtcgaatgcagcgcgagtgagtccagaacgactcgtctcgtaacaccgaagcgaccgagagcgcctactgccgcctactgcgcctgcgctgccgccgcgcaagcccaagcgcaacgcatccgcctctgcctcatcctctcctccacttgctggtcgctgccattgcctgcgcctccactccacttctcgcggctcgagaggctgacggcggggcgcctcgaatttcgccctctccgacgagcggaggcggaggagggagcccaggaagaggatgcgaaagcagtgaagtttgtagaattttcagttgcattttgctgtttctgcttgggagttgctttggggcgataagaattctcttgttgatttgttcctcgcaggagaggaggagaagaggggggaacggaaatctcagctgctgcgtcagtctcgcagatctgctccgttgagctgctgtttcacggaatcaccatgggtggaaatcatcgccatgggtggtaggattggttgggtgtcgccgatcttctcgcttcacgccaactaatcgagtgaattgtgggaagaagaagaagaagaagaagccgagtagacgacggcaatggcgtcgtgggagaacctcggggatgtggcgaccgtcgtgcagctgacggggctcgacgcggtgcggctcatctccatgatcgtgaaggcggcgtcgacggcgcggctgcacaagcgcaactgccgccggttcgcgcagcatctgaagctcatcggcggcctgctggagcagctgcgggtgtcggagctcaagaagtacccggagacgcgggagccgctggagcagctcgaggacgcgctccgccgcgcctacctgctcgtccactcctgccaggaccgctcctacctctacctcctcgccatgggctggaacatcgtgtaccagttccgcaaggcgcagaacgagatcgacaactacctccgcctcgtcccgctcatcaccctcgtcgacaacgcccgcgtcagggtcggtaaaaccatatccctttcagcttctctcatcagtgttcatttgtttaatcgtgtagttgagtgttagactagtagcctgggcatgtaggcttttaagaaatgttggttgcatcattctttgattctaaagtatggtatatggaatgtttgcttttgaaattggatggaaaatgatttgtcttggattcttggtggttttcctgtatggtctcatgggttctttgttttctgttggttggtgtgacccaaaggattctattttagaatctatcttctgaatataaccgacgctgcaaccttttggtgctccatcattttcatcgtctatataatctgatttttttgttggtgtgaatgtgacccaaaggattgtgaaggtatatgtatatgctaggaaactgattttttttttagctccagcacagtgagctcaatcactaatcatgccacttgggactagtgatctgcatcggatatcatgtttatttactcctatacttgtcatctttgcttcacaatccttttttttcaggagcggatggaatacattgaaagggatcaatgtgaatattcttttgatgatgaagacaaggaggttcaagatgctctgttaaaccctgatccaagtacaaatcctacggtagtgctcaagaagactctgtcatgctcttatccaaacttgccatttaacgaagcgcttcgaaaggaaagtgagaagctccaagtagaacttcaaagatcacaaagcaacatggatatgggccaatgtgaggttattcaacacctcctaggagtgactaaaactgtggcaagttcgattccagagaaatgtgccactcctaaggtttctgaaaaagctgactctaatcacacaaaagtcagtgaagatagtgcaaaaacatatcatgatgactctccaaagaagcaaaaggatgcctgcactgcaccacggttagtaagtttaactagtttctttcggtgactatcttcttatgatgtgggttgcagtggtaaaaaaggcagtgtataaaaccttttctcattaagtaacattaacctgaacaattactatggccatttctgggtaaatcatgaaaaatgtgcgcattcttccttattttagaggtgtaagtcttgtatactcaactgtgtgatccaacaaaagagaacttcactatgttctgttctagacttgaaatagaaattttgttatgtgcttatgcccctcaaaatgcgtatgcacattataaaaa

SEQ ID NO: 21051 - DNA, 8263 bp, Oryza sativa
ttactgaagaagtagtaatgctatgatagcagctagcagggtcaaagatgatcagttctactaaaaaattatatagaaattagtcttgttttgtctttcctcggtacttgtcaattatatggaaatatttgtgacatatttttttttgccatttatttacatactgtgatagcacaggtttgagaacattagtgcttattaattatatggaaatatctgttacatattttgcttgctatttattacttgttgtgataacacaggtttgagaacattctttttcccctgtggaacattctcaaagattgcttcaattgcgaagaacaggcccatgtgtaagaatatttccctgacaataatcatcatgttgagagttgataatttttgttcctcctagcatttttcttcatttccctgaaaatagtcatcatgtattatttgcctccacttgttttactatggtgctgacttttctgcatttggatagtaatttccaagggtgtgcagtatcttgtttatgttagctagtgttagaccaaacagattggccttgcatgttctctgcatcttgagttctaaagtttgttgtcaacaaaattctccatcaaaatgcttccaaataggattctatgccacattttctgtggactgaattacttatgtaatctgaaaggctggttgacactgataaaaaaaaatttcagcatcgtcggaagcatgcaatgatattatggcatattccctgatattatcctgctgttgttacacttgctgtgtgaggagaaagcttcgtcaaaagctaaatattgcggtaaattttcctgtcccttcatatctgttgtcaattgattttttttcctgcttctctaaagtagaagtgcttcattctgaccctacaatgtgaaactgagctacctctggaattgttacagctccatgttatacactatgggtcatttcagaactgattaactgaactagactataactggggctatgggtcattttggctaaaggattataaatgaaactaacttaacaaaatgtctgtctgtccattgctaatgcagaggtttgttaaaagattgggtagagttttatctgaaagaattaccatgcacactatggagcgttcgtatatcctaagagccttttatgttacttaaaactctgtttatgttatgccgctgacagggaggttgcattgatgatttcctatcacatttgatgtgttgttgctgtgcgcttgttcaagaatggcgggaagttgagattcgtggagcttatggtgagtttcctacttccatgttatccaattaaccagttgagcacgtggatattatagggaatatacatggatgatggagtatatataacagtccacatttcctccttaacagtatcctaaatactagtatatggcactgttgacttttatttggtcaatcttttgaaactttgaccattaatagctctgaaaacattaaaaaaaacaagtggatatatttttctttataagtacatttacaatattacaattttgttagaaatgatcttaaattctaattgataaacagtgatcagcgttgctcactgaacacggaatgaattcaacagtgttatatatttaaaaacagatgtagtaaatgggaaggaagattgtattatagtgatatggtctcgaatcttctacggttgaaacattgctctgaaacatttcatgtcatcataaccctgccgatctcaaagacaagcacaacatgatttaaattgcacaagcaatattaatcagtatgcctcatttcctgcaggagagaggactaagattagcccaccctcatttcagtacatggaacactaagcagcgatgcaaggcttgagcttctgtgaagataatgacctaaaggctagagcaacccggtatcgtactacaatagtaatgatgacacagctacaacattgttgtatttatgcttaccctgcattgtttgtgttggtactctgtttatagtaacatcagttggtgttgggcacagtatgttgtatgtagtactttgtaagaaaaaacacaagttacatgccctcgttgtgctcgtctctgttgaatcccccatgcataatttaacctttagcttcatttgcactataaaacagtaacaatattaaaaaagtctcaaattgcaaaggcaatggggtccagaaactcggaggaagaaaactgttaacaggtttctcaaaaaaaaaaaaaaactgttactagtagagataaacaatgcgatgctgggccatgcgaacatgatgcaacaattcaaacaaagaccatcaactaaaaaacattagactttcaccatgagcttccgtttaccacgacgtacataagcttccaaggctcaaggcaggatgtatattttggcaatttaagcaggtacgtcactggccgccatcttatttatcagtatcttggcgaaatccatttcataatcgtcatgtgaagaattgttaagcatgtgaacagtttcacgatgacgcgatccacgggacacgcagacatacatcaacgaaggtcgttgagttgagatgaccgtcctaccagagttcctccaggcttcctgtcgaaactcaaacaacaccggcagatcgatggcctcaccgggcgtagcagcctagggtgagtgcaccggatgcaatctggccgcacgctactgctttcagcgaatcgaacggaacaaggagttcggataataaaactccgaaccccttttcaggctgcagtagaaccaaagcaagggttcgggaacaaaactcctaacccgcgtagcgcaggtgaccgtcgtctttgtgcccaactatctctgtagattgccatctcttgctctcgcaggctgcagcagaagctcttgataatgaatcaatgctggatgaatacaaagttcagcacattattggacgggatcgcaatgcaaaatcaccgcgctcggaggcagcgttcagcgtggccgtgagactgcattgggcaaaaagcgaaatccaacaactccagcgtctcatgctctcagccctgtcaaactcaaaaaccggaaaatcgatcgatggcctcaccgagccacgtctccgccttcctccagaccacgcagctgaaacaccgaatacgaggcccgcgaccaatgtaccttaccgaagtgagtattagtgtgggccatagtaactgggtagtagtagttgttcatagcatccacagtgtttatgtaggggatgggaagtaaggtggggcccgctttgaaaaaaaacgcaagttcgctatagacattggcttgatgtgtcagaaggtgcttatacctggtggtagcactactatccggtattagttcttcaccacctccatagtggttattacccgataataaggtaatatttaatgcttactactccctccatttaacaatataagttattttagcattttccacatttatattgaagttaatgaatctagacatatatacctatctagattcattaacatcaatatgaatgtgagaaatgctagaatgaattatattgtgaaacagaggaagtacctgctattttgctacactgtagatgccctggggatcagagaataaaactccgaaccccctgcaggcagcaagagaacctactcagcacaggtcacaggtgatcgttctgtgtgttgcgctgcgcccaactatcggctcgccttcgccgccgtggcgtctctgtagactatcatcccttgctctcgcaggctgcagcacaagttctttagtggaaatggacaattctgggctaataatgcagttatgtgtttggttgacttgtcgatttcttgataatagataggatcttgcttccgaatcgagctcttagtcatcgtcttgaaggcgtcgatcgtcgacggacaagaagtttgtcaagttagaattcctgcctttcaaatttcgaaggagattagtcattttggtatgaattgctgaggtgcgtcctcttagtaaaactgtaatggcatggacgtacaaataacagaaaccaccattgagttttgatgcaaagttaagaagaaaatcgtaacaaattttgggacttatactcgttattgttgcccacaattgacctatgaggcaagtaggaacagatatgtcgcgctctgaacaagtagcagaaagacagaacagttaaaaaagatctatcttttcgtggcgcaatttatatatatatagttacaaacttctctatgtccaatcatctggtaagaacgggtgccatcctagcagaaatccagactcctgttagtgcactcgacgaccgattcgctagctggctgaagtcttcgttcttctcagagacatgtacgctagaaccctgtagccgatgatcatcgcgaccagagctacaacttctgtcacgccgttgtcaagaggtatggcattgatcagaatgtccgggacaggatgatattgcaccttcagcagtagcctgtacgtgtggtagttgaatgacaggtagcggagccaggatatgaatggtggaactctctgcatatcatgatggagaagagggcaatgcgtaagacggagtaaagacttgttcattcagtatgttcttcagcattgcatcagtaacacagggaagtgcttgctctcacctttacaaagaaccctcctgctagcatgaatgtcatgactgtaactgaagctagagttgttgccttcttgatatccaagaggctagctccaattgccaatcctaatccctgcatgattacttttttcttgagtaacagatttctaatcactgctaatatccttttgaaatatctaagatatatgatggatcaaccaaaatgttccctaacttatgaataaacacaggtgatgactacaacttcatgggaaaattccttggattttgttcccatctcaccatctatttagatagttttgatgttcatcatacattctttttctcatgtaattggtgtgtatatagacagtacaagttcaactaacagaataaacttttagaaaaataaaaaatgctataattcatttcttatataggtttcctcctttagaaaagattaagggccagtttggttcatggcctatgttgggcttaccaatttatgggtcaagtaaacagtacaaacaaaagtttggtttggatccaaatatcggccagcctgaggagaaagaatcggccacgccgtcgacaggagccgaatcgcgggcgtgaaatttgaactcccgcgcgcgcggccacacatcgaccatatgtattctacgctgcacacaaaaatataagaagataagctctagagttcccagttcccatttgtcctctgttttttgacgcccttcatcttctccatccaataaccacatctcctccaaatcttgaccaagaaaacccaagaagatcctcatctggtcatacacactcatcttctaaaccaaccgaaacaaataatagctcaaatggggtagagatttggggctacatctaggagggatgggggcgagttgaaacttgaaaggggagtgactgctcaggagaagaacaggacgagtacgtgtgttgtgattccagcagtagctgtactgactccggcgtgctcagttgctgtgaaaaacaccatcgattgctacaggaaaaggtaatcaactgatgctccatccgtacaatgcttgttcatttgtgctactaatgtagttatttatagtctgccattaccatcttaactagtagcaataaaaaacagtaggttgaataaatcttactgtcttagtgttgatttctttgctcaaaaaaatatacaggtgtccatttacacctcagtaatgttatttttagtcgacaaatctacatgttggctgggcacaatatttattcagtaaattaatttgtttttcactgaaccgacacatttccttaagtaatttgaagctgcgtatgtaatctcatccagatggagaacactcgacaacaatatatgcatcacttcttgctaacgaagaaggctgtagtggtactttgtcttttgatcatcatatggttgaggaacaaatatcgtaggaggagtagtcgcaaaggggtaaaatatgggcccctagtccacagggatgtatggagaacaagtgaactaatcaggctgatcaacatttcagataggacgtgcactcaacaattaagaatgtcccgtgcagtattctacaagctttgtgctcgtcttaggaacaagggactactagttgacacctttcatgtttcagtagaggagcaagtggcaatgtttctgaaaaaggttggacaacaccattctgtttcatgtgttggattctcattttggcgatccggtgagactgtgagtaggtattttcgtattgtgctgcgagccatgtgcgagatagctcgagaactcatttacatcaggtctaccaatacacatagtaagatcaccagcaagaaaaacaaattttatccatatttcaaggtaattctaaacaccaagccataacaatgcatattacaatacattttgtttattttaactctaatgtttcactttgatatgtacataggactgtataggagcactagatggtacacacatcagggcaagtgtgccagccaagaaggtggataggtttagaggccgcaaaccataccccacacagaatgtattagctgctgttgactttgaccttaggttcatatatatcctagcaggttgggaggggtcagctcatgattcccttgtgttgcaagatgcactgtctcgaccaaatggccttaaaatacttgaaggtaattaaacatttcaaagaattcatgattagccttgctataagttgacgttaggctctatgacatgtttgtagggaagttctttttggctgatgctgggtatgctgctaggccgggtatattgccgtcttatcgtcgtgttcggtaccacctaaaagagttccgtggccctcaagggccacatggacctcaaggcccaaaatgccctaaagagcttttcaactatcgtcattcttcacttcggactacgattgaacgagcttttggtgctttgaagaatcgtttcaagattcttatgaataagccattcataccactgaaagcccaatcaatggtggttattgcttgttgtgctcttcataattggatacttgagaatgggtctgatgaatttgtcaacgatgagaagacgtggtacgctcgcctaccaaggagcagcaaccgtgtctctgaccaaggggatgatgtacgtgagtgggcagccaagcgtgataacatcgctcagcagatgtggaatgacagacacaatgcggatgttcatgatgttttgactagtgaatgaattactagtcccatggactattaatgatattatattttgtaatagttgtgaggattgtatgttgtattaatactattgtatcagacattatcatattaatatatttatgtttcttccaatcatcttattacttcattaactgactatcatctgttcatatgcaatattaacttataattttttcactgtatgtagtatgggaaagcgtacagaaggtactagcgaggaaggtggctctcgtgagaagtatatcagttggagtgatgatgctactcagttcatgcttgagtggtatatagagctccgcaaagacaaacctagtaccttcaagtggaagaaacaacaccaccagcaatgtgctatagctttaaaagacaagtttgggattagagtcaccaaaagccaagtccacaggcacttaaggctatgcaaggaaaaatggagttggatttgtgtagctttagggaaaagtggctatggttttgatgcagcatcatgcaaatttaacattgacccatctgagaaggattcaaacaaacttggtgtaagctatattattgtgcaataatttctgagttataattcatacaagaatgtgctaaatttgtttatttctaactatgtttcttctcatggcagacaactaaatataactacttgactaagcctatcaaattctttcacctctttgaagaattatttgttggttgttcaaaagctgatggttcactagcaattgaccagttcaatgcaaatggtagcagtgatagtgatggcagtggtagcatcaaggagttggaagaatacatatttgcattggaagatggtggccatgattctgacacgatagctcgcaatagtcctactactgatggc

SEQ ID NO: 21052 - DNA, 9327 bp, Oryza sativa
  unsure (1)..(9327): unsure at all n locations
catgctaagaaagaaatgtgcggcagttgctttgaggcctgccatgaagtagacaatcaccataaatatgactggaaggaaaaggtccagtggcagatcacttgtcgttctggccaagaagtatgcactgagcttgtacatgtcagctgcacgctccttgttcaacattgccctttcttgtgggaatgtgaagatggcagtaaacacaggaaagaaaccccaaaacacagctatgaaaaacagtaagccggcctgcatacgcaagataaaattgtgttatgatactaatcttcctgcatacccgagctgacatatcattaataagctctctgagtaaccaactccgccatttcacatgaatcacattttctttggcgtaaaatgaatcgcatgattattgctatctatgtacctgatcttgtagaccttttggtgtcgagggatcagagtgccaccatagtagacctaagataactgatgttgctatgacctgggtgattctcatccagctcaaataatcatgtcgccgttctttgatccctctacagaagaggatggaatattgctgccaccagctagtgccccattctcgctttgatgatgttatagttgtcttcatatcgtcactgattggaagtggatctagaagctgcttcttcgccttgtatgccactcgattctcataggcgtctacaagatactgcatgaaatcacatataaattattcagacatctaaaccaaccctcaactcataacaccagcacattgctttcatgtcgtcacctcatgaacatcttgtgctgatggcttgtagtcattcttggtattagtttgcaggttttgattttccatgtgcaccttgtcatctaactcggaaggaacagaaacatcagtagtgtttccgttggcgagatccagtagaaattctgctgggttcattgcgatgagcggggtgcacccaatggactgaaagtagggcatggcttcagatgccttcccaaaatagagcaaacttcctcttcccaggaggataagcttgtcaaacttatgaaataatctgctagatggttgatggattgttgttattactgtcttcccatcctgcaacatgtcaaaaggttaaagatgaattgaactagttgccagctaatgtgtaatactctcatgtcacctcagctatatcatgtagaagttgaattatcctgagagctgtagttgaatccaatccagatgttggttcatcgagaaagagtaaagatggatttattatgatctcatttccaatgcaaactcttttcctttcaccccctgaaaccccacggacgaaagatccaccaatcatcgtgtcctggcaccttcaaacatcatcagataattaattaagctaatttctagaataggtgcatgctaccatacaggaagtggagcgtttttcaaactacctttcaaggccaagttcatatatgatgtctattgttcgttcttccttttcttgcctcgtcattgttcttgggagacgaagcagtgctgcataagtcaatgtctcctttacagtaagatgagtaaaaagaacatcatcttgagtcacaaatccaatcctgaaaaacgagtataaaaccaatcattcactatactcttggacaaactttgaattagtttgccatacaggctcaagctcaactttggtgctctgacgatccaaaccattggtacaagcagatgttttgcatataaaaccttgtagaatgttgagggtagttagtctagtcagacagtgcgaaaattgctaacaataaggaaccaggatatctctcagttcgaattgtttgccgaattggaagcggaaaaaggagaatactacatggtttttaattggcgattctactaaagtggtgttatgtttgagtgtctaaccaacttagtagctaggttacaccaacacaatttaaaggactaagcagaagaacaggtggaggtagaggcagaagcagaggcaatcctggtgacaaagacaagcatccaaaggaattgcgggacagagaccctggtgcagtggtgttcaagacgaagtggacctctaaacaccggagacctgtaagctcagactactgtaggcctcaggtgatgcaagtgttcactgacgtgaaacgtgtgcttactaatactacctccagcatcggtcaggagatacatcgaacagcttatcggcaggaagggcatgactggaacctcacctcaccagagcacgctacgacatggcgcagacatgcgatcgagaacaacgggcaggcgactccctgaacgtcccgaccgtgctccgccgcacaagccgccggagtttccatgagacgacgacgacgacgaggcgtcgccgcgcggcgcgcccaagcagacgagaccgtgagagacacaggtgaccaggcgacagccatagccgcgggcaagagccgaccaaaggcatcacggcccatgcgccgggacgcacgattgggccacccaattcggcccaaaaagaacatgtcggctgctcggcgtcggcaaggcccaattctggcgccgcccattagacagaataataatgacaggtgcgcggtacgtgccagaatcggcacgtcagatgtgcagttcccctgcggccaaggcagagggaagctggaagaagaagacagtagacagtacaactgtagcagcgatgaacaggtagccagatttagcgagataaccgtgagccttgccttgctaatctctcctttattatagccagccacacagcctatgcatgcagtatggtactatgctgtgctctgtagctgcaagcaacagctgatcgatctcatctcattcttatcactttcgttccccagctagtgacccatcgaccaatgagaaatttacaattagtggctccatcagttgggctaataacccaaagaaaaaaaccaaaatttaaattttaaaaattaattttgaagttaattttaagatattttcaacatattttctttttcagcattagcttttaaatcactaagaatatatataaaaaaattatctacaaattaacttttattttctaataaaccgttttaacttattgggaatatgagcaaacggtgaggttttagggctcgcaaataactaattgtaaataatttagttaattgattaattaataatcctggccccggaggaattaattggtgatgccacatcgtgtacgaacaagtgcatgctacggagtaactaattaataattaattaagacgctgcatgcatctattgcacgcgatcagagaggtcagaggatgaaccttcctttgtgttgtgttacctgcggttgagggacttgcagtatggctcgtcgttgtaggagacgcagccttcgacgtcgccggggccggcgaccctcccgccgaggatgctgagcagcgtcgtcttgccgctccccgacgggcccatcagcgccagcacctcgccgggcgccgccgacccggatatcccgctcaggatctccctcggcgtacccttcaccgccaccttgtacttcacctccgcaaactgcacgaacgaaacgagtctcatctcatgtagcattagctcactgaacctctcgcatgccggcggcgtacgtccatggagcttgggataatcgatgcgtttggtcgatttaccttgagatatatcggcaacgtcggctcggtcatcagcttcttgcgcggcgtcccggcctcgatgtccatcgctgcatacgcacagcggcacagagaatgagaatatatatattagggaagtgatttcatctctcaaggagatcggatatccctcgtttcgtctatattatctaaatatctataaaaaaattaaaaaaattagtaacataaattaatataaaatatatcactccacgaaaatacaaatttaaattcaatttttataagttgtaataaaaatgacaaatataactacgaaaggtacgataaccatatgtgcatgcagttaggatcagtaggagtgattggatgcatactgttgtcgtcgtcgctgaagggatggagctcggcggaggacatggtgtcctggggaggaggggtgaagccggtgaaggtgaaggagaagccgaggctggcgctggaggcgcggctgagggcggcgccgctggagacgaggtcctccatttcgagcttcagctgcgcgctgcgggacttgcggatgtggctgttgttgttgttgctgctgctgtagccgtggctgttcccaccggcgccggcgccgccggacgccgagcgcttcccgaagctggacttgcgcgacaggctcgtcgtcgtcgtcacgtcggccgtgctcagcaccgtctccgccgacgccgtcctgctcagcgactgcgccgacgacggcggcggcggcggcgccagctggtccgacttggtccgctcaatcatcccccctcccgtgtccatcatcggcttctccattatcgactccatgaacgaacacgaacaaactacctagctaacaccgtcacgttcctagcaagcacatttagagcagtagcttttacacgagacgagccgttatatacacagacacagagtgatgggaaggcaacacacgcagctaaggcatttggcaagcgagcgatggaggtcacgcgtgtgaggtggattgtggcgagggcgacgtgggggggaggcagcggaggggcagggggcgcgccagcgaagcgcgatgcgggacgcggggcattaatggagcgggaaagcgcgggtgtggctgggcgcgctcaggcagccagcttccacacatgccggcctcacgacgacgtatcgcgcagggcacccgcgcgagcccccgcctgcggctagcttagcccgcgacagggacgtccccggccacctcgccttcctcgctctctcgctcgcggaggcctcaggcgcgcgcgcgtcccttgcagatcgatccagcgcgcgtgcgtgtgcgttcggtttaggcgtacgtgcgcgcgggcggcagcggcggcaccgatccttttaagtcagcttattggcttatataatttataagccggtggatttaatgtcctaagtttagtggtttagttatacatctaccttacataagccaaaaaaaacttctccaacctagcttttggcttaatagtgttagagtggcttatggcttccaaaaagccaaacggaaaagctgcttgtttgtttaggtttagacttttcgacttataagttggcttataagcctaaacaaagagggccttagcccctccgcacaaattgaggcgctgggtgtgaaacacaaaatgatgacctatttagcaaatgctaacgtaaaataagtgtttagttcacgccaaaattgaaagtttggttgaaattggaacgatgtgacagaaaagttgaaagtttatgtgtgtaggaaagttttaatgtgatggaaaagtgaaaaaaaaagtttggaactaaactcgtcctaagtaaagttcctttaggcgatacatccatatctttacttgatgccatattatttactccatccgtcccaaaataagcacaactatgagtttccgtgtccaactttgatcgttcatcttaattaatttttttttaaaaaaaaataaaaaacataatttacacataaagtactattcatgttttataatcttacaacaacaaaaatactaataaaaaaattaaataagatgtacgatcaaaattggatactgaaactaatggctgtacttattttggaactgggaagtacaattcattgcagggttgctctatctcccgatcgatgctttaatttttctcgatccaaatcactgtcggactgccggtggtcgtttatccacattccatgttagcataaccacgatcaagcatggtcggatggtcctgttcatcggtttacctatgccttctatcaaacaagcagtaattttgcgcgaccaataacagctaactcatcaccacctaattaaaaacagtatagtggccatatgcctagataggatctaggaagaagacttgtgtgcgtcatgatgtagtgatttaatttttcttactaatgttgtgtttagttccacgttaaaattggaagtttgactaaaattagaagaaaaaatattgaaaatttatgtatgtagaaaaaatttgatgtgatggaaaagttgaaagtttgaagaaatagttaggaactaaataaggtctaagcaagatcttcaatatttggaacgcacattcacatcatgatcatgaactatctttgaggtggccattattgtttccaaacacttgtgagggctgagaaaaacaagcatctaattaaattaatgaaggataaagagattttttattaaaataataatatgaacgcgaaaacatgcttagaatgtactaacggcttaggagtgaaatataaaattttcgagccctaggcaatgtacagcccctatatacgatcttctagccataacacaggaaaattcggagcaggcaaaagtcgtcgatcgcagctgcgcaggagtcaggatggacatgcttggcatgatgcctctttctgttttccgtgctcacactgtcgtcacacagtgcaacgattaccatatatcattcgtgaagagaaacacgagtacacgagcggtcgagcatcctaatctcctttttaattttttttttatttttgaaaacaagcatcctaatcttgacgaggatgaaagtatcagcaacggccccaatgctattgttgacaagagatgtgatgtggctgtggnnnnnnnnnnnnnnnnnnnnctgcatgtagatgtactccactccagtaggcagtacgcctgcacagtcttttcctgactgttacggacgcggaaatgtttgtccggagaggagaatggtctctgctaaccggaagaccggaaccaccgaccaatcgggaaacggcgtggcgttgccagtactgattggtactactgggtagtatctttgacctcttggttaatgcactctaatgctccatttattacgaaatattgacgagatatttaaaaaaaacatactctcttcattctaaaatataactacacctataattatttcaaaatataacaatttatataccaacattttcttttcaaccaatcacaacccttcactattaatttttctcgccaaccaccacttcttaatcaataataatatatttatatttaattttatctatttttttaaataattatgtgcaactctaaaacttttatattctaacggatatagtaattaacgaaagttagctcgaaccttaagcgataaacatgcagccttcccattttatccgtgaggatttctttccggttcattcttgtttcctacccgcagtttagattggccttttatctcctgttacggttatttttttgggatacatggcgtcataattctagcaatccccttcctttttatcctcgtgttgcctgcgcgttaactttcatgaaatttgtttccaatttaaatttgtagcctgagattgcaatcttacaacataacaatttttaaaattcacattgcatcttttgaaatttatcgtgtaaatatggaacatataatgtcaaatacatattaaaaaattaaatattttttatgaaaaatatgacactaaacatattttttttttattttccaattggcgagcccgctcgtgtatttattactttgtcttgttcttgcatgctaccgcaatgcaatgcttgctttctccgtgtgttcttgcatgtataaacagttcggtctgtctatgcctattgtcaatggttaatatggatatactgtttatctttcatttcaatttaaatacatgcaacgggcaggtatgtagagttctagcgtgaggtcaatcacacgtgggtgcggtgcgtctcctcctcgcttcttagggcacctacatgggtttcaaacgaattaagaaatataagtttgaaaaactattttaaaaaactaaccaaaggaaaacaaattctaatcaaagtatttgtgtgtataatattcgtgcgtataaaccttttatatataaatgtatacattgaaatatataaatgtatatatatacattgaaactttatagcacatataaactttgtatgcaaaaacttttaatatagcaacattatgtataaaacatttgatccaaatctgaatcaagcaaataaactttcaatgtataaaattttttatatacaaaaggaaaaaaagtgtggtgtgaaaaaggaaggaggtggtgcacaggtgcatgatcatccacgcgaaagccgtttcgggtagacattaaccaaaagcgagtgaacagtgagtttttatatcactttgagtacagctttttcagaaaaaaaaactattaggagatgcctaactttgaattaaggtgtggccaaaatacccacgacgaaacactacatgcctttaccttcaaattgatattgccatagtcaagcattacatataggaaaaggaaataataaaattcaacaggttacattcgtataagtgcacggaagaaatagtaggttctttctttcgccacgtataagctttttcacgaaacatatcgtttagtagtttaaaaaatatgctcgcaataagttatcagcaagtagctgaaaagaattgaacctaagagttgtttctgtacgcaaatgattaggtcatacataccagctccaagaagtcaagaagaggcataggcgaaggacacacaagatattttggagcaggcaaagtcgcatgaattatctgaaaaagcaaaatcggacaacagctgcgaacacagctcttatctgttttctctactccacacggtgcaaacaattactgataactcgtgcaaaatcatcaacacatgcatatcctaattatcttgactaggaccatcatctctaaaaatataagaccccggccccgtgcgaaatgtaaaataggtctctagctagattcatgccaccaaacatactttcactgtttcctcaagcctcatcgaatcttgcatgtcttctgggcttagcgagattaaaaaaaaagaaaataaagcaagattgaagtgaaaccttgaattgagtaagacaactgatattgaattgaggagggaaaaaaatcaccagtttgtgttctgcattcactagacgaaccgaagaaagagtgggctaaattgtgctttctattggttaacatatgggctattttttttttctctctgaagcatggtacttaagcaagtgcattagaattcagggcctcaatttgtagggtgtcctatacagctggggctgcagg

SEQ ID NO: 21053 - DNA, 2892 bp, Oryza sativa
tggacatgtggatgcagaatctgctcgctgccgccctgttcgtgccatagcgcaacccagctccgctcttgggccggaacgggattccggcctacgtgatccccgttactgttgggccggaacggcattacggcatccgtgcgggccctgttatggttgggccgtaccggggattccgatctccgtgcggccccgggaggggggcgtggtggaggacgaacgcgacggtggcaaaatcggcgacggcgacggcggcggcggcggcgatggcgaaggggagggacgcgcggtgggagtagatactgtagtcgtgcgtgctccggaccagcagcaggtagcggcgcggggaaggaagctactggtgggggacaacccagatccctcgcccgcgactcttctactcgcgctcgcacgccctcgtcggccgcgccgccgccgcggtgatggagtcgccgccggagtcctcctcctcctccccggtcctcctcaacatcggttcgctccccttctccctttcgcaaaaactcgctccccatccccaccgctcgcgtgaatttagaggctgatggtgatggtggtggctatggcgcagggggcaagaggtacgcgaccaccgtcgagacgctcacgcagcgggagcccagctccatgctcgccgccatgttcagcgggaggcacacgctcccccggcacccggacacggtacgccgcgtactcaccagtggagctctcttctcgggagctgtagcctcagaggatgaatggtgggtgcagggcatggtgttcgtggacagggacgggaagcacttcaggcatgtcctcaactggctcagggacggcgccgtcccagacatgtcggagtctgagtaccagcagctcctgcgagaagcggagtactaccagttgctcgtaattggaattctcgatcgtttcttcgattcatcaggttgcagcttcccaattaaccagccgttgtgaaaacatgatggtttgttttccagggcttggctgattgcataaatgatagattgggttggaaaaatgatgagaatttctcggaggccgaattgacacgcaaagatgtgatcaagtgcatccaagctccgagagtcagatttcgtggtgtaaatctatctggccttgatctatccaaacttgtaaggtctttattgttgttctctattggagttgctcattttttgttatggttattaccactccattctagttgctcttagcaactctgatttcgtgtgtgttcaacagaaatcaataaagcattttattttttttctttagtttcttgtaattttgtgacttttacggtctacaggatttatcagaggtggacttcagctatgcatgcataaagaatgccaatttttcctctgcttatcttcgtaaagcaaagttcagggtatgccattcacacctaagttcttcgttgtttaactgcttttgatgaagtagtagcccttaggaactatgctagttatcataatattttaaggcattttagttctgtcacaaaaaaatatctaagtctttgttttttgtatgactgtcaaatgttgtatcagtaataccttaccttgtatgttcatgacagctgacagaagctacttgttcttcattccaaagtgcaaatttacatgagtaagatggtccaaccagtttcttttagcttatagataggctctaagatgaaacacggtctctccttttttacttttgtgttttttttttgtgttggatgcataagcaagcagctaaccatctatttcctcctttttgtgttatttttgtttcgctgtgttattgtaattgcttgatttggaataacaggtgtgagcttattggagcaaatcttgaaggatctgttctagataaagcaaaccttcaaagtgcaaacctacagggtatgtaatccctttctttacctgtcttccgttttatgttatatgtttccaaaaaatactattatgctcaggattatcctgtttcttcattttcttggcttttgacatccttttcaccagggaagatcatcgtccctgtagtattagacaatgtagctatgcctattttgctttcactctctcctattcagggtgtgcttatattcttgtaaaaactaagtaggaaatgattgagttgctaggcttattttgcagatgcatgcttaaagcaatgttgcttcattgaaacggatcttcgttctgctcatctacaggtttgaaagtttattgtacatggtgtgtttcatgaatgttcccagattctcgcgctgctattctgctaacatattgcattcctggtcagtatacaagaaaaagtgaaaatcatgatgaacattagcataaagcaaagcatttctgtttttttttagaagttagttttctgctgctagaggtgatcgaatatctagtttccatccttgcaatattttgtatcatccaaacttccaaagtttggctgcaaaattttgtccttgcccaaagtattatctgcaacacatagacatatattttgtccgtacaggcttgtatcgtctcttcctgaacatttgaatataaggcataaaggctccctattccaaatggttttcagtaacttaaaatacgttgatatttgggttcttattactcatttcctcagtgtcttattgtcagtccaactggattttcagggtgctaatcttatgggcgccaacttgagtggagctaatcttgaaggggccaatctcaaggtaacaaaaatggccccattcaacctgcactttcatcctgcctgtcatatgtaacttaaggaaagctacttgagggggttaaccacagagctcttacacaaagacagaaaaaatgattctaatgtatccaactcttcttttac

SEQ ID NO: 21054 - DNA, 3601 bp, Oryza sativa
caaaatttcttcaaaaaagaggggaggtcatgccaaaatttatagtgaatttattttggtgattacatacaaatcggaggtgcctaaaaggtttgcaacttcatcctccaatgttttttttgtcatattacatttggagctatgttttgcacacttttttgtctccaaaatttagttgtcagttgatgagagagaaaatttgtgtggggaagaaagaatatatagaaatttagttgatttgctaaagaaggttttataaaatagttgagaaggaaaatatagtgaaagttaatcttaaataatagaaaacaaactaaaatgaaaattaaaagaagtaaaacacattaatattagtttaaaactttagaaatagtaaataagaattatttggtgtaatattttatgatttttgtataaataaagatatgtcattattgtatgactcttgaaagagtttgtaattatcttataattattgtatgactgtcattattgtaagaataattatttgtgtacgattttttttcatgtcatgtagatggatcggcaatggatgtacgctgaccggcggtccaaagagtttattgacggcgtgcattattttttgagagtggccgaagctaacaggcaaaagggttttatttgttgtccatgcaataagtgtaagaatcagaaggagtattctgcatccaggactattcatttccacttgtttgagtcggggttcatgccaagctataattgttagacatcccacggagagtaaggtgttgaaatggaagaagatgaagtggaagatgacaatattccggactttgctcaatacgttggatttgaaggaaatcaaacgggcgaggaggaaagggatgctgatggtaataacgttgcggataatcttggtcagatgttgcaggacgccaaggaggactgcgaaagtgaaaagggggcccataaattggacaagatgttagaggaccacagaacgtcgttgtacccaggttgcgagtaggggcacaaaaagttggataccactctggagttcttgcaatggaaggcaaaaaatggggttagtgaaaaggcatttggcgatttattgaaactcgtcaagaacattcttccggagggaaacaaattgcccgagacaacgtacgaggctaagaagatagtctgccctctaggactggaagttcagaagattcacgcatgtccgaatgattgtatcctatatcgcagtgaggagtacgagaaactagaagcttgccctgtttgcaaagcactacaatacaagattagacgagacaatctaggagaagttgacgggcagctaacaaagaagagaattcctgctaaggtgatgtggtatttccctataataccacggctaaggcatttgttcaagaacaaggggaatgctagaatgatgcgatggcacgctgaagagcgtcaacaggacggaatgctgagacaccctgccgatggttcgcagtggcgaaacatcgacagaaaatttaaagactttggaaaggacacacgaaacatacggtttggtttgagtacggatggcatgaatccttttggagagatgagcagcggccatagcacttggtccgttacgatgtgtatctacaacctcccccctggctatgcatgaagaggaagtacataatgatgccgattattattcaaggccccaagcaacctggtaacgacatcgatgtgtacctaagaccactggtcgagatgttaactgttgtggaagaaggaaggtgtccccgtgtgggacgaggacaaacagaggaggtcatcgaattttgcgtagaatttattgaagaccttcgcccaatcggggtacctgaatcacgccatgaagggagactacggggaaagggaactctcggaaggaaagcaataatgacggtagacaacaatttattccgtaaagcccatttcacggttctgcaacaatcttcattggtagctccttacattgagaagcacttgctctagttcccgccaggaacatcggtaagtccgatgcatggattatacggcatcacattgatacttttcccgtgtggctacgacaacatctcatgggtaacgagtcgatcaaccaacaacttgccttcctggcgaggggatcgtctgggtcgatcgcgacattccagggatatgagatcaatgggtacacattctacacgagagcccaagacataaagagcacgaaccaaaatagcgctgttcgtgtcgatgccatgggacacgatggaacaactggcacgtattacggtgccatcgaggacatatgggaacttgactatggtcctctcaaggtccctctgttccggtgccaatgggttaggttgactggtgaaggcgtaatgattgatgacagtgggatgacaacggttgaccttaacaaggttggatactcagacgaaccttttgtccttgctaatgatgtaacgcaagtctttcacgtgaaggacatgtctagcaaaggaaagaagggcagagggcctgacgagcctaagcgtcacgtggttctcccaggcaaaagaaaaatcgtcggagttgaggacaagactgagaggattacgatcagttggatgggcaaccccctttcacggtgacgattgaccctagcatcctcctatcaaatgaagataccccttactcacgtagcgatcacaaggagggaacaatagtgaggagaaagtacgtgcggtcaaccgtcaccgccgatgtattgccgtaattattgtgtacacgatgtaaactattttggatgtattgattatccatataaatcaattgttgtatggcatatgttaattacgcacgattattagaggttttaacaattttaaatcatgtatatgctgctagttatatgcgataattacaatttttaaaagttttaaatcacgcaggtggcattttcatatgttaattagagtttttaacaattaattactatcattcatatgctaattatatatgactattcgaatttttaaaaattttaaatcatgcatgtggcatttacatatgttaattagagtttttaacaattaatttaatatcattcatatgctaattatatatgattattacaatttttattaattttaaatcatgcatggcgtatgtatatacatatgttaattagagtttttaacaatttaatatcattcatatgctaagtatatatgattattagaatttttattaattttaaatcttatatttgtttattacgttttatccacttaatttattacatacaacaataatttttcgaagtaattatcattaatttttctacattaaataattttaatgcattattttctattttagaaacacatatgtaatggaaattaatattcagtgcgcttattagtagtcccagttcttaaccctaaccgggtttaaaaagaatttcgaaatagcgggaaaatatctttagtcccgattgatgagaacaaccgggagtaaagatatctttactcctggttgttctcatcaaccgggggactaaagatctaggggtatatatattcccgatgcgtgacctcgtcttctccaccaacactta

SEQ ID NO: 21055 - DNA, 30550 bp, Oryza sativa
ggaatggttggcctgggttggcttgggacgagctgggacccagggtcgggttgccagttcggtctaaatcatagaggccttgggttaaggcaggttcgtaagggttcccggccttgattaataatattgtgtagctctaggatcgtctttataaatggctttgagcaactaagtgacttttaaatgcggttttctgcaaaacttaaccccgatattattatccccttgtactcccttgcattaatcatgcatctgccggtgtgacttgctgagtactgtggttgtactcattcttgctcaatctttcccccccttcagttagagaagctttggagaagaagtcttaggtggagtcctggcttataccccagttgagcgcctgtgaagatggagccgtaggcccgctagtccgctgctgtttatttttgtttgtcaggtcttatgtgcctttgtaataatgtaaatattattgatataataaagatgtgtcttttatatcatgtttgtgtggtgtaccccggcttttcctgggacggggattaatacactagcgttcgggaaaaggcaattttcccggtcgcgacaagctggtatcagagccatctcgactgtaggataagccaaatggataaaacctaaggacatattttataaatgaaactatttgcgaaagtccctttttcctcctttcccctgtgctatttgcaaaatgtttattctcttttcttcctccttcggattttccactagtactagatggttagttttgcaaagaagaagatgtcgtcaattgtctgccgaagctccagaaggctgcaggatccgctagtgaagtgagggaagcagtgaagccagctgtgaagccggagtgaagatcttggagaacccgtcgcagaacctaagccaccctctagggtagagtcgttagtcgtgtgctcctttgcttgtgtgtgtagcgcgtggtttgcatcggtgggttgtgatgtaaccatgctaggttgtttgcttaatcaacttgcagaataagtgaaacaaacaacacatcaacaagaagagttagttcctttaaggtcctatctctagttctggtctattctttcctggcttgtttcctctctcacctcaatccctgtaacagatgtttaacagagaaaaaggaaagaatgtcagcgggtatgcctcaagtaactcaagttttcaactcaatccaccactggcctcaagagagttaaccagggcacacccttggtccattccgagcatgctgcttggttcacagctaccattggttggaagtcaagaccaaaatcagtatgtgtttgatcgagcatttgccacccaggtcgatgagcttccaatgccagaagaggatgtccccttttgtcacgattgtagagagcaaggacactatgccctgaattgtccatgggtatatgccaaagaagctccttcctttggtttagcagggcaggcatcgctaaaccagcctcctcgcaccaagtcaagcttgcagcctagtgtgcaaagtagagagcccaatggagagaatccattgaatcccgagaattgctttcctcctagcctttcgtaccacgtggggtcacgtactaagcaagccaaaggcaagaagagtaagaatcagaagagaaaagcaccgatgcgaactgaagaagaagtacgtaagatgactattaccagcaccgaatggcctccagcagggataactattcctagacgtcaaagaggaaataccttccgaggtgcatgacagttgacccagcacctcctaagccatggtggcagagtatctgatagtgaagggtcagatcaagtctcctcggatgatgaagatgagtctccccgacatctcggcgaggaagaaatggaatcaaaggcatgcacccgttgtggagaaattggacacgttgctagcatgtgtctcacactctgccctcattgtgaggaagaccatccaccaggtgaatgtcccacccgcaaggtgacatgttttctgtgcgaaggtacaaaccatgtgcccaaggattgccaactcagtgtgttgttgaccaagaccgcagaaatccaacgaacaaccctacggttgtctcatcagctagtcagctccaatagcaacatcgacaatatcatccacaacaccaatgctcctcctgctccacctgactctgcaataaatcatagcaataataccttcagcaccaaccattctctgcaccgacagcctcagcaaagaattgttgtcgatggaagaagttgtgtctctccccgacctactccaggccgagcaaagggcaatcaatctcaggagggcgataccaagcagaataccgttctctgcttcaaatagcaatcagaaggaagcttctcctgtgaatgatagcaatatgcagtcctaacacatcatcacagaaccaatcaaggatgcagtcactagaacaatgccagctatatctctccagaatcaaaatgagcagccacgtttgtggtttttagttcgctacttatcattgtgtaatcgggagtttgcagcaatcatgtaataaataaatacattcatgattataaacaatgagtttgttatgtttatggatgattcatgttgaggatacaatgtaccgatgataagcaccttccctttttgtttaaggcagtgccttgtattcgtgtaataagggagaaatgtgtaatacagacaagttttaagaggattctattggaagatgcggatatgtgatcatgtgtataattgtttactgataaaggagacctagggtctcatttcagaggaatcatattctaacctcgagttaataaccaacctgttgatggaaaagaaaaccaattaaactgtgttgggttaaaaagccaatgagacagtagttggggataggagtttggatacgccttttacagatcaagataaggattgttggatgaaacccataagggtacccgccatgcctctacattgataagttcgggtatacctacaaacagttaagaagatccaggggacatcaatatttgagaacatagtagtcgatggttggtaattagtctatcaggtatcagaaaagggtcaaaggtgatatggcagaagaacaatttggatgctccccatctcgaggaagcactaaagaggatcatcggcaattaaaccctagtggcatagatacagatagcaagcaatgtatttccctgaaggtagtcagtgcagctttttgacgaaccacatcaaggtttcactgaaaggcagcaagccaaaggacttcatcgtccccagaagcgtccgcaatccacattaaagagtaccacctgttagagataagccgaaagaagattgataaaagagattggcaaagatgttctctagcaggaaagaagtaggccgaaaggtgattgataaaggataaacagaaacatgctctgcatcgctcaaggaagacccctgatagtaattgccccgcaacagtcacctggtcattgaggcatcatgaagtaagcaagacgacctaggtaaaagtgtttctttgaaggcaaggaatgaaatctttaactcggtatcagatgctacacggagtgaaaagtgcaagcaccggttaccaggcaatgccatgtcttgggagatgatccaatgggaaagagcacatcaaggttaaaggtgtaaaggaatacgttgaatgctaactaaggacaacctgaagataatagtgggaaataaactgaatgtaaagaaagtgaatccgagctgcttgtttgtgggagctattcccagttatgaaccaagtgatatgttcgaagatagtctacagaggtcagacaacgaagcttcagatttggcaggataacgatcaaacaataagaaatccagcaataaagccatttgggaagacgtcaaagtatgtcaagtgggataagttggttctcttgggaagcataattcaaaggcaacgttatcgacccttgcatcaaatagcagaagtagctattacccggagaccgggaaagctaatatgaggcagctggtggcaagttagaagtgaatgacaagcatgatattcttatgatgacaaacatggtatcctagtaatgacaagctagtgttgacgcatgacatgaagtggtaacttccatgaggttgacgccaaaaatatggactatgcgaagttctggaactgaagcaccatcttcaagtgccgcaacccagtcgaagtcagctaaaggttcaaccagggacaagtcgggtgaagagaagattccatctgcaacaggagatcgagccaagcagtccagagtggagaagttttgttaggcaagtttgttatagaagacggagcggaagaagtcagacaagaagagaagaccgcccaacctatcttcttgctagcctcctcgaatctcggggacgagattcttgtaaggggggtggatttgtcacgtcctgataaattcatcccgaattaaaaatcattcgctaaaaggaataatagaattaattaaaattcgaaaagaaattggcaaacactaaaatacgtacaagaaaaattcaaatgcggcccggagaatttttgttaaattctccttggtctaaaaggagccctcaaattttacttgaattttcagagcacaaataataattattaagaaataaacaaagttaaaaaggttttataaaaagaaaaaccctaaaaagtcctttttccccccttcccctcttgggccggctcggcccatctccctccctctctctcctcctccccgcggcccactcggcctctccccgcgcgcgcgccgctgacgggcgggcccgcccgccaccctcgctgacgggtggggcccacctgtcatccctatcctcccgccgctcccgccgcctcgcccgtgccctagcgccgccgccgccgcgaatcccgccgcctcccgccgtccccgcgcgcaataaagagggggaaatcactccccatgattccctctctctttccccccatttttccctccctctctccctcggattcggttggaaaccgctcccctaatcccgccggcgccattgatggcggccgacctcccgcgccggtttcctcccttccccggccaccctctctcgccccggctctatttaaaccctccccgcaccccctccgtccggttccgcctctcgccgctctctctctccgccggaatcgagctcgcgccgtcgctctctctctccgccgtcgccgccgagctccggtccgccgccgtcgtcgccccggacctcctcccgtttcggcgtcgccttcttcgggttcgccgcaacctcgccgacctcgtccacccctccgtttcgcccgccgaccgccggaacgccgccgtcctcgtcgacccgagccgcgccgccgccttcctccgctccggtcgccgttcccgtcgccgccgtcgacccggggtgagccgtggaccgccgtttcgcttcccccttccctcccctctctcgggcgccgctccgccgcgccggtggtcaccggcagcgaccatcggggcgcgggtgcgccgcctcccgtcggctgtgccggcctggccgccttcgggcgcgccccgcggctgccatgtggggcccggccgtcagccgcccgcgccctcgggtgcggctgacacgtgggacccacggcgccggccggtgtgagccgggtgcacccggtccaccgtggaccgagaggctgccgcgtgggccccactcccgtggacccggtccgcgcgctcctctctcccggctgacgcaataaatctattttaaattaaaatttaaatgaagaaattcgcaaatatccatttaaaaagcatataaacttcaaattgccataacttggccatttgaactcggaattggaccgttcaagtctctaatttttccttaagaagtcaagaacccatttttgtgctttgtttctgcttgttatatggagtttattagagtaaaagccgtttcttttccgttggacgtgtagacgctgcagcttcggaagatccgctcttcgtggaagttgaagccgacgtttgggaaagcgagcaaggcaagtcacatcatccttgagcatattgaatcccagtttataaaattattttaatttaaattaatgcattatcgctttatttaaattcccgcgttatcactgttttatttagccatgcctatttacctttgttatgacattattattgctattgttattattaccttgttcaccctaggaaaataaaaccccaactagtgggtactctatttatggttccactagtgtgaacttaggtagatgtttcgctggttaattaggcaacattaggtggttttataactttagactctgggaaatctcatatcatttggacattatggaattgttggattatggtggaattggacatacccctcccttcctctttcaaagcccctaaaacctgtttttcggtggggtttgggtgcatgccagttgtgggaagtagcaccccggccactataaggattaagctcgggcctctgttgcaaagcactatcgtacttccacatgtctagtgggtaaggcttagtttgtggctcactctggttataaacaaaagtacacggatggagatggacgaagtcgggggtcgatggacatctctaggacaaatgaaggctacacgagctgcggcccggtagtcgagatgtcatggcacagggctggtgtcctgctgctagggggctcaatcctgcctgcctgtcccgggggttccggccgtaggtagggttgggtcggtactcttgtttatggctaggatgggttgggaactatgtcacgtcttccgtccgtataccgtggtggtatgtggcacgtggttacacgtgaggaagatgtgtcttgtgggtaaagatgtacacctctgatcagagtataatctattcgaatagccgcgccctcggttatgggcaagccgagcaatgtacccaagtcagtgttttaattcttaaaatttgcttaacaactaaaatgtggaatggttggcctgggttggcttgggacgagctgggacccagggtcgggttgccagttcggtctgaatcatcgtaggccttgggttaaggcaggttcgtgagggttcacggccttgattaataatattgtgtagctctaggatcgtctttataaatggctttgagcaactaagtgacttttaaatgcggttttctgcaaaacttaaccccgatattattatccccttgtactcccttgcattaatcatgcatctgccggtgtgacttgctgagtactgtggttgtactcattctcgctcaatcttccccccccttcagtaagagaagctttggagaagaagtcttaggtggagtcctggcttataccccagttgagcgcctgtgaagatggagccgtaggcccgctagtccgctgctgtttatttttgtttgtcaggtcttaagtgcctttataataatgtaaatattgttgatataataaagatgtgtcttttatatcatgtttatgtggtgtaccccggcttttcctgggacggggattaatacactagcgttcgggaaaaggcaattttcccggtcgcgccagtagggttctaatatacgacagttagactacgcatatatgactatttaagttttagtataagattatttgagttttaatataagattattatatttgtaattagacttagtatataattattgactagctagggtcctataatatacgtcacctagacttagcatatatcactatttgagttttagtataagattattagatttgtaattggacttagcatataagattgtgtagggttctaatatacgacagttacacttagcatatatgactatttgagttttagtagaagattatttgagttttaatataagattattatatttgtaattagacttagtatataattattgactagctagggtcctataatatacgtcacctagacttagcataaatcactatttgagttttagtataagattatttgagttttcgtataagattattattgttttaatatacgattattagatttgtaattagacttagcatatacgagagttagacttagcatatacgatagttagactaagcatatatgacttcgcatatacgacagttagacgtagtatgtatgacttagcatatatgattgttagcatataagattgttaaaacataaatgtctcatgacttagcagcagtttcctgtatgaacatatggctgatcgcgatgagacatagtatgtatgacttagcatatatgattgttagcatataagattgttaaaacataaatgtctcatgacttagcagcagtttcctgtatgaacatatggctgatcgcgatgaggaacagatattgtacgatacaatcgcggagggaagcagccagtactggaacgaagaagaggggaacgaggatccaaaccagtatttgaacgaggaagggaacgtggagagggatgcggaggggaaccaggaggagcacgtggagagggatgtggaggggaaccaggaggaggaggctagtggaagtcaaccctccgctggacagaagagggcacgcgggcaacgaggtgccgcaaagaagcttgagggtcggcacatcataacggaagtggacgaagacggccgacctagtgccccggcagaagccgccaagaactatgtacgtcacagcggttgggttgtgcgggataacgtgcctgtcagtacggtgtactggcgcagaacaagggcacgcagagatcatgagagctttgtcccagattcggagaaagagatgatgtggaccacaatgctcgaaacattcacccttcccgcgggtacagaggacaaagtgaaaaggtggactctgaagaaaatggcagaacagtttcagagcttcaagggagatctgtaccagaaatatatcctgaaggggcagacaccgaacttcaacacattcccaaagctaagggatcactgggacgagttcgttgcatataagacaggtgaaaaagggcaggcgatgatggaaagaaacaaagaaaatgctgccaagaagaagtaccatcaccacttggggtcaggcggctatagcatcgtgatgccgaagtgggaggagatggaggctagcttgcttgagaggggtatcgaaccggccaccgctaattggccggaacgatcgaagttctggtactatgctcacggtggaacgctcaacccagctgatggctccctggtcttcggcgatcagatatgcgaggctgcgtgttgactaacagacgcagtggaagcctcttcttagggcacgttccgaccggacagagagaaggacgagctgtcactcgccctgcagactccagagcatccaggacgaacacgagagaaatgggtgattccttggaagattgggttcaaggaggacatccacacgtataggagtcggatgaggagcaagagagataccgaggcgaagattgcagatcttgagttcagggtatcgagctacgagctcagcatgcaagaggaggtggcaaggaaggttgatgaacgcatggacgcacatcggtcccatgatccctagccgaccatttctcctgcaatggtgagcccgtcaggaaatcgtagcagctgcgcctcaacggggcaggtaggatcacagagcatggacgccatgcaaacccaggacgaaaccacctgcccggtgatgacatcactcagcggacaccatgtgagctgcatattcccttcaagaacttatcaataaaggtaagctcgtagtttatagatgttagatttggccattccgctagttgctgcttatatatgttgattactaataaataacctctcaccacatgaaggtggcgtcgggcatggccatcccaacggacccttcaggtacttaccactgtaggccgattccagcaggatactccaaggtcaaagttgagttggtcgaaggcgcgtacgaggacctcgagctggattaccctggaggagacggtgagacgcatctacgagacacaagccacgccattattctatggcacaagcggtacatcatcctccctgggtgacaagcggcgtctcgtgcaccatctcctccggctccgccatctcctcctcaggctcctgcaccgactcctcctcaggctcctacaccgactcctcctcaagctcctcttccggcaccttccaagtcaagggcccccaagctccaccgcctgcccccacaagggcaacgaagaaggcgaaagttgacaccgccaagaacaaggacccagggtacgattgcacgcaagaggagcttgacgcttacgtggcattagaagtcaggagacaattgaagcctcgaagtccagaaaagaagattcctatagacccgagtgtcaggaacttcttcaggggtatgtatgcacctgccaaggaggccataaagctatcggactatgagcgaacactcaagaaagcatcttctggaaagtccaaaccagtccctcagcttggagagcaactaaaccaggagatcgagccgttggtgaccggtgaagattttggaatacaagactttattaatgacaccggactaactacggatcaattgctacgagacgcaccaatcgaaaaggcggaagtgaaatacatgtacgaactcggtaaaccgcttgtcaagcttgagctgctgtagtccctacccacacaaatgtacaagtaccattagctgtacatggagatgagcgccaccggtagagagatgatcggagcgaggatcagggacacggacttcttgcaaggagatgacattctctggatcaatttcaagggattctacgaactataccagctggacgccctcgacgtctttattatgagttgctggattttgtaagtatatcgttcagttagatttcttacaacgtttcctttaattaattaggtccttgtatataagtagactatataaaatatatactctcttttatcgttgtagaatggagattcaaagggcccgacggcggggggttttcgatactggattcatcgaccctcggaaagtaaacgttgcaatgctcgaccaatatccgcaagccacagaggacaatctcgtccatctcctgaaggcgcagcattacaagatgttcatactgttgccgtacaacacagagttagtttaattttactgtcttcctataccaaatttcattcccgtacgaacatgctaagtgtttcatatgtaatgcatcccacgcacattgcagattccactgggtgcttttactcttcgacctggaggcctgcaccgtcaacgtatatgactcaatggataaaaaagagtctacgtttgacaaggttttcgaacttatagataggtactgtcataagttcctatgttaattaagaatcttgttatagttaatttctactacgaatcatagctttaaactccatgtggggcttggtattggttccgtcatttgattcgcggcaaatggagagaaagacttagcggaagttcaaatttcctgtgagtacacatgctctacatttatatttctccgcttcaaatacatacaagtatatattaattagatctctcgttgtttgtcatttatttatagtgcgcaaagcaaaagcagggaattaacttgtgcggctactacatgttcgagtattgccactgccttgcagaccaaatcatcaccacaagagagcttgatgtacgtacaaataaattcaaaatttcattacgtatcggtttgttgtttaattactaatcaatttcatacattcatatagtttattcgcatgagggataacctgatcacacacaaggaatttatcgcggcggttcaagaacaactcatgggattcatcaacgaacaaatccttgatcccaagggtgaattctactacgacggaaatacaattcataggtccttatcgtctgagatagcgactactactacgtcaaaatcgtagctagctaggacatataatggattgtaattaatacatgactatgtttctatatgcatgtgtacacattttctataatgtaaatatatattttggtcatatatatatacatatgcatttgcataacatatatatatgtataaatacatatatattatgcatgtacatatgtattgaaacatatataaatataatataatatatatatatatacatatatatgtgtatatattgaaacatatatatgcatggtttatatatatatataaaccttgcagcaacagggccatgtaaaaaaaaaaggtcagctcgatctttagttccggttggtaacaccaaccgggactaacgatggctcagccggccacgtggttgagccaccaaccgggactaaagatcgatctttagtcccggttatttcacccgggactaaagatagcgatctttagtcccggattggtagtcccggtttggaaaccgggactaaagggggtttacgaaccgggagtacaaacgctttctccaccagtgctagttcaacatctaaaaatctaaatgtcatgcaatccgcaattgtgatttaagatatatatatatatatacatatatatatatatacatatgtatatatatatatatatacacatctctgtggtcggtaggagggagctcgctagctgcctttcttttttctttctgcatgcggctgtaaatataatcctatgatcatgtcagcccatactcccatgtgaagatttgagtacccaccaaaaatgtgttttttctgtcgagagtctcggacacaggcatgaagtacagtatctagctattttgagctaattaatggatgtgtgctcacaagagcaagttaaatattagagctcactactaattataagcctatactatagcttatatatataatcagaaaacagacaacggtatcctattggaacgggatacccttttatgagacagtacctgatacctctgttatggtaccagctgcatagtactcgatacctgtgatacctattactcggtacttgtgatacctaggatctaatatctgtgatacttgtgcaagataatagttaatatgtctatgccattgtcgcgtcccaaaatgactctaaaatacatcctcgaaattatgcctagaataattaaaatccttgtgaaagcctcccacaagtaaaatgtgcaaagttaaaagtcaaataaggcttggaggatttttgtatatttcctaaaagcctaaaatgcgtaaataaattttagtggaattttcagagcacaaataataattattaagaaataaacaaagttaaaatgattttataaaaagaaaaatcctaaaaagtcttttcccccctccccctcttgggccggctcggcccatctccttccctctctctcctcctccccgcggcccattcggcctcctccccgcgcgcgcgccgctgacgggcgggcccgcccgccaccctcgctgacgggtggggcccacccgtcatccccttcctcccgccgctcccgccgtctcgcccgtgccctagcgccgccgccgccgcaaatcccgccgctcccgtccgccccgcgtgcaatcaagaggggggaaatattccccgtgattccctccctctttccccccatttttccctccctctcttcctcggattcgttcggaatctttccccctaaacctcgccggcgcatcaatggcggccggatcttccgcgcccgtttccccctcatccggccgccctctctcactcccaaccctatataaacactccccgtgcctccctccaccgtttccgccactcgccgctctctctctccgccggaatcgagctcgcgccgtcgctctctctctccgccgtcaccaccgagctccggtttgccgccgtcgtcgccccggaccttctcccgcttcggcgccgcctcctttggtttcgccgcaacctcgccgacctcgtccacccctccgtttcgcccgccgaccgccggaacgccgccgtccccgtctacccgagccgcgccgccgccttcctccgctccggtcgccgttcccgtcgtcgccgtcgacccggggtgagctgtggaccgccgattcgtttcccccttccctcccctctctcgggcgccgctccgccgcgccggtggtcgccggccgcgaccatcggggcgcgggtgcgccgcctcccgtcggctgtgccggcgtggccgccttcgggcgcgccccgcggctgccatgtggggcccggccgtcagccgcccgcgccctcgggtgcggctgatgcgtgggacccacggcgccggccggtgtgagccgggagcacccggtccaccgtggaccgtgaggctgccgcgtgggccccactcccgtggacccggtccgcgcgcccctcccctcggctgacgcaataaatccaaattttaaattaaaatttaaatgaagaaattcgcaaatattcatttaaagagcatataaccttcaaatggccataacttggccatttgaactcagaattggaccgttcaagtctctaatttttccttaagaagtcaagaacccatttttgtgctttgtttttgcttgttatatggagtttattagagtaaaagcctatttacctttgttatgaccttattattgttattgttattatttccttgttcaccctagattaaacaaaaccccaactagtggacactctactcatggtaccacttgtatgatgttaggtagatgcttcgctatttaattaggtaacattaggcggttttacaactctatactttgggatattcatatcacctggacactttggaattgttggagtattgtggaattggattcacaccgcccctctattcaaaattcccaaaatggttttaggctgggctcggggtgcatggttttgatagtagcacctcggccatataaggaccggtcttcgggcctctgttgcaaagtactaccgtacttccacatgtctagtgggtaaggcttagtttgtggctcagtctggttataaacaaaagtacacgaatggagatggacgaagtcgggggtcgatggacatctctagggcaaatgaaggctacacgagctgcggcccggtagtcgagatgtcgtggcacagggccggtgtcctgctgctaggggctcagtcctgcctgcctgtcccgggggttccggccgtaggtgggattgggtcggtactcttgtctatggctaggatgggttggaaactatgtcatgtcttccgtccatataccatggtggtatgtggcacgtggttacacgtgaggaagatgtgtcttgtgggtaaagatgtacacctctgatcagagtataatctattcgaatagccgcgccctcggttatgggcaagccgagcaatgtacccaagttagtgttttaatttttaaaacctgcttaacaactaaaatgtggaatggttggcctgggttggcttgggacgagctgggacccagggtcgggttgccggttcggtctgaatcatcgtaggccttgggttaaggcaggttcgtgtgggttcacggccttgataaataatattgcatagttctaaaatcgtgtttacaaaatagctttgagcaactaagcatctttaaatgctgtttactgcaaccctaaccctttatattataactcccttgtaatcccttgcatttattatgcacttgtgggtgtgtcttgttgagtacggtggttgtactcagtcttgctcaatttttcccaacccagaagaggagcccctcgttgatgaaggctttggtgtctagctcgtgcctgccgtcaagcgcctgtggtcgtcgccctagtcttccgctgtttctcgtttgtctttgtgtgtgctgggccttcgtcgcccatgtaataaattatctatttatgcttccgcttgttaaactctgaattgtatcaactcttggtgtaccttgcctcctgggacaaggaataatacacgcacgaaaggaacgcccgttgggttaattccggtcgtgacagccattacaacggaatcctgttttgtagcagctctctatagattttgccttgaaaactactatcacaatatcataaaacttatagtattttatattctaatataaaaatgccacgatatgagcacctaacaccgacctgaacattactagttctcatgaaaaaaaaagaacattagtaattaattaattaattaattactaaatttgcatgttctagagtcacatccgatgcaagccacgcacaagtctgatccatcgttgcggccaccaaatcaatatatatatgtagctaagtccacctctgctccctactggtgttttttgcgccttaaagcgaggataatagtaagctacaaataagctattgttaacttggcggttcccggtgactcctcaattacgattatgggatttactgacatccccaaccgtcattagcagctataaaaggatgtcactctcttacttataacacactccttaaggagctattctctctatttcatattgtatctttataatatttgtggaaataggttaaaattatcttcggtcctatagttttcttgagatcccagtatgcctttagcactttacttttcttgtaagactatagttgaattaatagaattattatttatatattcttattttcataatttatatactgctttagtagttatgttctttatgaataggatgtaattcatttatatgtttcacttgactaggtaggccagtcgatctatattgaggtaacggtccaacgaccttgatgggttgctctagctctaacttgtccatccgaaaggtgaaagtcccgagggagttagttttattatttactaccataaatatggtgcttaggttagataaatgccattgggtgtgggtgtgccccacggaaagtgagggaggcaacacgtggtgacaatcctctgtatttctccacgattgggtatgacgtaagagtgcataaatgacataaccaagctggcagactagcatggagtgattttttagtagtatttgaataccaagaactaagttctagccttgtgagcatgtatgtgtgcatcgcactaccccttaatcatatttatcctaacccttatttagactatggtaagttaattaattataggttgactaatgatgtataaactatgtctttacactaccgccttctctgcaaaaatataaataagatacccttagaaatactcatgggcgaagtgctataatgatattcgtgtgcttgtgaatttaactgtgaacgtaagaaataccattagctataagcttatgtgaaagaaagagagaaagaaaaatagaaagtcttagctctcgtgcaagagctaattctatcaatgttccaaaaaatatgcattaaattcatagtgtgagaaagaataaagagggaaaaacatagctaacctattcagaaaaactacctaacggcatcccgtggtgacgggataagtggataaccatccattcttatcagttctctttctgtctctctctctctctctcgccgatcctcgcttcgtcgtcatccttcgccccactctccctctgtaacttctcttttcgttcctagcagaggttgggacatgattccatggcaagccctttaacaagatcggaatagtccagcgcttgctgtgctaatgtcgcatcaccgacggtggccatggggctctcgcatgccagggtcggggaagagatgcaacaagttcaaggtgggagatgagttgaggtgtgtcgcagatgatgtctgcaaccatcacacttgtgtgggtgtcgaggatctgggcaacgatgctctggatcgaggatgacaacaagaatgaatggcatccctccacctctaaggaagtaaccatctcattttcgcgcttgcctttgccttctttcctttctcttcatggctctcatcagtgtgaatacatagtactcacagagtatttgatgcctgggtatcaagttcctgatacctaggtatcgagtaactggtacccagattatccggattagtaccataagtagcaagcctgatacctcaggtatcagggtaccaggtacctagggtctgacacccataggtaccaaacctagtactgatatcgggtacctaggtatcaagtacttggtatctagatcaatttgatacatgtaggtaccagatacctagattgatctgacacccataggtatcagacctagtacgggtattgggtacctaggtatcaagtacttggtatctagatcagtctgatacctgtaggtaccagacctggcactgggtatcgggtacctaggtatcaagtacttggtactttgatcagtataatacacatatgtatcagacctgatactaggtatcgagtacctggtacctagaccaatctggtactcaaaatggccctggtgttagcatcataacaatcgaaacgggtgtgttgtgtctctagtgagaagacgtgcactgacgtgttatcccttgtgaggacacgaagagacgtgggctgacacatgaaccctcacgtggggtgaagttgataaaataataagagaggttagttggtcaaatagtcatgctcattaaattatcccgttggaacgggagtcagtgctctagcagtcctcaaatctatagtatgtatatatattttaaaactatgcattgagaagttagtgatggtcatttttaaaattttgccgaagtcttaaccttaaaacattcatcactggaggaagcggatatattccatatcagccaagtttctcaggagaagtatttaaagcatcttcttttttatccaccctaaatcaactagtacgatacattgaagaacaaacctttaaacaaatgccagtgctaacgcaatgccctgcaccgaaacacaccgcataccttatgtgcaaaccatagcaattagtgaaaagtgcatagctatagagatactagaactttggaaaacactagtatgggacgtccaatccctaacaaaaatttcaatgttcccaattcaaattgactacccattcctcttcccatgaaatagctctttttagcacctttttaaattattttttcctacactatttatctgattcatcttattcatcgtaattaaatctttaccataagatctcacaagcttatattttgacaaaaaaatatttgtttcaatcattaaaatttgatgtttcacatgtaaacaagcaagtgtttcaactagaattccactttgttgcacttttttaatggtttttttaagtgttgcacatgcactactacaaaaatggtttttcctggcaccacatgttttaatttgttggcgggtaaaatagaaaaccccagtgaaaatacaacatgaggttcctagttagtgaccgccattgaaaatctatttttgcaagcggtcgtcttaagagatctgccattaaaaataacactgtttttacagacctcttaagtgaccgccaatgaaaatcgattttcgctagtagccactgaagagcatcgtcgtgaaaaactacagccctattaaaactctccacgccctcccccctctagatgtctccagtgacccctccaagtctccttatccctcctcctcttccttcctccttccgcacgtgcagggggttcggcggcaacgaatcgcgaggagggccggcggcggtgactcgtgaggcagccgatccgatagcaactcgcgaggcggcgggtccggcggcaacgaggtgcgtagagggtggatccggcggcggcaactcacgctggaggctgatccggcggcggcgagtctagcagcaacaaggtgcgccgatggcagatcctgcggcggtgagtcacgcgatggtagtggcgactttcgtgtgtaggggatccggtgccgagttaggcggcgtcgactcccaagggcggtagtgggcggctcgccgacaaggaagacgagcggtggcggcagctcggtgacaaggaggaggagtggcggtggcatggcgatgaggaggaggggcggctcgtcaacgaagatgaggagtggtgtgttggcaactttttgtgacaagtcgataagcacgatcgcagcacataaataccttgcggtgatatagagtcgccaacctccttaatctagccaaaagaccaaatcaagatgggttttctagaaaaacggctaagccggctagcggagccgatttagagatcaaaatcagcctctaggccgatttttctaggataatttcctgtcttgtgggaaaaacggaaggttttcaggacaaacctacaaagaggtgtcgcactctcgcagcggtagcggacgatttacagcgcatatcgacaaagatagactaaaactagggtaaagtagaaaacatggtaaaggaacgattcaagtagattatattcgggattttacaatgaaccggccttgacccttaaataggggttggtcttgccctctacaggcccttcttcacatccaactcgggatagaaataaaaggaaacatgaaacatagccttctcgagcaaactcgggctcggactctgccggtcagaccggccacacaccgccagtctgaccggcccactgtcggaggtctgaccggccaacacacggcggtcagacaggccctcatagagaaaaaccagcagacttccaaactttgaaaattttccctattttatccctaggtgccaaatttgggtgtaaacacatctccccccctccctttttgatgaatatcgagaacctaaaagcatagaacatgttgtcttagggcgataatccaattacctgccatggaacttcctaagcatcttgccaaacgctaagtatttcttcaagtatttcctattaattgctctctgaaaacaccatcttaaagtgcctccatctctttcaaagtgttcaaacacttaccgatgacgtcttcaaaattacctcccatcatggtctttaatcttcaaccgacaagtcgtcttacttgaaataccgaagagagccaagacttacctcaactggcaaaatggcttttgtccagaaaccaactcaaaaggagtgacttcggtagcaccatgcttagatatcctatgagcctataatgcttccgaaagcacttcatgccacttcttttgacgttctttaatcttctctttgactaaatttaacaatgatttattactcgactcggcttatccattggcctgagcatagtaagaagaagaactccacaacttaatatcataagattcggcaaaacttctcacctccttggacataaaagaagctccttgatcaaagtttaaggagtaccgaatctatgaacaatatgcttcaaaacaaagtcaattacctccgtgtaaataaaattcatgaacggcacggcttcggcccacttggtgaagtaattcatcgcaattagcacgaaccggtgcccctttgatgacgaaggataaatttgaccaataaaatccaaagcccaacctcggaacagccatggtttaatgataggattcaacacagcggtaagcgctaattgaacattgccgatccgttgacaaacttcacatcctctatagtacttgaaacaatcatcaatcacttttggccaatagaatccaactctcctaagcaactaatccatcttacgggccgatttatgagttccacaaatcccttcatgtacttctcccatagcaaccttagattgatcattatctaagaacttcaaaattactccatctatttttcggcgatataactctctatcaagcaaagtatatttgaacacttgccgccgaattttccgatcaaccctaagactaggatctttcaaatattctattcaaagggattctctagttttcttttgactcttgggcacaaatatccgaattaataattaattcggcctttgaatcaattgtaacgtgccccctagctctctacccaagatcggtcagaccggccacgcaatgccggttagactgccttgtctgcacggttagaccggccatgcagagccggtcagaccgtaggtccaccactggtcagaccggccgtgcaatgccggtcagactgcccctggtcacccgaagattaaaaatcaagcaccgacttttctagtataaaaaatactcctttcttcatattatagccagatgcttggtgtatcaaattattggaccaaaatttcttatttttagacatacgaaaaattataacatccaactaatatgtctagatgaatactaactcaagtggcttttgaaacaataaacatcaaggcatcaaaaacacttagccacttgaagtatgatcaataatgaatcaccaaagtcatatgtgtcacatgcatagattccaataaactacaaatgtaagtaatcggcttgagcatgtatgcaaaatattaacaatgccaacgttcctaaagaaaaccactctagagcaaatcatcacattgaccattgacattagccaaattactaataagcaaaactttcatggtgcaataattatgaaatctatatcctctgtggtgatccataaaaaaaacatgatttggcttttaataaatatcaaagactcatgagccaaatcatacctcaatcaaattatatgccaacttaccgattctactacttagaactggcatttgcaacatgtatgtgtaatgtgaatttgataagcaaacacatgtgctagatagcaagcaatgttctaacatggcataggcatataatataatgatgaacacaataaacccataccttgccttagcatccaacaaacggcggctcaaagatgaaatgttatatccatcaccgttcatcttctcttgatttcttcatgagcatattaatgtcttgccccccgagtaaaatcgattttcttgattgcacgatttcgaaggcaagatgtataccgcactaacaaccatagcatcatgtgaaggcaacttttctctaatgaccgatgattcttctctcaccaaattaaatctatcactactttgggaaatcactagtctcttaacttttacttctttaggtctccacatttgcttagatgctgttcgaggctctaaattattacatgttttgttctccacatcttcggcctccttttcttttttatctatggcccgaagacgttgtagcctcctcttttgagagcgagataagccagaaggtatccactacggctgtggttgtttttcaggagccaagcaatgattcttgatatctttggttaaagtagaagctcctgtgttactctcaattttctcactcttctctaatgccgcccggtcagaccggcctctgggcccgatcagaccggccgtagtctggcggtcagaccagccagacgcctcagtcagacctccgcttttgacaatcacggtgtcggcttcgatctcctttgcttgtatgatttccaccgcatctacagtaagtacttgaacatcttgagactcctccttgataataacgaccgccagagctttggcttcttttctcacccacaccttctttacctttttcacctttgatccaccggaccgattattttacgagaaacggtcttgtcttgaattagatgaatgacttggtactgacctaggtgattccttccatccttgatgaaacggcgtagagaattgaggcatccatggcatgtaatacatgaaaggataaccaaacggtgacattggatatggataccttggcatcacaaccggaggtttgtatggagttggtatagttgatggctgcgattgctttggtgtttgtccaaatctcttcctacgagatgatcttgatctttttgaatcactagtttggttatgaaatcgttgaccagctaatcctttcttgtacttagccataagcatctcaaaagtgagcttcaactttttagttttttgggaactagatgactcatcctttgcaactttatgatcttcggcctttgaattattgatcctaattgtcttgggccgaggatccctaataataacacttttccatttctttttgtcaacatcaataggactaatagagagaggatcactaataattccggtcttaggcataggtgtaaccgaaatagttccacaagtgaccgatgaatcatcaatcaacctttgctccatcaagcttacatctttaaaataatcatgaaactcatactccatttgtgaccatgtagagattgaactaggagcaagtaaactataccatgtagatgcaaagtttgacaaagaaagaggaaacaactttaacttaagcaaatcattactaccaaccttaccacattgatcagtaaattggccaatatgctccattgtagtcatagcattctgacctgttaatttcgtgaagttgggcacctcaaatccttgcgggtatgggaccgaatctacatgtttaggatatggcctttggtatgtatgcatagctacttacgattctatttcactgctataccgcaagacattgtcatcatcttttccaacattcacatgaccgatttgtgattcggtcttaggtaacaatgctatttcagtttcgcttgtgaaacaattcgaaccgtcatttagtttagttatactctcaatggtgtcattgtctaaactagcaacacaatccgaaccatcacttggttcggctattccatcattgtctaaactagtaacataatcataatcatcgcttggttcagctatattggttattgcattgttatccaagttagtaatacaatccgaaccaacatttgtttcggctatacttattatggcactattgcacaaattattagcacaatccgaaccatcgcttggttcggcaatacatgaaattgcactattatctaaactagcatttaagctattgtcatccactcggctttcctgagccagagcttcatgcaacacatgatcaacatcaagaaatatctggccattcaatctctctttaataaaatcaagcaatccatcatatgcaatgtcggccaaatctttgtcaaatattttcaaactaacacatcggcttttaatatctctaaacctttcaatataatcagcaacagattcattgtatttatgcctaatcgatgataaatcagataacctaagctcagtttcactagtgtgaaaataatcatgaaatttttgttctaattgagcccaagtatgaatagaatttgccggtaaagaagttaaccatgtaaaagcagtaccggacaaagataaaaaaacaaacgcaatttacatgtatccatattactagccctaccacattgcgctaaaaattgacctacatgctcgcatgtggtcctactatcctcaccactaaacttggtaaattcagaaattctataatcacgaggatatgggagaatatcataataatcaggatatggcttttggtactctctagcacgattccttggctcaactgcgaaattttccctgataatatttctaagccaatcctccacagtttcaggcctcggtgaatctagtggtgggtttggtggcctaaggggtggttgttgcggcacaatattattatactggccatacccagtgtcatgagaatatcctccattaggatcattgtaagcattagggattagggatgtgtggagtagtatgactaacggtattaataggtttataataattaaaatcagtactgctagtcgtggaatgaaaacctggagaaatttccagggaaccggtctgaccggctatagatagcccggtctgacaggccaagcacccggtctgaccggcccatggcccagtctgaccggtggtcagtggtgcggtcagaccggccacaggaggcgctatctggtcaggatagggcacggtctgaccggcgtagtacacggtctgaccggccatggtgggtacggtctgactggcataggatgcggttagaccggtgtcacgaccggtcatgtcgttagctaggttctgcatatagccgattcctgcgtaatcggatgtataaacatccattgacccccatagcattataagcatattgtataggagcaaaactagaagtagcatatgcatctacacaacgattattaaccttttgaatagcaaaggacgagttgggcgaatcggaggttacctttggtgaaactacaacttgaggtagcgggacgttctttttcacgacgccttgatcggtcctaatgtattgtgtagtaatattgttgaacccgtttccgctcgtcatagttgatgaagaaattccttcattaatttcggccatatagctcatagccgaaatctttgatcgaataaatttgatttcttgatatgtcactgtgtttagccaattttatcaaaaactagcctttgttgattgatacagggtactcggtactgtagcaaatataccgaaaaatcaaccgatctattagattcgatcggctgctatgtttttttttttttgttttcggtatgtgggcagaaaaaaatcggcttttgatagcctgatctctcttttttttttagaactcgtatactcagcaaaccgaattgagtaagattcaaattttcctgccgtgtacagcaatacctgctgctgttgatcggtagatcgactctagtagcctgatcttttctttgttgccgtgtgaaacaaaaaggaaacgttgctaagccggctgctgcttcctgataattatcttcggtacacacggcaagtgctatatgaatttgatgactaccaaatagctttgccgccgaatagatttagcgataagaacagtgcagcggctataacaattaaggtgtagattaatttcggccgtttggcggaaacaaactgatttgacgagatgactagagtaaaccaaattcggctgtaatatgaccgaattgatcgattccccagggagtgctcaaaaatcgtattggcaacttttttgataagtcgataagtacgatcgcagcatctaaacgtcttgcagtgatatggagtcgccaaccacctcgatctagccaaatggccgaatcaagatgggttttgtagaaaaacggctaaaccggctagcggagccgatttagagatcaaaatcagcctctaggccaatttagatcgatatgaggataactacgcgtctcgtgggcaaaacggaaggacaaacctacaaagaggtgtcgcactctcgcagcggcagcggacgatttacaacacaaatcgacaaagatagactaaaactagggtaaagtagaaaacatggtaaaggaacgattcaagtagattatattcggggctttacaatgaaccgtccttatctcttaaataggggttggtcttgccctctacaggcccttctccacgtccaactcgggatagaaaccaaaggaaacacgaaacatagccttccctagcaaggaaactcgaaacccgatgaaacagactcgggctcgggctctgccggtcagaccggccacacaccgccgatctgactagcccactgtcgacggtctgaccggccaacacacggtggtcagaaccggccctcacaaagaaaaaccagcagacttctaaattttggcaattttccctattttatctctagatgccaaatttgggtgtaaaaatggtggtggcggcttggctcctcagacctgtggtggccgggcttgatagcgacagcctagcgtaaccagcaggagagaagatctggagttggtgacccacctcgtcgtcgacctccgtcctccctaccgctgactatggtgtcatgtagctcgattttcatttttttttcaaaatctggatactgttttccatttttttaatccaaaaaatattttcacttgtggttgtctttatcttgccgccagtgaaaatagtttttttttttgctgtcattcgtcgatgtaaatccattttggccatcagcgaaaatgacctttgtagtagtgatggtgttatttggatgtttcaagaagtactttttgctgtttcacttgtttcaaatgcaaataatgcatgcgttgtttttggataagcttaaagtatttagaaatgtttcacaagctcatttataacgattgcacatggtattatttgagtgtttaagtaaatattgtgtgatgtttcaatggttacaacttgatgattcatgtatctaataaaaatgtttcaatatattttttatccgaaatataaccgagtccgatcttattgtaaagatttaattataacgaatttaagggtgcacttggatagcatattcgataagtaatttagaataaaaagtgatttaaagatcgctaataaagtataaaagagaaaagataagaagagaagatactgcaccaagtgtatgcatgcatgagcaaatagcctaaacacaagtggttgaaaatactatagatttgtagcccacgcaaaaaggtatttgtagcccacgcaaaaaggtagtaagcagaagatgttggcatacgcgtaggctacgatagtataaatcaaaattttctatcgcgtaaaccaggaaccatgcaagtattagattatagatcgttaccactcgacgcgctgcgcagcgaaagaagacgctgagaagtcgaaggaactctcgcgaagaagcacaccggctcgaccttctcctcctcgtgcgttctcctcgccgtactcccatgccgatcagcaccgcaaaccagcagtgcctctaccggtatccacacgtacagggacggaacgccacgcgcagatgtgctagcacccgcgcacggctagggttttgctcgggggagggaagtgacggctagggtttctcgcatgatgcaatgcctccgccggccacacccctcacgaatatataggatccatcactcgggcctccaacgcccgtaggactcctattcggatccctatccgaattaagctcatattggatctccatccaatccccttattccggcccattaagcgtccgaccctgtaggttcatgtatacttggctgtaacccgaaaactctttttcggtccacgcgtcaatagcggcccctagtagaacgtattgacacaccgggcatacataaagatcatatcggctgaacctctagtgtatacttgtatgaacccctttgcctcatgatatcgattaagctcaaggctagatatgtgtcatcctctaatagctcaatcattcactcgaacctgttgatagattatataacttgtgattgactcctcaatcacctttgccatggccatgaacttccataatctacaacatcgaggggctcagagatatctctccataggaggggcaaatcccatcttgattattcatatccaatacatgtttcatagcatacccgaaaactacttttataacaacccaattacggagtagcgtttagcagtccctaagtaagctacaacacatgttgggaaccatgataatctcaggtctaaggattcaacaccaacactaaatgagataactgatgacacaacacatatggctcttgcagtgtctcatgttgggtctatccaacaacatgttcactaacatgtgtccacattattaatttggtatctctataccatgatccatgagacatgatcatcaattaatacatgtgctgatcatctaaacatatttgttccacatatgatatttgattagggatcctttagaaatagcaacacataacataaagagtctcatgaaagaatcacatattcattaaccaataatgagtttatctatttcaaggaacaaagtcgaataaatatgtaaacatagtatgtgatacaatcatctctatgattgcctctagggcatatcactaacagtctcccacttgcactagagtcaatcatgaacgtatcttatacccattgccctagtgtgtgcctcatgcttaggctgagggagtggctttgtcaatggatctgcaacattcaaatccgtatgtattttgcatatcttcacatctcctctacccactatctcgcgaatgaggtgataccgccgtaaaatgtatttagatttttgatgcgatctaggctccttggcttgcgcaatggcaccactattatcgcaatagaggtccatagggctagaaacactagtcatcacacctagttgagaaacgaatttcattatccaaacagcctcctttgctgcttcagaagtggcaatgtattcggcttctgttgtagaatcagccactgtatcttgcttggaactcttccaacttacagcgcctccattcaggcagaacacaaatccagactgcgatctaaaatcatctttgtcggtttggaaggttgcgtaagtgtaaccatttacaacgagctcttcctgtcctccatagactaggaaaatatccttagttcttctcaagtacttaaggatattctttaaagctatccagtgactctcacctggatctgat

SEQ ID NO: 21056 - DNA, 6712 bp, Oryza sativa
gttcattgaaaaactatttttcaacgatgtcttaacagattcatgcataggaatatcattcccaatctataatatgtcatctacatataggattataaacaccagtgcgctccactaatcttcttgtatacacaaggctcttcttcgtttttgacaaagcccaacaccttgactacttcgtcaaaacgaatattccaactccgagatgcttgcttcaacccataaatggatttctgcaatttgcatatccttttagctgattgtggatcaacaaatctcttgggttgtgtcatgtacacatcctcatcgagatttccattgaggaaagctgttttgacatccatttgccatatctcaaatcgaaataggcagcaatcgctaaaacaatccgaatagattttagcatggcgactggcgagaaagtttcatcataatcaacaccttgaatttgtctgaaacatttcgccaccaatcgtgccttgtagatgtgaacattttgtaacatactgaaaatttagaattttctaattatgcatcatgccagttcttatgttcttattaaccttttaaacctaggaaaatataattagagcgacctcctaaaactaacttgcataaaatccctttttgatatttaaaagcttttgtgactttcatttaaaattatcttgggatatttcttgatttggttttaatttaaaaccttattctgacaaaattccttttattcaaatttagtttgaaaaccctcttttatttttgtgaattgaggtccaaggaaaatccttcaaaccaaatccttgcaattccaatgttattggaattatttgttaacccatcctttgattctcgatccaaatatccaaatcatttcttttaatctagccaccaatttaattcttgtggcttgattttcttctcggcacaagaaatattattattgcaaatattatgaataattgctctttgttgacgaaaaaatcgaacacactggcctgagagatctgcttagctcctttgcaggtccaaatatgatgagatgcgggcgtgccagtcagtttgatcctgcaactgacaagatatgcaaatagtagattaaaacagccgatcggctgacaagccgatggattagttccagccgatagccgataatagccgatgccgataccagccgatagtgatagggttttgtgctatcggctatatgtccaatgtagataatgatataaaggaaatcggttgatgatgatgtaataaaataacaatataatccagtataaactaatcagcaaataatgatatgataaataagcattgatccgaaggttaaagcacacatcggcaggaggtccgatgtcatgaaatccacaagattagattaaacagtgaaacatttgttgtcatcggctaaatccaacttatatgtatatgcaatccttatgagccgatgcaacgtccagataactcaccggctgaaaccccgatgaaacccttattggcaatcaagaagcaggctagagattatggcaatcaaacgtatctgatgcagcactaagtatgaaaagaaacataatatctagacaatcaaaccgttgactgagttttcagggtggtagatgtctaagctaatctaactagcaacgcgattaagccgatactggcagaaaccctaaaacgagaagcagccgatagaactaaattgatatgctaagactagattaacaaagacatatgataaataggtaggcaaaaatatcatccaaaccagagcaatccaataggtcgaatgtactgatgcaaccttaaatgacgccgacatagacgatacaattgcatggaccgacagaacattggacttacctcttagccagagatcgaacaccgatgcaaccccacgtcaggtgccaaatcccgccggacgataaaataaagtagaaaagataaaaggtggcgatgtgccgaattgtattgatcgtaaagataaattacatagaccccgggtgtacatatttatacccatgggttgatacaagtccttatcggacaagaaagaaattttcctaaatataaaaggaaaagataaagtccttataggacactaaacacactttcctaaagataaaaggaaactaacaaactattcctaattagtagataacttaccatgccgtattctctttgaactcggtctcttctagataagcttcctttagtagatcaatttctttaaccgaatatagcaagaatccgacaactgacgacttggcaactctcatcggctaatctcagaactttgaagccaatgctgactctaagccgatgattactccgggcttaccaaatttcactgttaacactcttgtgctaagaaaatagattatatctttgtcatccaaatttcctattagcctcaaacaattctttgaaacccatgccatatattttgaggctaaaaccctacttatccttctccaattatcttcttcccaccttcctatttacacattcaatttcattcatatatcccttaccctttcatttgagtgcatcaaataaattccattatatgctacctctaaaatattgcactcaaataattaggaaatctctctttggaaattatctccaaaataaattcatctcaaaggttagccacttaaatttcttccaaatattaatttggatttaaattccatccctcaattccctacacaaattagaaagccttcctattcatttgggcggaattttctctctcttccttcggcccagaccggcccaagtcggcccagcccctcccacccaagccgactccctgcttctcctcccatgggcgcttccaggcgccgccaccgtgcgccattacctgccgccgtgcacgactcagctaccgccgccgccatcttgctgtcgacgcgaaggaaccgccacccgacgtcagctacacttcattccgccgacgtcagcaacagggacgaaccgccatcgtcggccgatcagaggacagagccggcgccgtcattcttttctccacgtcgctgcagccgtgtcctcatcgaccttctcctctgaaccgccatcagccaccgcctctcgccgcctataaatataaggcgagccctccccttttctccacacatcaacagagcctcgagctccctttctctctctccatccatggccgatcgtcgacgccgtcggtcgatctccccatccgtagctccacctcccctatcctcgcgccatcggcttcgcctccatccggagagtccgtttttcccctttcccctctccctccacctttaagtgaagccaccaccgcattcatccatgccggctcgaggtgagcccttgccgccgccgttccggctatatatctctcactctcggccagccaccgacctccccgggtgcgcgtcgctcgggaacacgcgtggccgctgccgtcgaggccgttcatccaccggagcatcggcgcccctcctctcccttctctctgtttgctcggctggaagagaagaagcagaagaaggaaggaggaagaagaaagagaaaagaagaagaagagacgaagaactgacaggtgggcccctgtatagtactatttcgtaatttccctatttaattcaaattctattctttagaagcccatatctcctaaaccgtagatccgattccagtgaaacttggacctaaattcatctaaattcaaaatctacattttgatatcaaattttctattttaatattttatttgaatttattcaaataccgtttgaatttatatttgacttttcaaatattttcttttatcccaattaccctttagccactaaaaagccgccggttggaactttacgccttccgtggggacgttcacggttttctatccccaacatcgaaccgttagttgtaaagcccggcataaaccaaacccaaggtcgaagtgctgctcctggcaccctacgccttgatgcgtatagcggtcggagtttcactattctatcgacctccacagcacgccgcacagttagctctcagtctctgtgtgatcctagccgttccgccgccacccacggttgtcagagtaacacttccgccctactaaacctacacccacctcctattccctctggccgatatgctgtctgctgacactggcaagagaagacactgaatctagtcgttatgctgccaactctagcaacgactagcaaacaaccaaaccctagctgataccctgctagtcaaatcccagttgtcatccaaattccataccctctacaatatcacctatccaccatactctcatccacctactttctgtctaccacaacctatacataaaatatagagcctggccgatatattgccctactcctcaatcggcctaaatataaccaaaccctaggtataatcttatccaaacctactatcagccaataccagtcacatatctgctcaaccaattcaattatccactatactccctatccaccaaccaatcaaagtctgcacataaaatataggtgatcttagccgcttaattccttctccaccccagctgccaactctttagaaccgacacataaaatatcagctcagtaatccatataccctataaaagagataggctataccctaaatcctaaccctcccaactgtttatctctttctcgctattttatggcttttattgaatttggttcttcctcttctgtagtagagtctattatattttggatggcaaccggtggtatttcaaggatcggacaatcaggttgcgtatctcggatttatttgcgttggagcaaggcaagttattattcctctccttgagcataataatcctatattctatatctccagtatcttgtgcattagccatacatgattctaaatgcataacctgaatatatagcaaaccagatatatgctagattttgcttagccatgcctagttagattacataaaatataataaacttagattggaacagtacggtagaaatggttgatttatgggtggctagtactgtttcaaccgacataaaattgccaagtacatgtgaagaacatacgagtacgaccgcaattctcgtatgggcatagacctagctgattaagttatctagcaaaggtggtacatctgtacattggttctattttaagtcctcgcgcaggaggcaaatttacaccgagcagggcgattgtgatatttaccgaggcgtaggtaaatatatgagatttattgatgtcgacttgtttgtgaaccctgattgcgatgacatggtgtcatacaatcagttctctctaaagacctcgggaacgccagaactcctctcgctgttgataacgttacgttcagagcgtatggggactagagttcatggaacagttaccactgatgttagtaaccgaaaagctttgccatgacaaggctaatgtgtttggcacgtcatggattgcgggtaaagcgtacatttactgcagtagagtataaatgaatctattcgaatagccgtgctcacggatttgagcattgggactcatatggtatttggttagaaacttaattctaaactttattaaatactgttgcatttaaaacattctaggctttcttcctttttatattatttgctttctgcaagtaaacctagctctactcagatattaccatttcatgcattcattattgaatataatagcttgctgagtatgttgtactcacccttgcttcaacccctctttttcagagtcattttggagttcttatcgaaattgggagttcaatcacataagttagtttcatttcaatctaattctcaagtctagattagatagatggtttaagtctatagccaaacattagagctaagtcattctatagcttctgctgtattagttagccacaagtttgtaaatacccatatgttttgtaataatatctcctttggagccttattcaaacgtatgcaatgaagatccagagtgttgaacctgtatcaatttactaatccagggcttgatacagtctaaacatgtcgattaccaaatcattagttttgggacccgacacatttccatctacatctgtcttcttcttaaagacccatttgcactcaatggcttttacaccatcaggttgatcaactaagttccaaacttgattgacatgcatggattctatttcggatttcatggctccaagccatttctcagagtctggtcccaccattgcttcctcataggtagtaggttcatcgttgtctaacaacagtatatcacgttgtcctgtagttaacaccgcatacctcgtaggtgtacgtcgtatcctttcggaccttcgtgaagccggtgcttccacaactggttcaacaacaacttgttcaacctgttgaacaacatcttgctcagcttgttgtggttgtgtggacgttgaagcgttttccggtgtttcctgaatttcttcaagtcaaaccatgctcccactaacctttcttgaaataaactctttttccaagaaaacaccgtgtcaggcgacaaacactttgccctcttcccaattataaaaataatatccttccgtttccttgggataccccacaaagaagcatttatctgatttaggtgtgagtttgttcgattgcaaacgttttacatagacctcacagccccaaatctttaggaaagacaaactgggacgctt

SEQ ID NO: 21057 - DNA, 17796 bp, Oryza sativa
caatgtacgattcctccgttcagacaccccattccactgaggcgttcctggcggagtgagttgtggaacaattccacactcctttacatgattaccaaattcaaggctcaagtactctccaccacgatcagatcatatatacttgattgtcttgcccaaatgattttgtacctcattctgaaattccttgaacttttcaaaggactcagacttatgcctcattaagtagacataaccatatctactaaagtcatcggtaaaggtaataaagtacccaaaaccacctctagcagttgagctcattggtccacatacatcagtatgtactagtcctaatagttcacttgccctttcactttgacccgtgaaaggtgcctttgtcattttgctaagtaaacaagattcgcatgtcaaatgattcaaaatcaaaccagtgtagaagtccatctctatgaagcttctctatgtgtttctcatttatatgacccaagcgacaatgccaaataaaagtgggattcaaatcattaggacgttgcctttttgcattaatgttatagactgaacatccatcaagattcacaatgtataagccattcataatgggtgcatgggaatagaaaatgtcattataatagactaaacaaccattgtccacagatctaaaaccataaccctctgcttgcaaacaagaagcagagataacgttcttgcacaaagctggaatgcaataacaattatttaactccaaaactaatcctgacggtaaagataatagcatagagccgaccgcaacagcagcaactcttgctccattgcccacgcgaatgtccacttcgcctcttgctaagttcctacttctttttagcccctgcaatgatttgcatatgtgagcaactgaccaggtatcaaatacctaagaatcagtagagaaagtagcaagattaatttctataacattaatacctgagatggaactctttccatcctgctgcttctgcttgagctgctctaggtatttcttacagtttctcttccaatgacctgtctccttgcaaaagaagcactctgcatccttagtgggccctgtcttttgaaccttggtcttagagttgctagtactcgtgatctcatcagagtttagctttatcttttgaccacttttcttgttgttgggcttgcgttatgtataaccatcacatggttggagtttttcttaatgctttcctcagcagtctttagcatcccatgcaattctgccaaggtcctgttcaggttgttcatgttgaaattcattatgaatggctcaaagctgggagggagcaactggagaatcaaatcagtagccaactctcggctaaggggaaaaccaagcttatctagactctcggtgtaaccaatcattttgatcacatatgggctcactggattaccttctgtaagcctgcacgcaaacaaggactttgaggtattaaacctctcagctcttgcatgctcctcaaacatgttacgtaatcccgtgattatcgtatgagcatccaatgcctcatattgcctttgaagctcaggagtcatagtagcaagcatgagacagcttatatcaagataatcattgcatcgcttttcatgctccctatgttgagcagcaggagcattattgggcaagtcagttggaaaaggctgtgtaagcacaaactctttgtgctcttgtctgaacaattctcaggttgcgataccaatccatgaagtttgttccagtcaacttctctttctcaagaatagaccgcaagttaaaactggatggtgcaggagctgccatgatctacaatagaaatatatgtatgcaaaatcagcaccatgtttacatttaacctttcattaaacaatttaacaaaagatacttccactatgtattgtgaaacaaaattccctctagtaacatagtgagtcaagatcctcattttattagtgtctaatgagctttggcatcacaactagacaactatcaaaataggtaaccaacaccttgctaatcacatcatatgtgactcttgtgctgttggggtgatatctccatgtccaacccaacctatgccccaaggtccaaaactgttttgataactttgtcaagtaaaccaataatctccgcatatagatgtctgacatctatcctattttatcatgataaaaagtgacactttgctatggcaaaccataataggtgcaattattggaagagcataaattaaacataatttttctgagggaatctatcctaccatgtcatatcaaatatataataggaataaagtaagatagatataaagccccaagcgaaatctaaggggcaatgcacacggcggtcccgctatgtgaaaaccttaacggcgtaatcaaattatgccgaaaccgagtcaatctcattggctcgtttttctcattggcgtgtggttccagtggacatcggactatccgatgaacacaatcgcgctcggccttggtgagtactagacattccagtgaagtcaccaacacacataccgattgatctcatcaacccatgcggctattagctcatctcatgttccgatcacctaagaactcatatacaacataatagatctcatctactacacctgcatatcaattatatgcaatgatctagatcataaactatacaaggcggctctgataccactgttgggatacgcgtaggctacgatagcataaatcaaaattttctattgcgtaaaccaggaaccatgcaagtattagatcataaatcgttaccactcgatgcgctgcgcagcggaagaagacgctgagaagtagaaggaactctcgcgaagtagcgcgcgtcgatgtagaggaagtagtcaatcgcaccggctcgaccttctcctcctcgtgcgttcttctcgccgtactcccacgccgatcagcaccgtaaaccagcggtgcctctactggtatccacacatacagagacagaacgccacacacagatgtgctagcacctgcgcgcggctagggttttgctcggggagggaagtgacggctagagtttctcacgtgatgcaatgcctccgctggtcacacccctcacgaatatataggatccatcactcgggcctccaaggcccataggacttctattcggatccctatgcgaattaagctcatattggatctccatccaatccccttcttccggcccattaagcgtgcgaccctgtaggtttatgtatactcggctgtaacccgaaaactccttttcagttcacgcgtcaacagcggcccctagcagaacgtattgacccattgggcatacgaaaagatcatatcggctgaacctctagtgtatacatgtatgaacccctttgcctcacgatatcgattaagctcaatgctagatatgtgccatcctctaatagcttaatcattcactcaaacctgttgatagattatataacttgtgattgactcctcaatcacctttggcatggccatgcatttccataatctacaacatcgaggggcccaaagatatctctccataggagggacaaatcccatctcgattattcatatcccactacatgtttcatagcatacccgaaaactacttttataactacccaattacagagtagcatttagcagtccctaagtaagctactacacatgttgggaaccataataatctcaagtataaggattcaacaccaacactaaatgagatcactgatgacacaacacatatggctcttgcagtgtctcatgttgggtctatccaacaacatgttcactaacatgtgtccacattattaatttggtatctctatacgatgatccatgacacatgatcatcaattaatacatgtgctgatcatctaaacatatttgttccacatatgatatttgatcaggaatcctttagaaatagcaacacataacataaagagttatgaaagaatcatatattaattaaccaataatgagtttatctatttcaaggaacaaagtcgaataaatatgtaaacatagtgtgtaatacaatcttctctatgattgcctctagcagaagaggggtgttcaatattttgatttttatcggatgtccgacgtctagtcgtctcgtagaacttccaatcattagattagaacttttaatttatatgtaaaatccatcgaatgctcactagagaggggcccatctaggcaagcatatgacagtgtgttctagtttgcctagcaacacctagcgcatcctcctctatcatagattctaacacttctagctaatgcatagtcggcatttgaactatctgaaattaaaaagtcactgattaccaattacagctaattctgaaagaatatgctgcgttaatgcgagaaaacggacctgtaggggtgaggacaggaggaattgtggcggagggtgttaggttatcgtattagtgttattaaattgctatacatttgagaaaaaatatataatggggtaaaattaagtcacaagcgtgtttatatgcatattggaaaaaaaatgaccaaagtcgttaaatattgtaaaatagtaccatcaaaatctctattcttaattaataatatcaccgaggtagagtgatgaggtcatgcagtatgaatgcagcaatgttatttctgtgtctgatttttccttatcatgagcagctgctgcatgcctgcactagaagcagcagaaatcactgcatcagcaatcctttcaactatcgtgctgtcagggagtcgagagtcgagcaggcatgtttttactgtattttccgtcctctgaacgaagccacaatgcagacgtgcagtgtggactgtcgttttggtacatggtagtagatggtacgaacagtcgtcgcaggcaatgttgacgacgtaagtgtacatgaacccatcgccttgcctctgtagatgaactgcgccccccgacccctcatggcctgtgacgcccgtgcgatctcagtggcgcggcacaacacaagcgagcacggacgcctcgacttccataatttctctctcaagggtccgtagcagggcctgatcgctcgcttaggatgcgtttgattcgtagtcaagttttgataggatacagtgatccgttttttatgagtcggtggatattattatcatccaatttttttatggatagaaggaatataatgaaaacaataacaaaatatgttattatcggaaacggatcctctattgtagagctaatactgcacaggtgctgtagcgatcaaatcaagccatctgattagattaagcggctctgattccgtccttaaacaccgaaaatatttttgataatttggaaactaacaaactgattttaaggaggaaaagtcaagatcaccttgatggagggaaaatcacgaatcctctagagtacttggcgccaaaataatacaggttctccctttgctttcttcctccttgggacttggtgccaaaaggagatacaaaggtttcactttgccttgttctgtccagaaactttgatgatcagataaagtaagccatcagtctccaacaaacaggtatgtatgccatgtcttgtactctttttgtgatcatgtcctcacaaaaaaaaaaccaaaagcattgttgtgtgattcttatgattggagtggatacactctacactcgtgtagcgctaaacagagtatacctacagatctgaggccttatggcgaacgactcaaactccaaccatcataattcaaataggtgagatcaatttcattcaggtcaacatagttttatcatctacatttttcttttctctgactatgttgttgatctcattactgaataggatcttaatcatgaccacatagcaatccatatttaacactgtatttctttgttgtaaaaaaaaaagagttgatccctgtttctttttacagcacaaatatgattcctagttggattcctcaatttggcatgaaatttaaatctacaaaagaggcatgggaattttggacttattatggaggtcgtactggttttgatgttaggataaattatgaaaataagagtaaagttgatggagtaattacttctgcaagatatgtttgttccaatgagggataccgggcaatagacaaaagagatcacaacaccaagcgtcctcgtgctaaaacaagaacaggttgcaaagctcggatcggaatcacagtagatagagaagtggacgattattcagtatatgatttagttctcgaacataaccacgaacttcaattgccttcaacatgccatttgatgccatcacagagaaagatatcatcattgcaagcatttgaaattgaaacaatggatgattcgggcattggaccaaaagctgcacatgagcttgctagtcggcaagttggtggttcagtaaaccttggttatacacgtcgtgatctcaagaaccatttaagaaccaagcgtcaaagggagttgatgtatggcgaagccggaagtatgttgaagtactttcaggacaaagttgcagagaacacttcatttcattatgcccttcagttggattgtgaagaacaaataacaaatattttttgggctgatgctaagatgataatcgactatgctcagtttggagatgttgttacttttgacacaacatttgggacaaacaaagaatacaggccctttggtgtctttgttggattcaaccattttagatagagtcatttttggagccgctcttttgtatgatgaaacatttgattctttcaaatggttgtttgagacctttttagctgtacataatcaaaaacagcctacaacaatctacacagatcaagatattgcaatgggaaaggcaattgaggtggtatttacagaagcatggattgtgcacttttcatataatgcaaaatgctatcaaacacttacctcgtaccaagaaagaagacacaaacattttgtctgatttcagtgcttgtatgtatgaatatgaagatgaagcaacttttcaggaagatttcagtaccatcagaagcaaggtgcataagcagacttggctaaacagtatatataaggtaaaagagaaatgggcggaatgctacatgaggaatgtttacacattagggatgagaagcacacagttgagtgagcttaaataatgacttgaaaaaccatctcaagtctgatcttgacattattcggtttttcaataatcttgaaagagttatcaaaggaaaacgagacaacgaattagatgcagaatatgaagcaagaaaaaaattgcctagaattaaaatgagagttcctatattggtgcaagcaagtaagatttacacaccttgtatatttgaatattttcaaaatgaatatgaaagatccatggctacatacatcaagtcatcagaacataatgaattcattgttgcaattgaggctcctggtgaagggtcaacatttgaagaggagtgcaaagttgtaggcaattatgcagagcaataggcattgtgcacctgtggacaatttgaaaggactggaatattgtgcagtcatgctttgaaagtccttgatgtgatgaatattaagtctttgccaaagagatatattttgaagcgatggactcgagaagcacgagttggtgctattgaggactgttatggcaagattgtcgtagaagatcccagattggaggataggtgcctcttgaagtttcttattcacaaatttcttggtatagctattcgagctgctgaatctaaagagtgcagcacactagtggacagtgttctagagagcctgaggaaagaagttgatgaaaaaacacctaatagtcaactaggtgaagttgcatctgaagaagcaaacggctctttgcacactgcacgtctgaagaaaaaagaaactcaaaagtgtagcacaaggagaaagaaaaattggcttgataagcagcatcccaccaaaaagaaggtacaagttgtacctgacaaacaaaatatctcggtatgttacttacgaactattcaattagactatatatgtactattcaattagactatatatgtactgattatatatagagtaatattttatctggatggttttgcttagcagcaagtgaaggattgttccatagcacagaaccaaattctggtggagaagactaatggaacgaatgagaagggatctgaagaatatggatggatcaatagctatgcagaactactgagggtattccacttatatatactaaaacttatatatttagtgcatactgtctagcagcatcaatattatttttctaattactctaattcattgtatagggtgatggcatggagcagaacatatttgatactacctggaattttgggttcagtgcaaattttgatgggagatagctagatacctgggtatcaaattgacaataacaaatcaagccattgaacatttacttttgagaacatccattcattttttttcaatgccacagaaaatttatgctatgcattcttctgtcagtttctgtcagcgtttagtactgaactattggcacacatgcagttacctttgtacatgtttccatcagagtattatgtttaatcttcctgaaaccttttcatcagagcactattttgtagagggtgtaaatgaacgatgcaacttttttagtgttacacaacttttttagtgttacactttggaataagtgtagacttcacagtgaggcgatgctctgcttatgatatttgtagaagatgtgaaatgggaggcatattgttagatgaacagcacacacatatgtataaacagagtctgaagctttcatggccttagccatgtaactgtcaagtaagtggtgggcagattgagcaaaatcagagccatctaatgtaatctgatggcttgatttaatcgctacagcacctgtgcagtattaactgtacagtagacgatccgtttccgttattatcattaacatagtcataatcatggaatattccatcctatcgtcccttacccaccaaccaaacaaacccaaaaactaaccatatctagggatatctttttaaccaaccacacccttagaccaccgtagctcacggcgcgctatcgttggacggcgttgcatggccgtggcatgtctgctaggggcaccgtggaccggtcaacggaggcaggcggcctcgaacacccggttctctcacaccttgcgtggtcgcgtctgcctgctgctctactactgcacaacaggttttcgaattggggctttgctctgtttttatgttgtctagaaaaggagaatagacaacctagtctgattggtctatggtcgcggggtgtctggtctaggtagtctctctggtcgccaattcgttcccccctctccgattcatcccgttcagcaatacgaggtgcagagtggcagcagcgcaacacagtgtgtgtgtttggggtggggtggggtgggggggttgatcttctcaactccctccgtccaaaaaaacgaacctaagactagacgtgatatattctagtacaatgaatctggacagaggtatatccagattcatagtactaggatatgtcacgtccagtcaaagttattaggaccggaccggacgtggaaccggtgaagccctcggttcacggtttgaatggctcaaccggttggaccgccggctcaacacgagtcaaatatcttcacatattaatcaaaaacatcaacgagtccatagcacagtggtgggagattacttcttgtgaccacaggtaggcaatttgaatcctatgcgcggcccttttcctcctatttttctcttctcacccatcccacgttcccactgccctgttaccggcttattccccaatttaatgtacattttttctccagttcatacctaaaaccggcggttcaatcggttttcctccggtttaattacatggccggtcttttggctggaccgcactgccctgttaccaccttattccccgatctaatgtatagttttaatgtacattttttctccagttcatacctaaaaccggcggttcaatcggttttcctccggtttaattacatggccggtcttttggctggactgcactgccctgttaccagcttattccccgatctaatgtacagtttttctccagttcatacctaaaaccggtagttcaaccggttttcctctgatttgattacatggccggtcttttggctagaccgcggaccagccgaggccagttttctccagttcatacctaataccggcggttcaactccggtttgattacatggcctgtcttttggctggaccgcggaccgaccgaggccctggttcggatcgccggtccggtccggttttaataactgtgcgtccagtaatatattggttttttatgggacggaaggagtagtgtgtaattttgctggcatcgtagaaaaataattcttaaggcctgttcagattgtagccaaaataaacctaaccaagttttggcaatgccaaaattttggcaagatatcaatattgccaaaatgttggcaggatttcttatgtattggccaaattcggccacaactaaacgtagacattttttttggcaactttgccaaaaaaaataatatatggttgaaaatagcatctgcccttagcataagggaaggggcacgcggcggaaaaaaaaaagcgtgcatcgccgccacctgactccaccgccggcctaagctagtttagcgattgccattcataagttgattttctttaagaaaaacggaaaggcatggtttcagaaggtctagttgcttccagaatcatgcaaaatatggcaaggggtgccatgcgttctatatggcactcagcaagtgccaagtgccataaaaaaaaattttctgccgcgtgtgctcctagccttctaccaactcgcgtctacaatgcgcacatggatgagtcagtggcatagggtctagggagcgacttgtacggtcattattcgattaatccctcctacaagggatcgatgaaggattttggtggagacatatcatgagggccttcatccgaacctgccaaaaccaccaatgagctgtaaaacaaccagaagccaagtctggatgaaggcgaggcccatggcgaagcacgaaggcggagcctagggcgaagcagggacgcaacttcgcacgggcccaacccgagaaggctgttaggaggcccacaacttaatagacattggttacccctgtaaatgtcaccatcataaaggcattcatataatataccctataaacaataaaccctagagggtaacagcttatactagatccatgtaatgagggatcctaaaaattttactaagtcaaaacatccaaccaagtttcatgttctttgatgagacgcaattgtcatttgacagcagatttagagataatttatttcatttttattgtggtgttgaattattttttctcaatccactccgatccctcgctcttagggattaatcgacgccactttcttgctgttggatgcataggaattgcatcgaagatgaggtcctgacgggatgaggctgggttcaagagttcaagcaaaatttagttcaactaggccttaggtaaaatgctcaatgaatagcaaaacacaaaacagcaaggtcttgagaaatctaatgatataattttgttttgaacaaaaggttttccttccctatgcatcactccttttctttctaaaattaaactacattgctactatccactaatcatcagctagaacgaaattgcttatattgccctttaaagctttatattgcaatgaatgaatctgattcagaaaaatgtcgctcatccccagattagctacaaatcggactgcaccacaacttatacctgttcatatagggtggcaaatcatattagttttgcctggatcggtagttcaaaaaaaaaatcacaacttgtatccccgaacacaacctcccaaatttgcattctctagaaacttcatcacagtttaccttaagtatttgctagtgacaaatttcatctttttcccagcagcgcataccacctaaaccctttgaagataatgagccaatcattgccaaaaggaaactaaggtcagtgcatcaacaacagaaagaataaaaagctgtgcagtcattcatgcaatccttaatatgaatggcaaggcacgaaaaaaaatatatacagcactcattcgtgcaatccataacacgaatggcaaggaagaaaagccacagctacaatttagtttcaagagaagatgttaagcgcaatttgcataccatgcaaatctatgattaacatctagtaaaaaaatgctatccctatttgcagctctgaaagagacatatatattcagtacaaggtcaggtaatgggagtctctatcacttgacagtaaatcgtaaaaagccactaagtttgattgctagataatttcaactcgtgcaacctaaagttatcactgggtgtgtatacagaattgcaagaaatatagtaagccagacaattgatagtccagcagccaccaccttttcccatactaacttgagccagaggtgcgaagttttctgcattgcagagcatgtcttgcaccaacgggtctgcaatctacatgcactaagaattaaggagcccaagatgacgatggcaacggactactaagaatgaaggaacccatggtggagatggcaatggactgcttggtgatggatctgttgttctgcaacaaatcgatccatcctgaccatgctgaaaccgagtgttatcagctgaaggatcattgcagtgggtaaaacatttttgaccatatcgattgctccattgcaggcacaaaccattagaggtgggggaaagggaagaaagtatacctgtctttttttttcaccaaataccagcagagtgacgtcaaagcaaaaatggatacaagcaaagatccacttgctagatgcagtgctcccagaatgcactcaagaacgaacaagttccaggcagatccactcgctagatccattgctcttgaggatggcagcaagaacaatcaagtggctgggacatgaggggaggtttactttggagaattacctctgcacatccgtccggaccgcccaatttcctgagccgggatcaaccacctcgccgtcaacctcaagctctaatctcgtgaatggggtgttgcgctgggaccagattagtggcgtcccatcgatttccagccctagctcatgccaccgcgcctgctttcggctgccgccgccgccgttcccccaagctccttctcccttctcctgacaagctcgccagatccagcgagaggcatcggtgggcgggcagttgcggcgcggcgaggctcaagccacgagccaccatagcaggggaggaaggggaaaaggcagcggcagggagagcaagggaggatggcatgggaacagtggctggctagggtttcgtgggagggggattggccaattgggtatgctcattttttcaaaagaacccctttctgttcgatgttttcgagcgcagttctatttttggatttttctcttcttcatataaagttttccttcttgtgaagggcctacaacaaattactaacaatgtaaagggtctttttgcaaaatctccaccctcatcatcctaccgttcaatgaagccgatcggacggcgagcgggcacaaggagggaggctgcctcccagggcgcgggggcgacgtggatagttccgcgtgcgaacacgccgccctgaatcgctctcagctcgccaattcagggcaggttttaatttaaccgatgaagtaatgaacagctagcctagtgaagtaccaggctgaaattaattatggcatcgccacagcatgcatattaactctctcaaatcataacacactcaggcactttgttcattcgcgcaatcttcaggactaacgtcatttgaattaacacgccccgcgatctgatgcggtggtggccgcgtaaatttcatgcgtgcgtcgccgccgccggccgcttgcccgctgccgcctcatttctgtgtgcgtcgctgtcgccggcctcggcgagcctagcaatttcttcgctagtaaaactggaaacgtagaggtttagttgtcaggtgtcaaaatcttgtaatggatgccatgcattctatatggcatggggtgccattgaatttcagttttttccgcaggcacccaccgagaagcttagcgcgatcaatggaaccacagcccgcgcacgggcccctcttgaagccgcggcctcatctcggcgcgactcaacggcccgggaggctggcgtgttggggtggcctggcccatccgtgcgcccggggcaccagcgcggcaccggccgaaaaagcggctgcccacgcatctgcacgcagaaaatcccagaggaataagttcaccagaggtccctcaacttaacagcaagattttctgagatccctcaaccataaaaccagaaatgttcgctcctaaactcattcaaaccattcaccggaggtcccttggcagtatttttgcctgattttggggacgtggcatcctagtcagcaaaaataataaaaaatttcgtggggcccacatgtacgtgagaaaaaaatataggatcaaccatcttagtcagcaatcttctctcttttcattttttttcttcttctctttcggcatgagtgatagcagatatgacgagcagtgagagcagtgaggcagaggggcggcgtcggcgatcgtagagggcgagcgccggcgtgcggccggagcaggcggagggccggtgtcggcggctgcaggcgatggaaagcggcggacacgcgcggtcgcagagtgcgagaggcagcgggtgacggtgcgcggctgcagcaggcggagggcggcgtcagtgggcgagcgtggctgtggcggtggcaagcggcgggcaagcggcggctttgggcttgggcggagcagaggggcggaggacgcggggtgcgcgacgacgcagatggggagcggcaacagtgtgcgactggaggcaggcggagcggcgacgtctgcggtggcaggcgagcgtggttgcggagcatcggcgttggcgggcgagaggctgacggcggagtagaaaggcagcgacgggcgagcgcggagtgagacaaggtcaccgccgccgctcggagggaggcgaggtcatcgccttgggtgcctctcgtgctgctttgacggcgggaaagatggggaaggggagggagaggactccgatgctacagtacgggaacgacgcgagtgcgcacagcgccgtgcccaggacgaggagggggagcgggcggagagacgagcgccaagccgccctgcctgacaacgacgattacgagctcccagcgccgccacacccgctcggggacgacgacgacgccgccgaccgcctgccaccgcctccttcctctcccggtctcgcccgccgtccgctccgcccgcagcccgccgccgctatgcccgccgcctgcatccgcgctcgcccgccgtccgctccgccgcagctcgccgccgcactattgtctcgctcgcccgccacccgcatccacgctctcccatcactgctgcgcccgccaccggcctgaagaagagaagagagaggagataaaagagaagggaaggagaagaaaagagaagaaaaaagatgtgcagctgacatgtgggccccacgaaattttttaatttgtttttactgactaggataccacgtcagcaaaaccaggcaaaaatactgccaagggacctccggtgaacggtttgaatgagtttaggggtaaatatttctcgttttgtgattgagggacctcaaaaaatctcgttgttaagttgagggacctccggtgaacttattccaatccccgagggcgccgctgcggagcctcgacccaagaggaaaaagtcatcgctacgctctgcgctccgctggctgtccgtccgtacgcgcaaacgagcccggtgcgtcgttgggtctaggttgggcctgctggcagcgctgtgtgtgtatgacttgtgaggaggcgtggtcctcacaataatctgttgcgctgcaatttgagttgagacctgaacggggtttactgtttccagatgcgctggcagctttctttctctatcaagccagggatctttgccatgctatctccgcgcttcgcttcgcttcgggggctgcgccgagcgtgcgtctggccttgggtccttggcccacgttgccttgcttgttggctgcggcacaccaatgctgttgctggtcaaatatatacgtgtatgtctatattaatagcgatacatccatgctgttggtggtggcaagttaggagcgacctatcagtgatatgaatcatagagatgattgtattacatactatgtttacatatttatccgatattgttccttgaaatagataacttattatttgttaatgaatatgtgattcttttatgagactctttatattgtatattgctatttctaaaggatccctgatcaaatattatatgtggaacaaacatgtttatatgatcagcacatgtattaattgataattatgtctcataaatcgtggtatagagataccaaattaataatgtggacacatgatggggaacatgttgttggatagacccaacatgagacactgcaagagtcatatgtgttgtgtcatcagtgatcttatttagtgttagtgttagtattgaatccttagacctgagattatcatggttctcaacatgtgtagtagcatacttagggactgctaaacgctactccgtaattgggtagttataaaagtagtttccgggtatgctataaaacatgtagtgggatatgaataatcaatatgggatttgcctctcctatgaagagatatatctgggcccctcgatgttataaattatggaagtgcatggccatgccaaaggtgattgaggagtcaatcacaaattatataatatatcataagttcgagtgaatgattgagctattagaggatggcacatatctagccttgagcttaatcgatattgtgaggcaaaagggttcatacaagtttacactagaggttcaaccgatatgatctttatgtatgcccggtgggtcaatacgttctgctaggggccgctgttgacacgtggaccgaaaaggaattttcgagttacagcctagtgtatacgaacctgcagggtcgcacgcttaaagggccagaataaagggattggatggagatccaatatgcactcaatcaaatagggattcgagtaggactcctatgggcctcgaaggcccagtcgcggatcctatatattcatgaggggaagtgaccggcggaattaacacaccacgtgaaaccctagccgtcactgccatccccgagcaaaccctagccgctcgtgggtgcaagcacatctgcacgtggcgttccgtccctgtatgtgtggacaccggtagaggcgccgctggtttatggtgctgatcggcatgggagtacggtgaggagaacgcaagaggaggagaaggtcgagccggtgcgatcgactacttcctctacgtcgacacgcgctacattacgagggttccttcgccttcttagtgccttcttccaccgcgcagcgcgttccaatacttgcatggttcatggtttacgcggtagaaaattttgatttatgctatcgtagcctacgcgtatcccaacacaaccgagcacttatagttaataacaagagcaagaccttcctactaatataggatggctgttg

SEQ ID NO: 21058 - DNA, 2386 bp, Oryza sativa
ttaatgtaagaatgtgggtcctccatataagggcatgtatatagtgaggatactatatagcctataccttgttgatcggtatatgcactactatagaaagttagaaacaatatttccaaacagctaaaatatatttttgtaaatgggtgtagcatctgccaacccctagctgtatgtagaaatagggatttttcaggtgggcagcataaccacatgcgaaaacaaaatattggcacggggcatgttattgccacctaactgtattttttttcatgctaaacgaaacaaaaatccccaaaattgaaatcctataaaccctagttcacctaccgagttgggtttactcactttttggggtggctcggttgcggcgggagtggtgggagtttgctcaatcatgtcgagattccttttgtcacactgcacaaccatcttttcgtttctcggtattgtgattattcctttaggtcctggaaccttaatccgctagtatgcgcagtgcgaagccccatgaattttgcaagtgccgctcttttgatgatagcattgtacgcagtgtgaaactctgctacatcaaaggtgatctgctttgtccggaagttatcagccttgccgaaagtcacaagcaacattatcttccataacaatcttgatgatgactatgtgtaacgccatggaagagctgctttgaagaaatgagctcacttctagggatccctattgcgtcaagagtatctgcaaagaggaggttgattgtgctgccatcgttgatgagaacacgtgcaactttgacattccaaatagtaggctcgactactatcggatatctatcaggggttgttatcagagaactcgatcttctgacctgaccacttcattttggacattgatacccgggatgtggagcaaacttcacgttctaccttcttgcattctcgcttaaaggaataggatgttgaaccaccgaagatgtgtgccacgtgttggtcgaagttaggaaaatctggttcgtcgtcggatgaagggtcgctgttacccttgtctcaggctattttcctagccttggctttttggaacacgttgcactcgaatatgtgagcactagtcttatgcactgaacaccattgttgttcctttgacattgatgttccttgtgtcaagtgacctgcatattgcactgtgaagactcatttccggttacctcacctgctcctgcatgaattatcttcttcagaaaatataaccacataattgatgccctacacagttcagatacttatgaagcagtaatttccacgaaacaagaacaattcaagtgaagagcacggtgctggccagggaggtcgcgcggtggccatgatttgcagtgcggggatgatgagatgtagatatcgcgtaaattcctatgcaagcaatcaacgaggaatcgccgagtgcagcagaagcacctggattccatatttccatgtgaggaacaaaaatggggagatgtggaggggcagcgacgccgagtcaatttcgcacgatgggcggtgacaggcagtgggaaatcactgaaggcggaaggcgtgtatgaaccgagggggtgagatagacgagtggttcggtcgaatcaggatgacttgaaccagaaggcggacgccgttgtcagtagcgtcccgagctagacattgataaaaatagcgtccgaaagtggatgctctttccaacggcgtccttactaattttctaattcatgccttctatttattacttgtttaattttgggattaataattctataaataaaaaatttagctcagcagcacagcactcatgtcatctaaattaccctcaattttcataacccatttacacaagagacacaagttcataactttaagtattttaaaaccccatatctccatactccataggtctacacagagcttgccacttgaccatgtggtatttcctctttttctccacaccctgccagtaaaacctccccctcactccaaccatcttcttatggaactcctcaagaagtttataaaacccatagtgaataagggaatactggaaatgcaacaagtaattctaatttccctacccccataggaaaaatatccactctgccaagaccctagcctgttttcaaaacaccctcccccctccccattgcttgatcagattgtgcatagatttggttgtgaaaataccattttttgtgtgaggccaaaatgttttatctggttcctcacttagagtaagcccacttagtaaggccataatctccccaaaactctacttgtccaagaggtccagctttcttgtagaggatatatcccaagaaacctcattagtgacttcttttgaagttgcatattgctgccttcaaattttg
